(19) United States
(12) Patent Application Publication
(10) Pub. No.: US 2019/0169691 A1
(43) Pub. Date: Jun. 6, 2019

(54) HERITABLE EPIGENETIC MODIFICATIONS AS MARKERS OF CHEMOTHERAPY EXPOSURE

(71) Applicants: Washington State University, Pullman, WA (US); Seattle Children's Hospital DBA Seatlle Children's Research Institute, Seattle, WA (US)

(72) Inventors: Michael K. Skinner, Pullman, WA (US); Margarett Shnorhavorian, Seattle, WA (US)

(21) Appl. No.: 16/274,579

(22) Filed: Feb. 13, 2019

Related U.S. Application Data
(62) Division of application No. 15/446,028, filed on Mar. 1, 2017.
(60) Provisional application No. 62/301,651, filed on Mar. 1, 2016.

(51) Int. Cl. C12Q 1/6883

(52) U.S. Cl. CPC C12Q 1/6883; C12Q 2600/154

(57) ABSTRACT

Provided herein are epigenetic modifications that are associated with prior exposure to chemotherapy agents. In particular, differential DNA methylation regions (DMRs) that are characteristic of, and can thus be used to identify and/or treat, a male subject who has undergone chemotherapy are provided. The DMRs are used to screen for pregnancy complications, infertility, and passage of heritable mutations to an infant.

### CROSS-REFERENCE TO RELATED APPLICATIONS

[0001] This application claims benefit of U.S. provisional patent application 62/301,651, filed Mar. 1, 2016, the complete contents of which is hereby incorporated by reference.

### LENGTHY TABLE

[0002] This application includes Table 10 the complete contents of the accompanying text file “Table10.txt”, created Feb. 15, 2017, containing 369 kilobytes, hereby incorporated by reference.

TABLES
The patent application contains table(s) that have been included at the end of the specification.

### BACKGROUND OF THE INVENTION

### Field of the Invention

[0003] The invention generally relates to the identification of epigenetic modifications that are associated with prior exposure to chemotherapy agents. In particular, the invention provides differential DNA methylation regions (DMRs) that are characteristic of, and can thus be used to identify and/or treat, a male subject who has undergone chemotherapy. The DMRs are used to screen for pregnancy complications, infertility, and passage of heritable mutations to an infant.

### Background of the Invention

[0004] The current paradigm for the etiology of heritable diseases, including those caused by environmental insult, is based primarily on mechanisms of genetic alterations such as DNA sequence mutations. However, the majority of inherited diseases have not been linked to specific genetic abnormalities or changes in DNA sequence. In addition, the majority of environmental factors known to cause or influence the development of disease—including heritable diseases—do not have the capacity to alter DNA sequence. Therefore, additional molecular mechanisms need to be taken into account when attempting to clarify the etiology of diseases and to develop diagnostic tools and treatments.

[0005] A factor to consider in disease etiology is the importance of early life exposures and events that are critical in later adult onset disease. These developmental origins of disease require a molecular mechanism that does not involve the induction of genetic abnormalities or alterations in DNA sequence. A molecular mechanism that has been shown to mediate the actions of environmental factors on disease is epigenetics. Epigenetics is defined as molecular factors and processes around DNA that regulate genomic activity independent of DNA sequence, and that are mitotically stable. Epigenetic processes include DNA methylation, histone modifications, chromatin structure changes, and some small RNA's.

[0006] During migration of the primordial germ cell down the genital ridge the germ cell genome (DNA) becomes demethylated upon colonization of the embryonic gonad. At the onset of gonadal sex determination the germ line then is re-methylated in a sex specific manner. Therefore, the exposure of an environmental factor during this period has the ability to alter the germ line epigenome and if permanently modified can promote a transgenerational phenotype. Therefore, the basic molecular mechanism proposed for environmentally induced epigenetic transgenerational inheritance of adult onset disease involves: 1) environmental exposure during the gonadal sex determination period; 2) alteration in the epigenetic programming (DNA methylation) of the primordial germ cell; 3) permanent alteration in the male germ line epigenome with imprinted-like programming that escapes the de-methylation of DNA at fertilization and during early embryonic development; 4) transmission of the altered sperm epigenome (DNA methylation) to subsequent generations, similar to imprinted-like sites; 5) all cell types and tissues that develop from the sperm have an altered epigenome and transcriptome specific to the cell type or tissue; and 6) increased susceptibility to develop adult onset disease. The transmission of epigenetic information between generations in the absence of any direct environmental exposures is defined as epigenetic transgenerational inheritance.

[0007] Advances in chemotherapy-based curative therapy for childhood cancer have led to a significant improvement in outcome, such that long-term survival approaches 80% [1]. This has resulted in an increasing focus on the later life effects of chemotherapy and quality of life in the growing population of survivors of childhood, adolescent and young adult (AYA) cancer. The toxic effect of cancer chemotherapy on reproductive health is one of the most important challenges faced by male childhood and AYA cancer survivors and is a leading cause of decreased quality of life in this population [2-5]. The impact of chemotherapy on subsequent generations has not been previously considered outside the realm of induced genetic mutations. The availability of ancestral environmental epigenetic biomarkers would significantly facilitate the research and development of new screening methods for the identification of subjects whose fertility has been affected by chemotherapy treatment, thus informing future fertility decisions.

### SUMMARY OF THE INVENTION

[0008] One aspect of the invention provides a method of determining if a male subject has been exposed to a chemotherapy agent comprising obtaining at least one genomic DNA sequence from a semen sample from said male subject; identifying the presence or absence of an epigenetic modification at one or more regions of said at least one genomic DNA, wherein said epigenetic modification comprises at least one differential DNA methylation region (DMR) listed in Table 6 or Table 10; and determining that said subject has been exposed to a chemotherapy agent if said epigenetic modification is identified to be present in said at least one genomic DNA sequence.

[0009] In some embodiments, the epigenetic modification comprises a plurality of DMRs selected from the group listed in Table 6 or Table 10. In other embodiments, the epigenetic modification comprises each DMR listed in Table 6 or Table 10. In some embodiments, the chemotherapy agent is at least one of cisplatin and ifosfamide.

[0010] Another aspect of the invention provides a method of screening for pregnancy complications, infertility, and passage of heritable mutations to an infant attributable to a male subject that has previously undergone chemotherapy treatment comprising obtaining at least one genomic DNA sequence from a semen sample from said male subject that has previously undergone chemotherapy treatment; identifying the presence or absence of an epigenetic modification at one or more regions of said at least one genomic DNA, wherein said epigenetic modification comprises at least one DMR listed in Table 6 or Table 10; and indicating that said subject is at high risk of infertility or of passing heritable mutations which can lead to pregnancy complications or mutations in an infant if said epigenetic modification is identified to be present in said at least one genomic DNA sequence.

[0011] In some embodiments, the epigenetic modification comprises a plurality of DMRs selected from the group listed in Table 6 or Table 10. In other embodiments, the epigenetic modification comprises each DMR listed in Table 6 or Table 10. In some embodiments, the male subject underwent chemotherapy treatment for a period of time at an age prior to reproduction. In some embodiments, the male subject underwent chemotherapy treatment for a period of time at an age from 14 and 20 years old. In some embodiments, the chemotherapy treatment comprised at least one of cisplatin and ifosfamide.

[0012] A further aspect of the invention provides a method for the early intervention and treatment of a male subject who is suspected of or who has been exposed to chemotherapy treatment, comprising obtaining at least one genomic DNA sequence from a semen sample from said male subject that has previously undergone chemotherapy treatment; identifying the presence or absence of an epigenetic modification at one or more regions of said at least one genomic DNA, wherein said epigenetic modification comprises at least one DMR listed in Table 6; indicating that said subject is at high risk of infertility or of passing heritable mutations which can lead to pregnancy complications or mutations in an infant if said epigenetic modification is identified to be present in said at least one genomic DNA sequence; and administering an appropriate treatment protocol to said subject determined to be at high risk of infertility or of passing heritable mutations which can lead to pregnancy complications or mutations in an infant.

### BRIEF DESCRIPTION OF THE DRAWINGS

[0013] FIG. 1. Human sperm chemotherapy-associated DMR chromosome location. The DMR locations on the individual chromosomes are presented as an arrowhead. Only DMR containing at least two significant sites at a p-value threshold of 1e-04 are shown. The box under the chromosome line represents statistically significant overrepresented clusters of DMR within the chromosomal size of the box.

[0014] FIG. 2. The human sperm chemotherapy-associated all site DMR locations on the individual chromosomes is presented. All site (single and multiple site) DMR are represented with an arrowhead and the DMR clusters with a box. All site DMRs at a p-value threshold of 1e-04 are shown.

[0015] FIG. 3A-B. Human sperm chemotherapy-associated DMR genomic feature and size. A) The CpG density of the DMR is presented as number of CpG/100 bp with the corresponding number of DMR. B) The DMR length in kilobase pairs (kb) is presented with the corresponding DMR number. Only DMR containing multiple significant windows at a p-value threshold of 1e-04 are shown.

[0016] FIG. 4. The human sperm chemotherapy-associated DMR associated gene classifications (i.e. functional categories). The number of DMR associated genes for specific classification categories are presented.

### DETAILED DESCRIPTION

[0017] Epigenetic transgenerational inheritance provides an alternative molecular mechanism for germ line transmission of environmentally induced phenotypic change compared to that of classic genetics. Most factors do not have the ability to modify DNA sequence, but environmental factors such as nutrition or various toxicants can influence epigenetic processes to mediate alterations in genome activity. Environmental epigenetics focuses on how a cell or organism responds to environmental factors or insults to create altered phenotypes or disease. Until the present invention, it was previously unknown how chemotherapy or radiotherapy treatment affected the epigenetic programming of a germ line and whether such impact could influence later life fertility and epigenetic inheritance.

[0018] Described herein are the altered DNA methylation profiles in the germ line (sperm) of male subjects after exposure to chemotherapy agents. In particular, Table 6 provides statistically significant epimutations, termed DMRs, that were identified in the germ line of male subjects who had undergone chemotherapy treatment. Due to the imprinted-like nature of the altered epigenetic DNA methylation sites, the germ line (sperm) transmit this epigenome phenotype to subsequent generations, which is termed epigenetic transgenerational inheritance. Without being bound by theory, the basic mechanism involves the ability of an environmental factor, such as a chemotherapeutic agent, to alter the germ line DNA methylation program to promote imprinted-like sites that then transmit an altered epigenome phenotype transgenerationally. In some cases, environmental exposures act on somatic cells at critical windows of development to influence phenotype and/or disease in the individual exposed, but this will not become transgenerational. In the event the critical window for the primordial germ cell is affected by environmental exposure, the altered germ line has the ability to promote a transgenerational phenotype for subsequent generations.

[0019] Epigenetic regulatory sites and epigenetic mutation sites (such as those involving differential DNA methylation) have profound regulatory effects on gene expression, cell function and the development of abnormal physiology and disease. The presence of such sites in the germline (e.g. sperm) can promote epigenetic transgenerational inheritance of, e.g. adult onset disease. Therefore, identification of these epimutations and/or epigenetic control regions (referred to collectively herein as “epigenetic control regions” or “ECRs”) is critical to understanding disease etiology and heritable conditions that do not follow classic Mendelian genetics, and to the diagnosis and treatment of such conditions.

[0020] Provided herein are DMRs which are useful for the identification of subjects who have undergone chemotherapy or radiotherapy treatment. In some embodiments, the methylation level is determined by a cytosine. In some embodiments, the DMRs are associated with certain genes in an individual. In some embodiments, the DMRs are associated with certain CpG loci. The CpG loci may be located in the promoter region of a gene, in an intron or exon of a gene or located near the gene in a patient's genomic DNA. In an alternate embodiment, the CpG may not be associated with any known gene or may be located in an intergenic region of a chromosome. In some embodiments, the CpG loci may be associated with one or more than one gene.

[0021] In some instances, the DMRs described herein are found in CpG desert regions of the genome, e.g. a CpG density of about 10% or less or a mean around two CpG per 100 base pairs. Due to the evolutionary conservations of CpG clusters in a CpG desert, these are likely epigenetic regulatory sites. Additional genomic features of characteristic of ECRs are described in U.S. Patent Publication 2013/0226468 incorporated herein by reference. Those of skill in the art will recognize that the “%” of a sequence of interest (e.g. CpG) means that the sequence occurs the indicated number of times per 100 base pairs analyzed, e.g. 15% or less CpG means that the dinucleotide sequence C followed by G occurs at most 15 times per 100 base pairs within a DNA segment that is analyzed. Analyses are usually carried out by iterative analysis of consecutively overlapping sequences within a large DNA molecule of interest, e.g. a chromosome, a section of a chromosome, etc.

[0022] The DMRs provided herein allow for determining if a male subject has been exposed to a chemotherapy agent comprising obtaining at least one genomic DNA sequence from a semen sample from said male subject; identifying the presence or absence of an epigenetic modification at one or more regions of said at least one genomic DNA, wherein said epigenetic modification comprises at least one differential DNA methylation region (DMR) listed in Table 6; and determining that said subject has been exposed to a chemotherapy agent if said epigenetic modification is identified to be present in said at least one genomic DNA sequence.

[0023] In some embodiments, the epigenetic modification comprises a plurality of DMRs selected from the group listed in Table 6. In other embodiments, the epigenetic modification comprises all 135 DMRs listed in Table 6. In some embodiments, the epigenetic modification consists of all 135 DMRs listed in Table 6.In some embodiments, the chemotherapy agent is at least one of cisplatin and ifosfamide.

[0024] Contemplated herein is the use of one or more DMRs listed in Table 10. Table 10 includes human sperm DMR for all DMR sites, single and multiple, at a p-value threshold of 1e-04. The DMR name, chromosome location, start and stop base pair location, length in base pair (bp), number of significant windows (100 bp), p-value, number of CpG sites, CpG sites per 100 bp, and DMR ass ociated gene symbol (annotation) are provided.

[0025] A “plurality” as used herein refers to two or more DMRs, for example, two, three, four, five, six, and every integer up to and including all 135 DMRs listed in Table 6. A plurality may also refer to two or more DMRs listed in Table 10 and every integer up to and including all DMRs listed in Table 10.

[0026] Another aspect of the invention provides a method of screening for pregnancy complications, infertility, and passage of heritable mutations to an infant attributable to a male subject that has previously undergone chemotherapy treatment comprising obtaining at least one genomic DNA sequence from a semen sample from said male subject that has previously undergone chemotherapy treatment; identifying the presence or absence of an epigenetic modification at one or more regions of said at least one genomic DNA, wherein said epigenetic modification comprises at least one DMR listed in Table 6 or Table 10; and indicating that said subject is at high risk of infertility or of passing heritable mutations which can lead to pregnancy complications or mutations in an infant if said epigenetic modification is identified to be present in said at least one genomic DNA sequence.

[0027] In some embodiments, the epigenetic modification comprises a plurality of DMRs selected from the group listed in Table 6 or Table 10. In other embodiments, the epigenetic modification comprises each DMR listed in Table 6 or Table 10. In some embodiments, the male subject underwent chemotherapy treatment for a period of time at an age prior to reproduction. In some embodiments, the male subject underwent chemotherapy treatment for a period of time at an age from 14 and 20 years old, e.g. at 14, 15, 16, 17, 18, 19, and 20 years old. In some embodiments, the subject was under 14 years old or above 20 years old at the time of treatment. In some embodiments, the chemotherapy treatment comprised at least one of cisplatin and ifosfamide.

[0028] “Epimutation” and “epigenetic modification” as used herein refer to modifications of cellular DNA that affect gene expression without altering the DNA sequence. The epigenetic modifications are both mitotically and meiotically stable, i.e. after the DNA in a cell (or cells) of an organism has been epigenetically modified, the pattern of modification persists throughout the lifetime of the cell and is passed to progeny cells via both mitosis and meiosis. Therefore, with the organism's lifetime, the pattern of DNA modification and consequences thereof, remain consistent in all cells derived from the parental cell that was originally modified. Further, if the epigenetically modified cell undergoes meiosis to generate gametes (e.g. sperm), the pattern of epigenetic modification is retained in the gametes and thus inherited by offspring. In other words, the patterns of epigenetic DNA modification are transgenerationally transmissible or inheritable, even though the DNA nucleotide sequence per se has not been altered or mutated. Without being bound by theory, it is believed that enzymes known as methyltransferases shepherd or guide the DNA through the various phases of mitosis or meiosis, reproducing epigenetic modification patterns on new DNA strands as the DNA is replicated. Exemplary epigenetic modifications include, but are not limited, to DNA methylation, histone modifications, chromatin structure modifications, and non-coding RNA modifications, etc.

[0029] Epigenetic modifications may be caused by exposure to any of a variety of factors, examples of which include but are not limited to: chemical compounds e.g. endocrine disruptors such as vinclozolin; chemicals such as those used in the manufacture of plastics e.g. bispheol A (BPA); bis(2-ethylhexyl)phthalate (DEHP); dibutyl phthalate (DBP); insect repellants such as N, N-diethyl-meta-toluamide (DEET); pyrethroids such as permethrin; various polychlorinated dibenzodioxins, known as PCDDs or dioxins e.g. 2,3,7,8-tetrachlorodibenzo-p-dioxin (TCDD); extreme conditions such as abnormal nutrition, starvation, etc. In preferred embodiments, the subject of the invention has been exposed to one or more chemotherapeutic agents which include alkylating agents such as ifosfamide and cyclophosphamide, anthracyclines such as daunorubicin and doxorubicine, taxanes such as paclitaxel and docetaxel, epothilones, histone deacetylase inhibitors, topoisomerase inhibitors, kinase inhibitors such as gefitinib, platinum-based agents such as cisplatin, retinoids, and vinca alkaloids, etc. These agents may be used to treat a variety of cancers, including but not limited to, an osteosarcoma, lymphoma, melanoma, etc.

[0030] Methods of identifying DMRs in genomic DNA are well known to one skilled in the art. For example, microarray based methylome profiling and bioinformatics data analysis may be used to analyze DNA methylation profiles. In some embodiments, the microarray chip is a tiling array chip. In some embodiments, Methylated DNA immunoprecipitation (MeDIP) followed by next generation sequencing (NGS) is used. In some embodiments, MeDIP-Chip is used. Additional methods for detecting methylation levels can involve genomic sequencing before and after treatment of the DNA with bisulfite. When sodium bisulfite is contacted to DNA, unmethylated cytosine is converted to uracil, while methylated cytosine is not modified. Bisulfite methods may also be used in conjunction with pyrosequencing and PCR. Computer executable algorithms and software programs for implementing the same are also encompassed by the invention. Such software programs generally contain instructions for causing a computer to carry out the steps of the methods disclosed herein. The computer program will be embedded in a non-transient medium such as a hard drive, DVD, CD, thumb drive, etc.

[0031] The invention also provides kits for the detection and/or quantification of the epigenetic modification described herein using the methods described herein. In some embodiments, the kit comprises at least one polynucleotide that hybridizes to one of the DMR loci identified in Table 6 or Table 10 (or a nucleic acid sequence at least 90% identical to the DMR loci of Table 6 or Table 10), or that hybridizes to a region of DNA flanking one of the DMR loci identified in Table 6 or Table 10, and at least one reagent for detection of gene methylation, Reagents for detection of methylation include, e.g., sodium bisulfite, polynucleotides designed to hybridize to sequence at or near the DMR loci of the invention if the sequence is not methylated, and/or a methylation-sensitive or methylation-dependent restriction enzyme. The kits can provide solid supports in the form of an assay apparatus that is adapted to use in the assay. The kit may further comprise detectable labels, optionally linked to a polynucleotide, e.g., a probe, in the kit. Other materials useful in the performance of the assays can also be included in the kit, including test tubes, transfer pipettes, and the like. The kit can also include written instructions for the use of one or more of these reagents in any of the assays described herein.

[0032] Selection and identification of a subject for analysis may be predicated on and/or influenced by any number of factors. For example, the subject or subjects may be known or suspected to be afflicted with a disease or condition associated with epigenetic mutations; or who have been or are suspected of having been exposed to an agent that causes, or is suspected of causing, epigenetic mutations; or who have inexplicably inherited a disease or disease condition from a parent for which no DNA sequence mutation has been identified, etc. Subjects whose DNA is analyzed may be of any age, and in any stage of development, so long as cells containing a DNA sequence of interest can be obtained from the subject. For example, the subject may be an adult, an adolescent, a laboratory animal, etc. The cells from which the DNA is obtained may be any suitable cell, including but not limited to gametes, cells from swabs such as buccal swabs, cells sloughed into amniotic fluid, etc.

[0033] The genomic features described herein may be used in a variety of applications. For example, the DMRs of the invention can be indicative of having, the risk of having, or the risk of developing infertility or a condition that could lead to pregnancy complications and/or passage of heritable mutations to an infant. Thus the methods of the invention may be used, for example, in an in vitro fertilization clinic setting to test sperm for epimutations and for the potential to pass epigenetic information to offspring. The methods of the invention are also useful for screening potential sperm donors at a donation center. Further applications include screening applicants for health insurance coverage.

[0034] The DMRs of the invention can serve as biomarkers to be used e.g. in disease diagnosis and/or to detect environmental exposures to agents or conditions that cause epimutations and/or to monitor therapeutic responsiveness to a medicament or treatment and/or used as prognostic indicators. The detection of epigenetic modifications at the regions described herein (i.e. a positive diagnostic result) will suggest or confirm that the subject has, indeed, likely been exposed to chemotherapy and/or radiotherapy treatments, and treatments suitable for said exposure, or the effects of said exposure, can be instituted. For example, chemotherapy exposure may result in a low sperm count in the male patient leading to infertility. Thus, an appropriate infertility treatment, such as surgical extraction of sperm, may be implemented. In some instances, a male subject may cryopreserve a sperm sample before or shortly after undergoing chemotherapy and/or radiotherapy treatment. In other instances, a male subject may decide to utilize a sperm donor due to the subject's infertility or to prevent the possibility of pregnancy complications and/or the passage of heritable mutations to an infant attributable to the male subject.

[0035] Information concerning the type and extent of epigenetic modification in a subject may be used in a variety of decision making processes undertaken by a subject that is tested. For example, depending on the severity of the symptoms caused by an epigenetic modification that is identified, a subject may decide to forego having children or to terminate a pregnancy in order to prevent transmission of the modification to offspring. Diagnostic tests based on the present invention can be included in prenatal testing.

[0036] Thus, an aspect of the invention provides a method for the early intervention and treatment of a male subject who is suspected of or who has been exposed to chemotherapy treatment, comprising obtaining at least one genomic DNA sequence from a semen sample from said male subject that has previously undergone chemotherapy treatment; identifying the presence or absence of an epigenetic modification at one or more regions of said at least one genomic DNA, wherein said epigenetic modification comprises at least one DMR listed in Table 6 or Table 10; indicating that said subject is at high risk of infertility or of passing heritable mutations which can lead to pregnancy complications or mutations in an infant if said epigenetic modification is identified to be present in said at least one genomic DNA sequence; and administering an appropriate treatment protocol to said subject determined to be at high risk of infertility or of passing heritable mutations which can lead to pregnancy complications or mutations in an infant.

[0037] In contrast, a negative result (no epigenetic modification at the site) suggests that the subject has not been exposed to chemotherapy and/or radiotherapy treatments (or at least that the exposure did not result in damage). If it is known that exposure did occur, then prophylactic screening of a DNA sample from a patient can result in early identification of a risk of disease and lead to early therapeutic intervention. In addition, ongoing monitoring of the extent of epigenetic modification of a site can provide valuable information regarding the outcome of the administration of agents (e.g. drugs or other therapies) which are intended to treat or prevent a condition caused by epimutation, i.e. the therapeutic responsiveness of a patient. Those of skill in the art will recognize that such analyses are generally carried out by comparing the results obtained using an unknown or experimental sample with results obtained a using suitable negative or positive controls, or both.

[0038] Subjects whose DNA is analyzed may be suffering from any of a variety of disorders (diseases, conditions, etc.) including but not limited to: various known late or adult onset conditions, such as low sperm production, infertility, abnormalities of sexual organs, kidney abnormalities, prostate disease, immune abnormalities, behavioral effects, etc. In other embodiments, no symptoms are present but screening using the diagnostics is employed to rule out the presence of “silent” epigenetic mutations which could cause disease symptoms in the future, or which could be inherited and cause deleterious effects in offspring.

[0039] The DMRs described herein may also be used to screen and identify therapeutic modalities for the treatment of epigenetic mutations due to chemotherapy and/or radiotherapy exposure. Those of skill in the art will recognize that such methods of screening are typically carried out in vitro, e.g. using a DNA sequence that is immobilized in a vessel, or that is present in a cell. However, such tests may also be carried out in model laboratory animals. In one embodiment, candidate agents which reverse epigenetic modification are screened by analyzing the regions. In another embodiment, candidate agents which prevent epigenetic modifications are screened by analyzing the regions. In this way, the epigenetic biomarkers described herein can be used to facilitate, e.g. drug development and clinical trials patient stratification (i.e. pharmacoepigenomics).

[0040] Before exemplary embodiments of the present invention are described in greater detail, it is to be understood that this invention is not limited to particular embodiments described, as such may, of course, vary. It is also to be understood that the terminology used herein is for the purpose of describing particular embodiments only, and is not intended to be limiting, since the scope of the present invention will be limited only by the appended claims.

[0041] Where a range of values is provided, it is understood that each intervening value, to the tenth of the unit of the lower limit unless the context clearly dictates otherwise, between the upper and lower limit of that range and any other stated or intervening value in that stated range, is encompassed within the invention. The upper and lower limits of these smaller ranges may independently be included in the smaller ranges and are also encompassed within the invention, subject to any specifically excluded limit in the stated range. Where the stated range includes one or both of the limits, ranges excluding either or both of those included limits are also included in the invention.

[0042] Unless defined otherwise, all technical and scientific terms used herein have the same meaning as commonly understood by one of ordinary skill in the art to which this invention belongs. Although any methods and materials similar or equivalent to those described herein can also be used in the practice or testing of the present invention, representative illustrative methods and materials are now described.

[0043] All publications and patents cited in this specification are herein incorporated by reference as if each individual publication or patent were specifically and individually indicated to be incorporated by reference and are incorporated herein by reference to disclose and describe the methods and/or materials in connection with which the publications are cited. The citation of any publication is for its disclosure prior to the filing date and should not be construed as an admission that the present invention is not entitled to antedate such publication by virtue of prior invention. Further, the dates of publication provided may be different from the actual publication dates which may need to be independently confirmed.

[0044] It is noted that, as used herein and in the appended claims, the singular forms “a”, “an”, and “the” include plural referents unless the context clearly dictates otherwise. It is further noted that the claims may be drafted to exclude any optional element. As such, this statement is intended to serve as antecedent basis for use of such exclusive terminology as “solely,” “only” and the like in connection with the recitation of claim elements, or use of a “negative” limitation.

[0045] As will be apparent to those of skill in the art upon reading this disclosure, each of the individual embodiments described and illustrated herein has discrete components and features which may be readily separated from or combined with the features of any of the other several embodiments without departing from the scope or spirit of the present invention. Any recited method can be carried out in the order of events recited or in any other order which is logically possible.

[0046] The invention is further described by the following non-limiting example which further illustrates the invention, and is not intended, nor should it be interpreted to, limit the scope of the invention.

### EXAMPLE

### Differential DNA Methylation Regions in Adult Human Sperm Following Adolescent Chemotherapy

### ABSTRACT

[0047] The potential that adolescent chemotherapy can impact the epigenetic programming of the germ line to influence later life adult fertility and promote epigenetic inheritance was investigated. Adult males approximately ten years after pubertal exposure to chemotherapy were compared to adult males with no previous exposure. Sperm were collected to examine differential DNA methylation regions (DMR) between the exposed and control populations. A signature of statistically significant DMRs was identified in the chemotherapy exposed male sperm. The DMRs, termed epimutations, were found in CpG desert regions of primarily 1 kilobase size. Gene associations and correlations to genetic mutations (copy number variation) were also investigated. Observations indicate adolescent chemotherapy exposure can promote epigenetic alterations that persist in later life. This is the first observation in humans that an early life chemical exposure can permanently reprogram the spermatogenic stem cell epigenome. The germline (i.e. sperm) epimutations identified suggest chemotherapy can promote epigenetic inheritance to the next generation.

### INTRODUCTION

[0048] Previous studies have demonstrated transient early life toxicant exposures can influence later life health effects and epigenetic reprogramming of the germline in animal models [6-8]. Epigenetics is defined as “molecular factors or processes around DNA that regulate genome activity independent of DNA sequence and are mitotically stable” [6,9]. The currently known epigenetic mechanisms include DNA methylation, histone modifications, selected non-coding RNA and chromatin structure [6]. Although the vast majority of environmental factors can not alter DNA sequence, most have the ability to alter epigenetic programming during development [6,9]. Early developmental exposures have been shown to alter the epigenetic programming of cells associated with a number of adult onset diseases [6,9-11]. Environmentally-induced DNA methylation changes in Sertoli or granulosa cells have been shown to associate with testis and ovarian disease in the adult [12,13]. Environmental epigenetics provides a molecular mechanism for the developmental origins of disease [9]. In the event the altered epigenetic programming occurs in the germline (sperm or egg), the altered epigenetics (e.g. epimutations) have the potential to be transmitted between generations [6-8,14]. A number of studies have demonstrated that environmental factors (e.g. toxicants and nutrients) following fetal exposure can alter the germline epigenome (e.g. DNA methylation) to then transmit epimutations to subsequent generations [8,14].

[0049] When the germline transmission of epigenetic information occurs between multiple generations in the absence of continuous exposure this is considered to be environmentally-induced epigenetic transgenerational inheritance [6,7]. This form of non-genetic inheritance is due to the germline transmission of epigenetic information. A number of studies have shown that numerous environmental toxicants such as fungicides [7], plastics [15], pesticides [7] and hydrocarbons [16] can promote the epigenetic transgenerational inheritance of disease [6]. The transgenerational disease observed includes testis, ovary, prostate, mammary, kidney and brain disease [17,18]. The majority of these transgenerational studies have observed correlations between the phenotypes and differential DNA methylation alterations in the sperm [14]. Therefore, early life environmental exposures can influence the epigenetic programming of the sperm and have the ability to promote epigenetic inheritance to subsequent generations.

[0050] The generational impact of chemotherapy has not been thoroughly investigated. Therefore, the current study was designed to investigate the actions of chemotherapy on pubertal males that potentially promote an alteration in epigenetic programming that will result in adult male sperm having epimutations. This requires the spermatogonial stem cell population in the testis to be affected permanently to produce later life effects on the sperm epigenome. Osteosarcoma is one of the most common cancers in this population treated with agents such as cisplatin and ifosfamide. This population provides a useful model to investigate potential chemotherapy induced effects on later life reproductive health. Previous studies have demonstrated altered DNA methylation profiles in control versus infertile human male sperm [19]. The presence of sperm epimutations due to adolescent chemotherapy also would suggest for the first time the potential for epigenetic inheritance to the next generation.

### RESULTS

[0051] Characteristics of the chemotherapy-exposed patients and controls including age of semen collection, specific chemotherapy and sperm quality are presented in Tables 1 and 2. The age of exposure ranged 14 to 20 years and the chemotherapy was cisplatin with some also including ifosfamide. Upon collection the sperm numbers ranged from 7 to 518 million total with the control population mean of 280 million total per individual and the chemotherapy-exposed mean of 77.8 million total per individual. Therefore, there was a general reduction in sperm number in the chemotherapy-exposed population, as previously described [2,3].

TABLE 1
Patient Information. Information for the chemotherapy treated
and control individuals with treatment age, sperm collection age,
chemotherapy used and total sperm number presented.

| | | Collection | Sperm # | |
|---|---|---|---|---|
| ID # | Chemotherapy | Age (yr) | (Total Millions) | Pool # |
| CIS-051 | N/A | 40 | 240.5 | 1 |
| CIS-056 | N/A | 38 | 303.6 | 1 |
| CIS-061 | N/A | 32 | 44.2 | 1 |
| CIS-063 | N/A | 33 | 675 | 2 |
| CIS-067 | N/A | 39 | 262 | 2 |
| CIS-073 | N/A | 37 | 280.4 | 2 |
| CIS-068 | N/A | 33 | 21 | 3 |
| CIS-072 | N/A | 40 | 181.2 | 3 |
| CIS-074 | N/A | 37 | 518 | 3 |
| B006-249 | Cisplatin/Ifosfamide | 27 | ND* | 4 |
| CIS-002 | Cisplatin | 24 | 100.2 | 4 |
| CIS-025 | Cisplatin | 26 | 170.5 | 4 |
| CIS-028 | Cisplatin | 26 | 178 | 5 |
| CIS-034 | Cisplatin | 24 | 7.34 | 5 |
| CIS-043 | Cisplatin/Ifosfamide | 30 | 42 | 5 |
| CIS-033 | Cisplatin | 25 | 21 | 6 |
| CIS-044 | Cisplatin | 19 | 49 | 6 |
| CIS-046 | Cisplatin | 24 | 55 | 6 |

*ND indicates not determined

TABLE 2
Patient Information. Average and range for the chemotherapy treated
patients and controls presented for age at collection, age at treatment,
cisplatin dose (milligrams/meter squared), ifosfamide dose and seminal
fluid volume. Note that one patient that got 120 mg/m2 dose of cisplatin
also got 800 mg/m2 of carboplatin which is in the same class of drugs as
cisplatin. The B006 chemotherapy case sperm count was not determined
(ND).

| | Chemotherapy | |
|---|---|---|
| | Cases | Controls |
| Average (Mean) Age at sample | 24.78 | 36.01 |
| Age Range at Sample | 19.12 to 29.86 | 27.5 to 44.4 |
| Average (Mean) Age at | 16.3 | NA |
| Treatment | | |
| Age Range at Treatment | 14.47 to 19.63 | NA |
| Average Cisplatin Dose mg/m² | 389.33 mg/m² | NA |
| Cisplatin Dose Range mg/m² | 120* mg/m² to | NA |
| | 480 mg/m² | |
| Average Ifosfamide Dose mg/m² | 30.5 mg/m² | NA |
| Range Ifosfamide Dose mg/m² | 30.5 mg/m² to | NA |
| | 30.5 mg/m² | |
| Seminal Fluid Volume—Average | 2.23 ml | 2.41 ml |
| Seminal Fluid Volume—Range | 0.6 to 5.0 | 0.3 to 7.5 |
| # individuals with Normal | 6 out of 9 | 6 out of 9 |
| SF parameters | | |

NA indicates not applicable

[0052] DNA from the semen samples was isolated and equal amounts of DNA from 3 individuals pooled to generate three different pools of control (no previous chemotherapy) and three different pools of adolescent chemotherapy exposed cancer survivors labeled human sperm pools (HS#) #1 through #6. The pooled DNA was immunoprecipitated with 5 methyl cytosine monoclonal antibody for a methylated DNA immunoprecipitation (MeDIP). The MeDIP DNA was used to generate libraries and bar coded (index primers) separately for analysis by next generation sequencing (MeDIPSeq).

[0053] A high read number and alignment proportion was obtained (Table 3). The differential DNA methylation regions (DMRs) were identified using the MEDIPS R package as outlined in the Methods. The DMRs include single sites as well as multiple sites. The DMRs for all sites and multiple sites are shown for a variety of statistical pvalue thresholds in Table 4. The p_{<}10⁻⁴ was selected for further analysis and due to the potential for false positives in single sites the multiple site p<10⁻⁴ was used for subsequent analysis and discussion. The more variable single sites are likely important, but the more stringently selected multiple site DMRs are used to convey the general observations. Therefore, the 2831 single sites and 135 multiple sites are discussed. The distribution of the DMR according to number of multiple sites is presented in Table 5 and the list of DMRs is shown in Table 6. The majority were single site DMRs with the bulk of the multiple site DMR having two sites. Interestingly, one DMR (DMR3:198096901) had 73 multiple windows on chromosome 3, none of which were associated with a known gene (Table 6). Observations demonstrate the adolescent chemotherapy exposure induced reproducible human sperm epimutations.

TABLE 3
DMR number and characteristics. The number of reads present for each sample pool (HS #)
and overall alignment rate calculated by bowtie2.
Read number and alignment

| | HS1 | HS2 | HS3 | HS4 | HS5 | HS6 |
|---|---|---|---|---|---|---|
| Read Number | 127916479 | 116715381 | 60181475 | 67042941 | 78944306 | 126030851 |
| Alignment % | 97.90 | 97.77 | 97.77 | 97.92 | 96.19 | 97.19 |

TABLE 4
DMR number and characteristics. The number of DMRs
found using different edgeR p-value cutoff thresholds.
DMR number

| p-value | Total DMR | Multiple Site DMR |
|---|---|---|
| 0.001 | 20526 | 1551 |
| 1.00E−04 | 2831 | 135 |
| 1.00E−05 | 463 | 24 |
| 1.00E−06 | 76 | 6 |
| 1.00E−07 | 15 | 2 |

TABLE 5
DMR number and characteristics. The number of DMR with associated
specific number of significant sites at a p-value threshold of <10⁻⁴.
Site number associated with DMR

| | Number of Significant Sites | | | | | | | |
|---|---|---|---|---|---|---|---|---|
| | 1 | 2 | 3 | 4 | 5 | 6 | 8 | 73 |
| Number of DMR | 2696 | 110 | 13 | 5 | 4 | 1 | 1 | 1 |

TABLE 6
Human sperm chemotherapy-associated DMR list for multiple site DMR at
p < 10⁻⁴. The DMR name, chromosomal location, start site, length in base pair (bp), CpG density
(CpG/100 bp), and size associated is listed. The absence (not applicable, NA) of one or more
gene listed under “Gene Association” indicates an intergenic DMR location.
Multiple Site DMR
List

| | | | | | | | CpG | |
|---|---|---|---|---|---|---|---|---|
| | | | Length | | min P | CpG | Density | Gene |
| DMR Name | Chr | Start | (bp) | Windows | Value | # | (#/100 bp) | Association |
| DMR1:12173801 | 1 | 12173801 | 1400 | 2 | 4.08E−05 | 27 | 1.9 | TNERSF1B |
| DMRI:14192301 | 1 | 14192301 | 900 | 2 | 5.38E−05 | 6 | 0.6 | |
| DMR1:104846301 | 1 | 104846301 | 2500 | 2 | 5.56E−05 | 26 | 1 | |
| DMR1:154878801 | 1 | 154878801 | 700 | 2 | 1.08E−05 | 22 | 3.1 | |
| DMR1:175491101 | 1 | 175491101 | 3200 | 2 | 1.49E−05 | 47 | 1.4 | TNR |
| DMR1:215393901 | 1 | 215393901 | 500 | 2 | 6.42E−05 | 26 | 5.2 | RP11-199H2.2 |
| DMR1:224010101 | 1 | 224010101 | 4700 | 2 | 9.49E−06 | 108 | 2.2 | RP11-504P24.3 |
| DMR1:238863501 | 1 | 238863501 | 2100 | 2 | 1.33E−07 | 8 | 0.3 | |
| DMR2:2189101 | 2 | 2189101 | 1100 | 4 | 6.30E−07 | 35 | 3.1 | MYTIL |
| DMR2:35752601 | 2 | 35752601 | 4600 | 2 | 8.10E−06 | 24 | 0.5 | |
| DMR2:95550301 | 2 | 95550301 | 1300 | 2 | 3.14E−06 | 29 | 2.2 | |
| DMR2:144492201 | 2 | 144492201 | 1400 | 2 | 1.52E−06 | 11 | 0.7 | ZEB2 |
| DMR2:238198201 | 2 | 238198201 | 1100 | 2 | 3.28E−06 | 8 | 0.7 | ILKAP |
| DMR3:44495901 | 3 | 44495901 | 1400 | 2 | 4.11E−05 | 21 | 1.5 | |
| DMR3:55470001 | 3 | 55470001 | 1000 | 2 | 7.95E−07 | 35 | 3.5 | WNT5A |
| DMR3:113198301 | 3 | 113198301 | 200 | 2 | 4.33E−05 | 2 | 1 | |
| DMR3:198096901 | 3 | 198096901 | 10900 | 73 | 9.27E−30 | 397 | 3.6 | |
| DMR4:31437301 | 4 | 31437301 | 2600 | 2 | 9.28E−06 | 51 | 1.9 | |
| DMR4:146592201 | 4 | 146592201 | 400 | 2 | 1.71E−05 | 2 | 0.5 | |
| DMR4:186476501 | 4 | 186476501 | 1900 | 2 | 8.09E−06 | 17 | 0.8 | F11-AS1; |
| | | | | | | | | RP11-215A19. [symbol] |
| DMR4:188443001 | 4 | 188443001 | 6600 | 2 | 1.70E−06 | 99 | 1.5 | LINC01060 |
| DMR5:164501 | 5 | 164501 | 2200 | 3 | 8.79E−06 | 142 | 6.4 | PLEKHG4B |
| DMR5:561701 | 5 | 561701 | 3900 | 3 | 1.46E−07 | 396 | 10 | |
| DMR5:3879101 | 5 | 3879101 | 2700 | 2 | 6.99E−05 | 32 | 1.1 | |
| DMR5:4311001 | 5 | 4311001 | 700 | 3 | 9.20E−06 | 19 | 2.7 | |
| DMR5:9122501 | 5 | 9122501 | 700 | 2 | 1.21E−05 | 27 | 3.8 | SEMA5A |
| DMR5:23303701 | 5 | 23303701 | 1700 | 2 | 7.07E−05 | 44 | 2.5 | CTD-2272G21. [symbol] |
| DMR5:30068101 | 5 | 30068101 | 2900 | 2 | 1.28E−07 | 38 | 1.3 | |
| DMR5:55530601 | 5 | 55530601 | 500 | 2 | 2.89E−05 | 28 | 5.6 | PPAP2A; |
| | | | | | | | | RNF138P1 |
| DMR5:57549501 | 5 | 57549501 | 1400 | 2 | 1.42E−05 | 15 | 1 | |
| DMR5:77912901 | 5 | 77912901 | 1300 | 2 | 3.39E−05 | 24 | 1.8 | |
| DMR5:134314001 | 5 | 134314001 | 900 | 2 | 3.23E−05 | 10 | 1.1 | CTD-2410N18. [symbol] |
| | | | | | | | | CDKL3 |
| DMR5:151531101 | 5 | 151531101 | 1000 | 3 | 2.76E−06 | 44 | 4.4 | FAT2 |
| DMR5:162993101 | 5 | 162993101 | 800 | 2 | 1.10E−06 | 10 | 1.2 | |
| DMR6:1514701 | 6 | 1514701 | 1100 | 2 | 1.70E−05 | 38 | 3.4 | RP11-157J24.1 |
| DMR6:5092901 | 6 | 5092901 | 300 | 2 | 4.79E−05 | 7 | 0.6 | |
| DMR6:5792601 | 6 | 5792601 | 2400 | 2 | 1.74E−05 | 23 | 0.9 | |
| DMR6:31326001 | 6 | 31326001 | 1000 | 2 | 3.38E−05 | 17 | 1.7 | HLA-C |
| DMR6:31814701 | 6 | 31814701 | 3700 | 3 | 1.17E−05 | 217 | 5.8 | HSPA1L; |
| | | | | | | | | HSPA1A |
| DMR6:31828001 | 6 | 31828001 | 1600 | 2 | 2.62E−05 | 130 | 8.1 | HSPA1B |
| DMR6:58560701 | 6 | 58560701 | 2100 | 2 | 4.49E−06 | 37 | 1.7 | |
| DMR6:58593201 | 6 | 58593201 | 3200 | 2 | 6.04E−09 | 60 | 1.8 | |
| DMR6:59033701 | 6 | 59033701 | 600 | 2 | 3.44E−11 | 13 | 2.1 | |
| DMR6:59163101 | 6 | 59163101 | 1600 | 2 | 2.73E−06 | 34 | 2.1 | |
| DMR6:59274801 | 6 | 59274801 | 3200 | 2 | 1.30E−07 | 57 | 1.7 | |
| DMR6:59342901 | 6 | 59342901 | 1500 | 4 | 3.08E−06 | 36 | 2.4 | |
| DMR6:59565501 | 6 | 59565501 | 1000 | 2 | 5.85E−06 | 12 | 1.2 | |
| DMR6:59688201 | 6 | 59688201 | 200 | 2 | 7.98E−08 | 5 | 2.5 | |
| DMR6:116616001 | 6 | 116616001 | 300 | 2 | 3.05E−06 | 10 | 3.3 | |
| DMR6:167702601 | 6 | 167702601 | 2900 | 2 | 4.71E−05 | 70 | 2.4 | |
| DMR7:49018601 | 7 | 49018601 | 700 | 3 | 9.21E−07 | 14 | 2 | |
| DMR7:77441801 | 7 | 77441801 | 400 | 2 | 9.98E−07 | 6 | 1.5 | |
| DMR7:87205701 | 7 | 87205701 | 2300 | 2 | 3.39E−05 | 37 | 1.6 | TMEM243 |
| DMR7:101239401 | 7 | 101239401 | 1600 | 2 | 6.96E−06 | 66 | 4.1 | FIS1 |
| DMR7:109351301 | 7 | 109351301 | 400 | 2 | 1.94E−05 | 9 | 2.2 | |
| DMR7:158556901 | 7 | 158556901 | 1100 | 2 | 5.39E−06 | 65 | 5.9 | PTPRN2 |
| DMR8:7556101 | 8 | 7556101 | 500 | 2 | 8.30E−06 | 25 | 5 | |
| DMR8:27797501 | 8 | 27797501 | 500 | 2 | 5.39E−05 | 3 | 0.6 | ESCO2 |
| DMR8:44360401 | 8 | 44360401 | 300 | 2 | 3.67E−05 | 6 | 2 | |
| DMR8:45815901 | 8 | 45815901 | 300 | 2 | 9.64E−09 | 7 | 2.3 | |
| DMR8:45927501 | 8 | 45927501 | 6800 | 2 | 3.41E−06 | 122 | 1.7 | |
| DMR8:99694501 | 8 | 99694501 | 3100 | 3 | 5.63E−06 | 68 | 2.1 | VPS13B; |
| | | | | | | | | AC018442.1 |
| DMR8:126213701 | 8 | 126213701 | 300 | 2 | 1.09E−05 | 2 | 0.6 | |
| DMR8:142938801 | 8 | 142938801 | 1400 | 2 | 3.03E−05 | 55 | 3.9 | |
| DMR9:28333101 | 9 | 28333101 | 1100 | 2 | 3.09E−06 | 8 | 0.7 | LINGO2 |
| DMR9:40951901 | 9 | 40951901 | 500 | 2 | 4.31E−05 | 16 | 3.2 | |
| DMR9:41424201 | 9 | 41424201 | 600 | 2 | 7.72E−07 | 5 | 0.8 | |
| DMR9:95044801 | 9 | 95044801 | 1100 | 2 | 5.16E−07 | 50 | 4.5 | NPEPO |
| DMR9:98644001 | 9 | 98644001 | 1100 | 2 | 1.78E−05 | 12 | 1 | GABBR2 |
| DMR10:1197701 | 10 | 1197701 | 3100 | 8 | 1.51E−09 | 70 | 2.2 | ADARB2 |
| DMR10:15012201 | 10 | 15012201 | 1700 | 2 | 8.22E−05 | 42 | 2.4 | |
| DMR10:30846501 | 10 | 30846501 | 2900 | 2 | 6.76E−05 | 40 | 1.3 | ZNF438 |
| DMR10:32731701 | 10 | 32731701 | 400 | 2 | 3.00E−05 | 14 | 3.5 | CCDC7 |
| DMR10:73117601 | 10 | 73117601 | 300 | 2 | 1.77E−05 | 1 | 0.3 | NUDT13 |
| DMR10:90990401 | 10 | 90990401 | 400 | 2 | 8.86E−05 | 4 | 1 | |
| DMR10:123691901 | 10 | 123691901 | 800 | 2 | 1.57E−05 | 4 | 0.5 | GPR26 |
| DMR10:127538001 | 10 | 127538001 | 1800 | 2 | 2.69E−05 | 28 | 1.5 | |
| DMR10:129343401 | 10 | 129343401 | 2100 | 3 | 6.38E−06 | 49 | 2.3 | |
| DMR10:130440901 | 10 | 130440901 | 1100 | 2 | 2.10E−05 | 29 | 2.6 | RP11-540N6.1 |
| DMR11:484301 | 11 | 484301 | 4300 | 2 | 2.10E−06 | 312 | 7.2 | PTDSS2 |
| DMR11:47036401 | 11 | 47036401 | 1700 | 2 | 8.45E−06 | 33 | 1.9 | C11orf49 |
| DMR11:95437501 | 11 | 95437501 | 400 | 2 | 1.72E−05 | 8 | 2 | |
| DMR12:81062701 | 12 | 81062701 | 400 | 2 | 4.28E−07 | 2 | 0.5 | ACSS3 |
| DMR12:95948901 | 12 | 95948901 | 300 | 2 | 1.85E−05 | 3 | 1 | AMDHD1 |
| DMR12:130657401 | 12 | 130657401 | 2600 | 2 | 1.48E−05 | 80 | 3 | RP11-662M24. [symbol] |
| DMR13:63935201 | 13 | 63935201 | 300 | 2 | 8.12E−05 | 3 | 1 | |
| DMR13:98815001 | 13 | 98815001 | 3000 | 2 | 6.61E−05 | 41 | 1.3 | DOCK9 |
| DMR13:104088001 | 13 | 104088001 | 500 | 2 | 2.27E−07 | 7 | 1.4 | |
| DMR14:19433401 | 14 | 19433401 | 3600 | 3 | 2.54E−06 | 137 | 3.8 | POTEG |
| DMR14:38737701 | 14 | 38737701 | 300 | 2 | 1.02E−06 | 5 | 1.6 | |
| DMR14:46935601 | 14 | 46935601 | 300 | 2 | 5.76E−06 | 2 | 0.6 | MDGA2 |
| DMR14:62802301 | 14 | 62802301 | 500 | 2 | 1.46E−07 | 8 | 1.6 | KCNH5 |
| DMR15:20756701 | 15 | 20756701 | 2500 | 2 | 4.04E−05 | 46 | 1.8 | |
| DMR15:21172601 | 15 | 21172601 | 3800 | 4 | 4.00E−07 | 119 | 3.1 | |
| DMR15:21325001 | 15 | 21325001 | 5800 | 2 | 1.57E−06 | 135 | 2.3 | RP11-32B5.7; |
| | | | | | | | | RP11-275E15.2 |
| DMR15:73775201 | 15 | 73775201 | 300 | 2 | 3.11E−06 | 6 | 2 | |
| DMR15:88274701 | 15 | 88274701 | 300 | 2 | 7.18E−05 | 4 | 1.3 | |
| DMR15:88930701 | 15 | 88930701 | 400 | 3 | 9.67E−09 | 1 | 0.2 | |
| DMR16:2603101 | 16 | 2603101 | 1600 | 5 | 6.45E−07 | 77 | 4.8 | AC141586.5; |
| | | | | | | | | PDPK1 |
| DMR16:14910901 | 16 | 14910901 | 2800 | 5 | 9.51E−06 | 217 | 7.7 | MIR3180-1; |
| | | | | | | | | NPIPA3 |
| DMR16:61463701 | 16 | 61463701 | 1200 | 2 | 2.76E−06 | 2 | 0.1 | |
| DMR16:85972901 | 16 | 85972901 | 1200 | 2 | 3.25E−05 | 95 | 7.9 | |
| DMR17:121701 | 17 | 121701 | 6300 | 2 | 1.17E−05 | 115 | 1.8 | |
| DMR17:8836901 | 17 | 8836901 | 2500 | 2 | 3.82E−06 | 53 | 2.1 | PIK3R6 |
| DMR17:46382701 | 17 | 46382701 | 1600 | 2 | 1.94E−05 | 14 | 0.8 | NSFP1 |
| DMR17:68151901 | 17 | 68151901 | 900 | 2 | 4.81E−05 | 30 | 3.3 | LRRC37A16P |
| DMR18:8634901 | 18 | 8634901 | 200 | 2 | 1.21E−05 | 1 | 0.5 | RAB12 |
| DMR18:14484901 | 18 | 14484901 | 5100 | 2 | 1.18E−05 | 181 | 3.5 | GRAMD4P7; |
| | | | | | | | | CXADRP3 |
| DMR18:46969701 | 18 | 46969701 | 200 | 2 | 2.87E−05 | 18 | 9 | KATNAL2; |
| | | | | | | | | TCEB3CL |
| DMR18:59752001 | 18 | 59752001 | 300 | 2 | 1.46E−06 | 3 | 1 | |
| DMR18:65609101 | 18 | 65609101 | 600 | 2 | 2.08E−05 | 19 | 3.1 | RP11-775G23.1 |
| DMR18:70848101 | 18 | 70848101 | 900 | 2 | 1.62E−05 | 13 | 1.4 | |
| DMR18:76003301 | 18 | 76003301 | 2800 | 2 | 2.92E−07 | 39 | 1.3 | |
| DMR19:756801 | 19 | 756801 | 1600 | 2 | 3.50E−06 | 76 | 4.7 | MISP |
| DMR19:37842601 | 19 | 37842601 | 2500 | 2 | 1.14E−05 | 36 | 1.4 | AC016582.2 |
| DMR19:43206901 | 19 | 43206901 | 400 | 2 | 2.88E−06 | 16 | 4 | PSG4 |
| | | | | | | | | CARD8; |
| DMR19:48181401 | 19 | 48181401 | 1600 | 2 | 7.54E−06 | 51 | 3.1 | ZNF114; C19 |
| DMR19:52916701 | 19 | 52916701 | 4200 | 5 | 3.66E−10 | 101 | 2.4 | ZNF888 |
| DMR19:54772001 | 19 | 54772001 | 6000 | 4 | 8.20E−06 | 62 | 1 | KIR2DL1; |
| | | | | | | | | KIR3DL1: CT [symbol] |
| DMR20:2311001 | 20 | 2311001 | 800 | 2 | 7.56E−06 | 7 | 0.8 | TGM3 |
| DMR20:61964901 | 20 | 61964901 | 1500 | 2 | 8.95E−08 | 82 | 5.4 | TAF4 |
| DMR20:64131901 | 20 | 64131901 | 2700 | 3 | 1.68E−08 | 15 | 0.5 | |
| DMR21:7916001 | 21 | 7916001 | 26500 | 5 | 1.05E−06 | 710 | 2.6 | |
| DMR21:10652801 | 21 | 10652801 | 38000 | 3 | 9.10E−06 | 829 | 2.1 | |
| DMR21:42955701 | 21 | 42955701 | 200 | 2 | 2.98E−05 | 12 | 6 | |
| DMR21:44158201 | 21 | 44158201 | 1800 | 2 | 1.96E−05 | 51 | 2.8 | AP001055.6 |
| DMR22:11248401 | 22 | 11248401 | 8500 | 2 | 1.87E−05 | 383 | 4.5 | 5_8S_rRNA; |
| | | | | | | | | AC137488.1 |
| DMR22:32203601 | 22 | 32203601 | 3800 | 2 | 3.66E−06 | 159 | 4.1 | RP1-90G24.10 |
| DMR22:48701801 | 22 | 48701801 | 3100 | 2 | 3.52E−05 | 92 | 2.9 | FAM19A5 |
| DMRX:666401 | X | 666401 | 1000 | 2 | 1.66E−05 | 18 | 1.8 | |
| DMRX:1041801 | X | 1041801 | 9200 | 4 | 1.75E−06 | 164 | 1.7 | |
| DMRX:1235401 | X | 1235401 | 1100 | 2 | 1.72E−05 | 98 | 8.9 | |
| DMRX:3865201 | X | 3865201 | 3100 | 2 | 8.41E−05 | 83 | 2.6 | RP11-706015. [symbol] |
| DMRX:115191101 | X | 115191101 | 1500 | 6 | 5.42E−07 | 128 | 8.5 | LRCH2; |
| | | | | | | | | RBMXL3 |
| DMRY:11559901 | Y | 11559901 | 33000 | 3 | 9.16E−06 | 910 | 2.7 | |

[symbol]

indicates data missing or illegible when filed

[0054] The chromosomal location of the sperm DMRs/epimutations is presented in FIG. 1. The DMRs were present on all chromosomes with a number of statistically over-represented clusters of DMRs indicated with the black box below the line. This epimutation signature was reproducible between the different human sperm pools. As a comparison the chromosomal plot of the single site DMRs is presented in FIG. 2. The single site DMR density was greater, but interestingly several regions in chromosome 1, 9, 13, 14, 15 were void of DMRs. In addition a larger number of DMR clusters were observed in all chromosomes (FIG. 2). The list of p<10⁻⁴ multiple site DMR is presented in Table 6. The current study demonstrates a signature of statistically significant epimutations that are present in the adolescent chemotherapy-exposure population. There may also be differential effects between different chemotherapies and periods of developmental exposure.

[0055] A genomic feature identified in all previously detected environmentally induced epimutations was a region of low density CpG content termed a CpG desert [20]. Analysis of the CpG content of the chemotherapy-associated human sperm epimutations identified between 1-3 CpG per 100 bp density with only one DMR having a greater than 10 CpG/100 bp (FIG. 3A and Table 6). Therefore, a CpG desert was a genomic feature of the chemotherapy-associated sperm DMRs. The epimutations were predominantly 1 kb in size with only a few greater than 6 kb in size (FIG. 3B and Table 6). Therefore, the genomic features of the human sperm epimutations identified were similar to those previously identified in other species [20].

[0056] The potential that molecular variation within each of the study populations may contribute to the DMR identified was investigated. Analysis of the internal population variation in the unexposed and exposed populations separately identified 114 and 50 single site DMR respectively. The three individual pools of each population were compared between each other to identify the internal population variation in DMR. The majority of internal population variation is anticipated to be hypervariable DMR, termed metastable epialleles [21], and none of these internal population DMR overlapped with the exposed versus unexposed DMR dataset. Therefore, internal population variation does not account for the chemotherapy associated DMR identified in sperm.

[0057] Analysis of a genetic mutation (copy number variation, CNV) was performed to determine the genetic CNV variation in the exposed versus unexposed comparison. Only 3 CNV were detected in the comparison. Although variable CNV were detected within the different pools of the populations, Table 7, comparison of the exposed versus unexposed populations identified minimal alterations present in all pool comparisons. None of the CNV were associated or overlapped with the DMR identified. Therefore, genetic CNV variation does not appear to be a cause for the epigenetic differences observed.

TABLE 7
HS3) control and chemotherapy exposed (HS4, HS5, HS6) population pools are listed.
Overlapping CNV between control and chemotherapy exposed population: 3 CNV.
CNV analysis summary for the human sperm
Read Mapping Summary:

| | HS1 | HS2 | HS3 | HS4 | HS5 | HS6 |
|---|---|---|---|---|---|---|
| Read Number | 32352587 | 27963740 | 32524539 | 22628164 | 30272531 | 36013163 |
| Overall Alignment Rate | 97A1% | 7889% | 9676% | 9303% | 86 87% | 9447% |

Overall CNV Numbers:

| | 1 | 10 | 11 | 12 | 13 | 14 | 16 | 2 | 20 | 21 | 3 | 4 |
|---|---|---|---|---|---|---|---|---|---|---|---|---|
| HS1 | 7 | 1 | 14 | 4 | 3 | 7 | 2 | 4 | 4 | 5 | 7 | 8 |
| HS2 | 84 | 24 | 57 | 61 | 44 | 44 | 35 | 68 | 20 | 23 | 61 | 30 |
| HS3 | 110 | 48 | 35 | 22 | 26 | 34 | 41 | 77 | 24 | 18 | 65 | 50 |
| HS4 | 3 | 1 | 1 | 0 | 2 | 0 | 5 | 0 | 3 | 3 | 1 | 1 |
| HS5 | 5 | 3 | 3 | 2 | 0 | 2 | 0 | 1 | 4 | 1 | 2 | 1 |
| HS6 | 10 | 4 | 15 | 6 | 3 | 7 | 12 | 5 | 5 | 5 | 6 | 8 |
| | 5 | 6 | 7 | 8 | 9 | X | 15 | 18 | 19 | 22 | Y | 17 |
| HS1 | 5 | 3 | 8 | 5 | 12 | 2 | 0 | 0 | 0 | 0 | 0 | 0 |
| HS2 | 54 | 34 | 57 | 38 | 44 | 10 | 36 | 14 | 2 | 25 | 8 | 0 |
| HS3 | 53 | 39 | 43 | 46 | 21 | 14 | 17 | 23 | 33 | 21 | 0 | 43 |
| HS4 | 6 | 0 | 0 | 2 | 1 | 0 | 0 | 0 | 12 | 1 | 0 | 4 |
| HS5 | 1 | 0 | 1 | 1 | 4 | 0 | 2 | 0 | 0 | 2 | 0 | 0 |
| HS6 | 7 | 3 | 13 | 6 | 9 | 1 | 0 | 0 | 0 | 2 | 0 | 4 |

The number of reads present for each sample and the overall alignment rate calculated by bowtie2.
The number of CNV found separated by sample and chromosome

[0058] The gene associations with the DMRs are listed in Table 8 and the complete list with information in Tables 6 and 9. Approximately 50% of the DMRs had associations with genes indicating half the epimutations are intergenic and distal from genes. Previously some DMRs have been suggested to potentially act as epigenetic control regions and distally regulate expression through ncRNA mechanisms for 2-5 Mbase regions [22]. The genes associated with chemotherapy-associated DMRs are present in numerous gene classifications with no major category being overrepresented (Tables 8 and 9). The number of DMR associated with specific gene classification categories are presented in FIG. 4. The DMR associated genes were analyzed for correlated known gene pathways. No specific pathway or cellular process was found to have more than four associated genes. These results suggest that the chemotherapy induced sperm DMR can alter genome activity.

TABLE 8
DMR associated gene list and categories. The specific DMR, associated
gene symbol and classification category are presented. Some DMR are
associated with multiple genes which are listed. DMR associated genes
with unknown classification only are not listed.

| DMR Name | Gene Association | Category |
|---|---|---|
| DMR2:238198201 | ILKAP | Signaling |
| DMR5:164501 | PLEKHG4B | Signaling |
| DMR5:55530601 | PPAP2A | Signaling |
| | RNF138P1 | Unknown |
| DMR5:9122501 | SEMA5A | Signaling |
| DMR7:158556901 | PTPRN2 | Signaling |
| DMR8:99694501 | VPS13B | Signaling |
| | AC018442.1 | Unknown |
| DMR13:98815001 | DOCK9 | Signaling |
| DMR16:2603101 | PDPK1 | Signaling |
| | AC141586.5 | Unknown |
| DMR17:8836901 | PIK3R6 | Signaling |
| DMR18:8634901 | RAB12 | Signaling |
| DMR10:73117601 | NUDT13 | Metabolism |
| DMR11:484301 | PTDSS2 | Metabolism |
| DMR12:81062701 | ACSS3 | Metabolism |
| DMR12:95948901 | AMDHD1 | Metabolism |
| DMR14:46935601 | MDGA2 | Metabolism |
| DMR20:2311001 | TGM3 | Metabolism |
| DMR2:2189101 | MYT1L | Transcription |
| DMR2:144492201 | ZEB2 | Transcription |
| DMR10:30846501 | ZNF438 | Transcription |
| DMR10:32731701 | CCDC7 | Transcription |
| DMR19:52916701 | ZNF888 | Transcription |
| DMR20:61964901 | TAF4 | Transcription |
| DMR4:186476501 | F11-AS1 | Epigenetic |
| | RP11-215A19.2 | Unknown |
| DMR4:188443001 | LINC01060 | Epigenetic |
| DMR8:27797501 | ESCO2 | Epigenetic |
| DMR16:14910901 | MIR3180-1 | Epigenetic |
| | NPIPA3 | Unknown |
| | RP11-958N24.1 | Unknown |
| | NPIPA1 | Unknown |
| DMR1:175491101 | TNR | ECM |
| DMR5:151531101 | FAT2 | ECM |
| DMR9:28333101 | LINGO2 | ECM |
| DMR19:43206901 | PSG4 | ECM |
| DMR1:12173801 | TNFRSF1B | Receptor |
| DMR9:98644001 | GABBR2 | Receptor |
| DMR10:123691901 | GPR26 | Receptor |
| DMR6:31814701 | HSPA1L | Protein |
| | | Binding |
| | HSPA1A | Protein |
| | | Binding |
| DMR6:31828001 | HSPA1B | Protein |
| | | Binding |
| DMR5:134314001 | CDKL3 | Cell Cycle |
| | CTD-2410N18.4 | Unknown |
| DMR19:756801 | MISP | Cell Cycle |
| DMR18:46969701 | KATNAL2 | Cytoskeleton |
| | TCEB3CL | Transcription |
| DMRX:115191101 | LRCH2 | Cytoskeleton |
| | RBMXL3 | Translation |
| DMR6:31326001 | HLA-C | Immune |
| DMR19:54772001 | KIR2DL1 | Immune |
| | KIR3DL1 | Immune |
| | CTB-61M7.1 | Unknown |
| DMR7:87205701 | TMEM243 | Mitochondria |
| DMR7:101239401 | FIS1 | Mitochondria |
| DMR10:1197701 | ADARB2 | Translation |
| DMR22:11248401 | 5_8S_rRNA | Translation |
| | AC137488.1 | Unknown |
| DMR19:48181401 | CARD8 | Apoptosis |
| | ZNF114 | Transcription |
| | C19orf68 | Unknown |
| DMR3:55470001 | WNT5A | Development |
| DMR22:48701801 | FAM19A5 | Growth |
| | | Factor |
| DMR12:130657401 | RIMBP2 | Misc. |
| | RP11-662M24.2 | Unknown |
| | RP11-662M24.1 | Unknown |
| DMR9:95044801 | NPEPO | Proteolysis |
| DMR14:62802301 | KCNH5 | Transport |

TABLE 9
Human sperm chemotherapy-associated DMR associated genes. The DMR
name, gene symbol, chromosome location start and end position, Ensembl number, gene
description and classification category are presented.
Multiple Site DMR Associated Genes

| | | | start | end | | | Classification |
|---|---|---|---|---|---|---|---|
| DMR Name | Gene Symbol | Chr | position | position | Ensembl # | Gene Description | Category |
| DMR1:12173801 | TNFRSF1B | 1 | 12167003 | 12209228 | ENSG00000028137 | tumor necrosis | Receptor |
| | | | | | | factor receptor | |
| | | | | | | superfamily— | |
| | | | | | | member 1B | |
| DMR1:175491101 | TNR | 1 | 175315194 | 175743770 | ENSG00000116147 | tenascin R | ECM |
| DMR1:215393901 | RP11-199H2.2 | 1 | 215393646 | 215394418 | ENSG00000282265 | NA | Unknown |
| DMR1:224010101 | RP11-504P24.3 | 1 | 223992743 | 224010612 | ENSG00000185495 | NA | Unknown |
| DMR2:2189101 | MYT1L | 2 | 1789113 | 2331260 | ENSG00000186487 | myelin | Transcription |
| | | | | | | transcription | |
| | | | | | | factor 1-like | |
| DMR2:144492201 | ZEB2 | 2 | 144384081 | 144524583 | ENSG00000169554 | zinc finger E-box | Transcription |
| | | | | | | binding homeobox | |
| | | | | | | 2 | |
| DMR2:238198201 | ILKAP | 2 | 238170401 | 238203729 | ENSG00000132323 | integrin-linked | Signaling |
| | | | | | | kinase-associated | |
| | | | | | | serine/threonine | |
| | | | | | | phosphatase | |
| DMR3:55470001 | WNT5A | 3 | 55465715 | 55490539 | ENSG00000114251 | wingless-type | Development |
| | | | | | | MMTV | |
| | | | | | | integration site | |
| | | | | | | family—member | |
| | | | | | | 5A | |
| DMR4:186476501 | F11-AS1 | 4 | 186286094 | 186500997 | ENSG00000251165 | F11 antisense | Epigenetic |
| | | | | | | RNA 1 | |
| DMR4:186476501 | RP11-215A19.2 | 4 | 186426546 | 186555328 | ENSG00000272297 | Uncharacterized | Unknown |
| | | | | | | protein | |
| DMR4:188443001 | LINC01060 | 4 | 188400736 | 188681051 | ENSG00000249378 | long intergenic | Epigenetic |
| | | | | | | non-protein | |
| | | | | | | coding RNA 1060 | |
| DMR5:164501 | PLEKHG4B | 5 | 140258 | 189970 | ENSG00000153404 | pleckstrin | Signaling |
| | | | | | | homology domain | |
| | | | | | | containing— | |
| | | | | | | family G (with | |
| | | | | | | RhoGef domain) | |
| | | | | | | member 4B | |
| DMR5:9122501 | SEMA5A | 5 | 9035026 | 9546075 | ENSG00000112902 | sema domain— | Signaling |
| | | | | | | seven | |
| | | | | | | thrombospondin | |
| | | | | | | repeats (type 1 and | |
| | | | | | | type 1-like)— | |
| | | | | | | transmembrane | |
| | | | | | | domain (TM) | |
| DMR5:23303701 | CTD-2272G21.2 | 5 | 23303565 | 23305143 | ENSG00000250332 | NA | Unknown |
| DMR5:55530601 | PPAP2A | 5 | 55424854 | 55535050 | ENSG00000067113 | phosphatidic acid | Signaling |
| | | | | | | phosphatase type | |
| | | | | | | 2A | |
| DMR5:55530601 | RNF138P1 | 5 | 55530156 | 55530701 | ENSG00000250853 | ring finger protein | Unknown |
| | | | | | | 138—E3 ubiquitin | |
| | | | | | | protein ligase | |
| | | | | | | pseudogene 1 | |
| DMR5:134314001 | CTD-2410N18.4 | 5 | 134205614 | 134371044 | ENSG00000273345 | NA | Unknown |
| DMR5:134314001 | CDKL3 | 5 | 134286350 | 134371047 | ENSG00000006837 | cyclin-dependent | Cell Cycle |
| | | | | | | kinase-like 3 | |
| DMR5:151531101 | FAT2 | 5 | 151504093 | 151568944 | ENSG00000086570 | FAT atypical | ECM |
| | | | | | | cadherin 2 | |
| DMR6:1514701 | RP11-157J24.1 | 6 | 1513698 | 1515289 | ENSG00000218027 | NA | Unknown |
| DMR6:31326001 | HLA-C | 6 | 31268749 | 31357158 | ENSG00000204525 | major | Immune |
| | | | | | | histocompatibility | |
| | | | | | | complex—class | |
| | | | | | | 1-C | |
| DMR6:31814701 | HSPA1L | 6 | 31809619 | 31815065 | ENSG00000204390 | heat shock 70 kDa | Protein Binding |
| | | | | | | protein 1-like | |
| DMR6:31814701 | HSPA1A | 6 | 31815464 | 31817946 | ENSG00000204389 | heat shock 70 kDa | Protein Binding |
| | | | | | | protein 1A | |
| DMR6:31828001 | HSPA1B | 6 | 31827735 | 31830255 | ENSG00000204388 | heat shock 70 kDa | Protein Binding |
| | | | | | | protein 1B | |
| DMR7:87205701 | TMEM243 | 7 | 87196160 | 87220587 | ENSG00000135185 | transmembrane | Mitochondria |
| | | | | | | protein 243— | |
| | | | | | | mitochondrial | |
| DMR7:101239401 | FIS1 | 7 | 101239458 | 101252316 | ENSG00000214253 | fission 1 | Mitochondria |
| | | | | | | (mitochondrial | |
| | | | | | | outer membrane) | |
| | | | | | | homolog (S. | |
| | | | | | | cerevisiae) | |
| DMR7:158556901 | PTPRN2 | 7 | 157539056 | 158587788 | ENSG00000155093 | protein tyrosine | Signaling |
| | | | | | | phosphatase— | |
| | | | | | | receptor type—N | |
| | | | | | | polypeptide 2 | |
| DMR8:27797501 | ESCO2 | 8 | 27771949 | 27812640 | ENSG00000171320 | establishment of | Epigenetic |
| | | | | | | sister chromatid | |
| | | | | | | cohesion N- | |
| | | | | | | acetyltransferase 2 | |
| DMR8:99694501 | VPS13B | 8 | 99013266 | 99877580 | ENSG00000132549 | vacuolar protein | Signaling |
| | | | | | | sorting 13 | |
| | | | | | | homolog B (yeast) | |
| DMR8:99694501 | AC018442.1 | 8 | 99695957 | 99698017 | ENSG00000235683 | NA | Unknown |
| DMR9:28333101 | LINGO2 | 9 | 27948078 | 28670286 | ENSG00000174482 | leucine rich repeat | ECM |
| | | | | | | and Ig domain | |
| | | | | | | containing 2 | |
| DMR9:95044801 | NPEPO | 9 | 94726701 | 95087218 | ENSG00000148120 | chromosome 9 | Proteolysis |
| | | | | | | open reading | |
| | | | | | | frame 3 | |
| DMR9:98644001 | GABBR2 | 9 | 98288109 | 98709197 | ENSG00000136928 | gamma- | Receptor |
| | | | | | | aminobutyric acid | |
| | | | | | | (GABA) B | |
| | | | | | | receptor—2 | |
| DMR10:1197701 | ADARB2 | 10 | 1177318 | 1737476 | ENSG00000185736 | adenosine | Translation |
| | | | | | | deaminase—RNA- | |
| | | | | | | specific—B2 (non- | |
| | | | | | | functional) | |
| DMR10:30846501 | ZNF438 | 10 | 30820207 | 31031937 | ENSG00000183621 | zinc finger protein | Transcription |
| | | | | | | 438 | |
| DMR10:32731701 | CCDC7 | 10 | 32567723 | 32882874 | ENSG00000150076 | coiled-coil domain | Transcription |
| | | | | | | containing 7 | |
| DMR10:73117601 | NUDT13 | 10 | 73110375 | 73131828 | ENSG00000166321 | nudix (nucleoside | Metabolism |
| | | | | | | diphosphate linked | |
| | | | | | | moiety X)-type | |
| | | | | | | motif 13 | |
| DMR10:123691901 | GPR26 | 10 | 123666355 | 123694607 | ENSG00000154478 | G protein-coupled | Receptor |
| | | | | | | receptor 26 | |
| DMR10:130440901 | RP11-540N6.1 | 10 | 130439067 | 130483154 | ENSG00000236303 | NA | Unknown |
| DMR11:484301 | PTDSS2 | 11 | 448268 | 491399 | ENSG00000174915 | phosphatidylserine | Metabolism |
| | | | | | | synthase 2 | |
| DMR11:47036401 | C11orf49 | 11 | 46936689 | 47164385 | ENSG00000149179 | chromosome 11 | Unknown |
| | | | | | | open reading | |
| | | | | | | frame 49 | |
| DMR12:81062701 | ACSS3 | 12 | 80936414 | 81261205 | ENSG00000111058 | acyl-CoA | Metabolism |
| | | | | | | synthetase short- | |
| | | | | | | chain family | |
| | | | | | | member 3 | |
| DMR12:95948901 | AMDHD1 | 12 | 95943293 | 95968716 | ENSG00000139344 | amidohydrolase | Metabolism |
| | | | | | | domain containing | |
| | | | | | | 1 | |
| DMR12:130657401 | RP11-662M24.2 | 12 | 130628316 | 130716281 | ENSG00000256725 | NA | Unknown |
| DMR12:130657401 | RIMBP2 | 12 | 130396137 | 130716281 | ENSG00000060709 | RIMS binding | Misc. |
| | | | | | | protein 2 | |
| DMR12:130657401 | RP11-662M24.1 | 12 | 130651371 | 130669233 | ENSG00000256343 | NA | Unknown |
| DMR13:98815001 | DOCK9 | 13 | 98793487 | 99086625 | ENSG00000088387 | dedicator of | Signaling |
| | | | | | | cytokinesis 9 | |
| DMR14:19433401 | POTEG | 14 | 19402486 | 19434341 | ENSG00000187537 | POTE ankyrin | Unknown |
| | | | | | | domain family— | |
| | | | | | | member G | |
| DMR14:46935601 | MDGA2 | 14 | 46839629 | 47674954 | ENSG00000139915 | MAM domain | Metabolism |
| | | | | | | containing | |
| | | | | | | glycosylphosphati | |
| | | | | | | dylinositol anchor | |
| | | | | | | 2 | |
| DMR14:62802301 | KCNH5 | 14 | 62699454 | 63102037 | ENSG00000140015 | potassium channel— | Transport |
| | | | | | | voltage gated eag | |
| | | | | | | related subfamily | |
| | | | | | | H—member 5 | |
| DMR15:21325001 | RP11-32B5.7 | 15 | 21298233 | 21325241 | ENSG00000247765 | NA | Unknown |
| DMR15:21325001 | RP11-275E15.2 | 15 | 21328380 | 21343881 | ENSG00000280881 | NA | Unknown |
| DMR16:2603101 | AC141586.5 | 16 | 2603350 | 2630494 | ENSG00000215154 | NA | Unknown |
| DMR16:2603101 | PDPK1 | 16 | 2537964 | 2603188 | ENSG00000140992 | 3- | Signaling |
| | | | | | | phosphoinositide | |
| | | | | | | dependent protein | |
| | | | | | | kinase 1 | |
| DMR16:14910901 | MIR3180-1 | 16 | 14911220 | 14911313 | ENSG00000265537 | microRNA 3180-1 | Epigenetic |
| DMR16:14910901 | NPIPA3 | 16 | 14708944 | 14952073 | ENSG00000224712 | nuclear pore | Unknown |
| | | | | | | complex | |
| | | | | | | interacting protein | |
| | | | | | | family—member | |
| | | | | | | A3 | |
| DMR16:14910901 | RP11-958N24.1 | 16 | 14911551 | 14935708 | ENSG00000183458 | NA | Unknown |
| DMR16:14910901 | NPIPA1 | 16 | 14750813 | 14952060 | ENSG00000183426 | nuclear pore | Unknown |
| | | | | | | complex | |
| | | | | | | interacting protein | |
| | | | | | | family—member | |
| | | | | | | A1 | |
| DMR17:8836901 | PIK3R6 | 17 | 8802723 | 8867677 | ENSG00000276231 | phosphoinositide- | Signaling |
| | | | | | | 3-kinase— | |
| | | | | | | regulatory subunit | |
| | | | | | | 6 | |
| DMR17:46382701 | NSFP1 | 17 | 46372855 | 46487141 | ENSG00000260075 | N-ethylmaleimide- | Unknown |
| | | | | | | sensitive factor | |
| | | | | | | pseudogene 1 | |
| DMR17:68151901 | LRRC37A16P | 17 | 68125777 | 68152468 | ENSG00000267023 | leucine rich repeat | Unknown |
| | | | | | | containing 37— | |
| | | | | | | member A16— | |
| | | | | | | pseudogene | |
| DMR17:68151901 | RP11-147L13.7 | 17 | 68152776 | 68159043 | ENSG00000267708 | NA | Unknown |
| DMR18:8634901 | RAB12 | 18 | 8609445 | 8639381 | ENSG00000206418 | RAB12—member | Signaling |
| | | | | | | RAS oncogene | |
| | | | | | | family | |
| DMR18:14484901 | GRAMD4P7 | 18 | 14485806 | 14487501 | ENSG00000266242 | GRAM domain | Unknown |
| | | | | | | containing 4 | |
| | | | | | | pseudogene 7 | |
| DMR18:14484901 | CXADRP3 | 18 | 14477955 | 14499278 | ENSG00000265766 | coxsackie virus | Unknown |
| | | | | | | and adenovirus | |
| | | | | | | receptor | |
| | | | | | | pseudogene 3 | |
| DMR18:46969701 | KATNAL2 | 18 | 46917492 | 47102243 | ENSG00000167216 | katanin p60 | Cytoskeleton |
| | | | | | | subunit A-like 2 | |
| DMR18:46969701 | TCEB3CL | 18 | 46968695 | 47029842 | ENSG00000275553 | transcription | Transcription |
| | | | | | | elongation factor | |
| | | | | | | B polypeptide 3C- | |
| | | | | | | like | |
| DMR18:65609101 | RP11-775G23.1 | 18 | 65606090 | 65652053 | ENSG00000265217 | NA | Unknown |
| DMR19:756801 | MISP | 19 | 751126 | 764318 | ENSG00000099812 | mitotic spindle | Cell Cycle |
| | | | | | | positioning | |
| DMR19:37842601 | AC016582.2 | 19 | 37823722 | 37855215 | ENSG00000225868 | NA | Unknown |
| DMR19:4320690I | PSG4 | 19 | 43192702 | 43207299 | ENSG00000243137 | pregnancy specific | ECM |
| | | | | | | beta-1- | |
| | | | | | | glycoprotein 4 | |
| DMR19:48181401 | CARD8 | 19 | 48180770 | 48255946 | ENSG00000105483 | caspase | Apoptosis |
| | | | | | | recruitment | |
| | | | | | | domain family— | |
| | | | | | | member 8 | |
| DMR19:48181401 | ZNF114 | 19 | 48172318 | 48287608 | ENSG00000178150 | zinc finger protein | Transcription |
| | | | | | | 114 | |
| DMR19:48181401 | C19orf68 | 19 | 48170692 | 48197620 | ENSG00000185453 | chromosome 19 | Unknown |
| | | | | | | open reading | |
| | | | | | | frame 68 | |
| DMR19:52916701 | ZNF888 | 19 | 52915196 | 52923470 | ENSG00000213793 | zinc finger protein | Transcription |
| | | | | | | 888 | |
| DMR19:54772001 | KIR2DL1 | 19 | 54769811 | 54784322 | ENSG00000125498 | killer cell | Immune |
| | | | | | | immunoglobulin- | |
| | | | | | | like receptor—two | |
| | | | | | | domains—long | |
| | | | | | | cytoplasmic tail— | |
| | | | | | | 1 | |
| DMR19:54772001 | KIR3DL1 | 19 | 54724497 | 54867215 | ENSG00000167633 | killer cell | Immune |
| | | | | | | immunoglobulin- | |
| | | | | | | like receptor— | |
| | | | | | | three domains— | |
| | | | | | | long cytoplasmic | |
| | | | | | | tail—1 | |
| DMR19:54772001 | CTB-61M7.1 | 19 | 54724496 | 54798285 | ENSG00000215765 | | Unknown |
| DMR20:2311001 | TGM3 | 20 | 2296001 | 2341078 | ENSG00000125780 | transglutaminase 3 | Metabolism |
| | | | | | | [Source: HGNC | |
| | | | | | | Symbol; Acc: HGN | |
| | | | | | | C:11779] | |
| DMR20:61964901 | TAF4 | 20 | 61953469 | 62065810 | ENSG00000130699 | TAF4 RNA | Transcription |
| | | | | | | polymerase II— | |
| | | | | | | TATA box | |
| | | | | | | binding protein | |
| | | | | | | (TBP)-associated | |
| | | | | | | factor—135 kDa | |
| DMR21:44158201 | AP001055.6 | 21 | 44158740 | 44160076 | ENSG00000225331 | NA | Unknown |
| DMR22:11248401 | 5_8S_rRNA | 22 | 11249809 | 11249959 | ENSG00000276871 | 5.8S ribosomal | Translation |
| | | | | | | RNA | |
| | | | | | | [Source: RFAM; | |
| | | | | | | Acc: RF00002] | |
| DMR22:11248401 | AC137488.1 | 22 | 11253605 | 11253719 | ENSG00000277683 | | Unknown |
| DMR22:32203601 | RP1-90G24.10 | 22 | 32205115 | 32269666 | ENSG00000242082 | NA | Unknown |
| DMR22:48701801 | FAM19A5 | 22 | 48489460 | 48850912 | ENSG00000219438 | family with | Growth Factor |
| | | | | | | sequence | |
| | | | | | | similarity 19 | |
| | | | | | | (chemokine (C-C | |
| | | | | | | motif)-like)— | |
| | | | | | | member A5 | |
| DMRX:3865201 | RP11-706O15.3 | X | 3853010 | 3882317 | ENSG00000234449 | NA | Unknown |
| DMRX:115191101 | LRCH2 | X | 115110616 | 115234072 | ENSG00000130224 | leucine-rich | Cytoskeleton |
| | | | | | | repeats and | |
| | | | | | | calponin | |
| | | | | | | homology (CH) | |
| | | | | | | domain containing | |
| | | | | | | 2 | |
| DMRX:115191101 | RBMXL3 | X | 115189427 | 115192868 | ENSG00000175718 | RNA binding | Translation |
| | | | | | | motif protein—X- | |
| | | | | | | linked-like 3 | |

[0059] Table 10 (see associated .txt file). Human sperm DMR for all DMR sites, single and multiple, at a p-value threshold of 1e-04. The DMR name, chromosome location, start and stop base pair location, length in base pair (bp), number of significant windows (100bp), p-value, number of CpG sites, CpG sites per 100bp, and DMR associated gene symbol (annotation) are provided.

### DISCUSSION

[0060] The observations described herein suggest that altered sperm DNA methylation may result from early life cancer chemotherapy exposure and correlate to alterations in sperm morphology, number and ultimately male fertility. Although other epigenetic changes could also be involved, DNA methylation has been shown to have more developmental and genome wide influences than many of the other epigenetic factors [23]. This study is the first examination of the actions of current chemotherapy regimens on the human sperm epigenome and spermatogenesis. Previous studies have suggested no evidence in humans of adverse effects of chemotherapy treatment in offspring (less than five years of age) of male cancer survivors [24-26]. However, at the time of these studies, many male survivors had not yet attempted to sire a pregnancy and the number of pregnancies from partners of male survivors were small. No studies have examined later life adult generational impacts.

[0061] Previous studies in non-human model systems have demonstrated that a variety of exposures can promote epigenetic alterations in the germline [6,7,14,27,28]. Environmental toxicants including the fungicide vinclozolin [7,8], pesticides DDT and methoxychlor [7], plastic derived compounds BPA and phthalates [15], and hydrocarbons [16] can promote altered epigenetic (DNA methylation) programming in sperm [14]. The ability of environmental exposures to promote sperm epimutations suggested that chemotherapy may also promote altered germ cell epigenetic programming. The current study was designed to investigate the effects of adolescent chemotherapy exposure on later life adult sperm epimutations. The results demonstrate the presence of DMRs or epimutations in the sperm of men that had adolescent chemotherapy exposure.

[0062] Approximately a decade had passed since the cancer patients' chemotherapy. More advanced spermatogenic cells would have been lost after 100 days following chemotherapy due to the developmental period of the spermatogenic cells in the testis. The observation of epigenetic alterations in the sperm long after chemotherapy strongly suggests that the spermatogonial stem cells in the testis had a permanent epigenetic alteration such that the adult male will produce sperm with epimutations throughout life.

[0063] The analysis and selection under high stringency (i.e. multiple site DMR with p<10⁻⁴) identified a group (i.e. signature) of sperm epimutations associated with chemotherapy exposed individuals. The lower stringency single site DMRs identified are more variable between individuals, but also reflect chemotherapy exposure associated DMR. The presence of a significant epimutation chemotherapy signature demonstrates the ability of early life chemotherapy to promote germline epimutations.

[0064] The current study was designed to examine adolescent (i.e. pubertal) male exposure, however, since the same populations of spermatogenic stem cells are present throughout adult life, potential chemotherapy induced sperm epimutations may occur any time a male is exposed to chemotherapy. Therefore, the cryopreservation of gametes prior to chemotherapy may be important for patients and their oncologists to consider in the future [4].

[0065] The sperm epimutations identified were present on all chromosomes with a number being clustered in statistically significant over-represented groups of DMR. The clustering of DMR is speculated to represent critical regulatory regions within epigenetic control regions [22]. Interestingly, the genomic features of these human sperm chemotherapy associated epigenetics were similar to previously identified sperm epimutations. In particular, one of the major genomic features is a low density CpG content within the DMR referred to as a CpG desert [20]. The CpG density was less than ten percent and the mean was around two CpG/100 bp. Due to the evolutionary conservation of these CpG clusters in a CpG desert they are speculated to be regulatory sites [20].

[0066] The selection of DMR was focused on multiple site DMR with a high statistical significance. Although a higher rate of false positives is anticipated in the much more common single site DMRs, these single sites are anticipated to be an important component of the chemotherapy induced sperm epimutations. Expanded studies are needed to further investigate the epimutation profiles in the sperm and the physiological impacts. The degree of internal population DMR variation and genetic CNV variation indicated negligible impact on the DMR detected. A large proportion of the epimutations identified were found to have gene associations. No predominant pathways or cellular processes appear over-represented by the epimutation associated genes. Previous studies have demonstrated the ability of DMR/epimutations to cause altered somatic cell gene expression [22]. Therefore transmission of the sperm epimutations to the subsequent generation may alter somatic cell gene activity in offspring.

[0067] The germline (e.g. sperm) transmission of epigenetic information can promote the epigenetic transgenerational inheritance of disease and phenotypic variation [12,13,22]. A variety of environmental factors from nutrition to toxicants have been shown in a variety of species from plants to humans to promote the epigenetic transgenerational inheritance phenomenon [6]. Since epigenetic inheritance requires the germline (egg or sperm) transmission of epigenetic information between generations [6,9-11,27,28], the alterations of epigenetic processes in the germline need to be established. Developmentally the DNA methylation is erased after fertilization to create the embryonic stem cell totipotency, which then is remethylated in a cell specific manner during embryonic development [29]. Therefore, the majority of the DNA methylation is reset upon fertilization and during primordial germ cell development of the germline [29,30].

[0068] However, a set of genes termed imprinted genes are protected from DNA methylation erasure at fertilization allowing them to be transmitted transgenerationally [6]. In the event an environmental exposure modified the epigenetic programming of the germline (e.g. sperm) and these sites become imprinted-like they can promote the epigenetic transgenerational inheritance of disease [6,31]. Previous studies have documented the ability of caloric restriction to induce the epigenetic inheritance of disease in humans [11,32]. The current study identifies the ability of chemotherapy to reprogram the epigenome of the sperm. These epimutations can be transmitted to the developing embryo of the next generation. In the event these are imprinted-like epimutations then they would not be erased and would promote epigenetic inheritance to the next generation, and potentially epigenetic transgenerational inheritance to subsequent generations. The current study suggests that chemotherapy has the ability to induce epigenetic inheritance to subsequent generations.

[0069] In summary, the current study demonstrates for the first time the ability of chemotherapy to promote epigenetic reprogramming in the spermatogonial stem cell population that will lead to human sperm epimutations later in life. These DMRs have some gene associations that could influence genome activity. A highly reproducible set of epimutations (i.e. signature) was detected and may provide an epigenetic biomarker for chemotherapy exposures. The biological impact of chemotherapy induced epimutations may be to transmit altered epigenetic information to the next generation and if imprinted-like to subsequent generations progeny.

### METHODS

### Study Population and Samples

[0070] The patients were 19-30 year-old male survivors of osteosarcoma recruited from the Seattle Children's Hospital in Seattle Wash. and four collaborating institutions (Children's Hospital of Pennsylvania, Philadelphia, Pa.; Miller Children's, Long Beach, Calif.; Children's Hospital, University of Minnesota, Minneapolis, Minn.; and Children's Hospital, Vanderbilt University, Nashville, Tenn.). These men had been treated for their disease with cisplatin-based chemotherapy regimens, including ifosfamide in some cases, when they were 14-20 years of age. Each patient was recruited by in-clinic or mail recruitment protocols. Male survivors were eligible if they met the following criteria: alive, with no evidence of disease; diagnosed with bone or soft tissue sarcoma; off all cancer treatment, including radiation treatment, for at least 2 years; at least 15 years of age at study entry; less than 21 at diagnosis; had received cisplatin as part of cancer treatment; must not have received any other alkylating agent (Cyclophosphamide, Melphalan, Busulfan, BCNU, CCNU, Chlorambucil, Nitrogen Mustard, Procarabazine, or Thiotepa); must have received all or part of their cancer treatment at one of the collaborating sites; free of any pre-condition to cancer treatment that could result in infertility; have had no CNS, abdominal, pelvic, or gonadal radiation therapy or total body irradiation (TBI); proficiency in English as designated in patient's medical record; provided informed consent or assent, and authorization to access medical records under HIPAA. Note that relapsed patients and patients with a subsequent malignancy (SMN) that are treated with surgery alone for the relapse or SMN were eligible for this study as long as they meet the above criteria. Controls were recruited from among adult men with no history of cancer who had previously participated as controls in the Fred Hutchinson Cancer Research Center, Seattle Wash., ATLAS study [34,35]. These men were re-contacted regarding participation in the current study.

[0071] Each patient and control was asked to provide a semen sample via home seminal fluid collection, which we used to allow for ease of subject participation since the sample can be obtained without the individual traveling to a laboratory. Sperm concentration and morphology measures were performed on semen that had undergone liquefication during shipping, consistent with the WHO protocol for semen analysis [36]. For sperm concentration (per ml), each participant's semen was diluted and assessed by CASA (Computer Assisted Sperm Analysis). Three separate counts were performed and the results averaged. A known volume of semen was washed for making smears for morphology assessments, based on 200 sperm. Although sperm motility was not assessed (because it requires a fresh sample), count and morphology data nonetheless provide a great deal of information regarding spermatogenesis and abnormalities and both are associated with an increased risk of infertility [37]. All protocols were approved by the Seattle Children's Hospital institutional IRB committee (#12839 and 13158).

### DNA Preparation

[0072] Frozen human sperm samples were stored at −20° C. and thawed for analysis. Genomic DNA from sperm was prepared as follows: One hundred μl of sperm suspension was used then 820 μl DNA extraction buffer (50 mM Tris pH 8, 10 mM EDTA pH 8, 0.5% SDS) and 80 μl 0.1 M Dithiothreitol (DTT) added and the sample incubated at 65° C. for 15 minutes. Eighty μI Proteinase K (20 mg/ml) was added and the sample incubated on a rotator at 55° C. for 2 hours. After incubation, 300 μl of protein precipitation solution (Promega, A795A, Madison, Wis.) was added, the sample mixed and incubated on ice for 15 minutes, then spun at 4° C. at 13,000 rpm for 20 minutes. The supernatant was transferred to a fresh tube, then precipitated over night with the same volume 100% isopropanol and 2 μl glycoblue at −20° C. The sample was then centrifuged and the pellet washed with 75% ethanol, then air-dried and resuspended in 100 μl H2O. DNA concentration was measured using the Nanodrop (Thermo Fisher, Waltham, Mass.).

### Methylated DNA Immunoprecipitation MeDIP

[0073] Methylated DNA Immunoprecipitation (MeDIP) with genomic DNA was performed as follows: Human sperm DNA pools were generated using 2 μg of genomic DNA from each individual for 3 pools each of control and chemotherapy exposed subjects. Each pool contained 3 individuals for a total of n=9 per exposure group. The resulting 6 μg of genomic DNA per pool was diluted to 150 μl with 1× Tris-EDTA (TE, 10 mM Tris, 1 mM EDTA) and sonicated with a probe sonicator using 5×20 pulses at 20% amplitude.

[0074] Fragment size (200-800 bp) was verified on a 1.5% agarose gel. Sonicated DNA was diluted to 400 μl with 1×TE and heated to 95° C. for 10 minutes, then incubated in ice water for 10 minutes. Then 100 μl of 5×immunoprecipitation (IP) buffer (50 mM Sodium Phosphate pH 7, 700 mM NaCl, 0.25% Triton X-100) and 5 μg of 5-mC monoclonal antibody (Diagenode, Denville, N.J., C15200006-500) were added and the sample incubated on a rotator at 4° C. over night. The next day Protein A/G Agarose Beads from Santa Cruz were prewashed with 1×PBS/0.1% BSA and resuspended in 1×IP buffer.

[0075] Eighty μl of the bead slurry were added to each sample and incubated at 4° C. for 2 hours on a rotator. The bead-DNA-antibody complex was washed 3 times with 1×IP buffer by centrifuging at 6,000 rpm for 2 minutes and resuspending in 1×IP buffer. After the last wash the bead-complex was resuspended in 250 μl of digestion buffer (50 mM Tris pH 8, 10 mM EDTA pH 8, 0.5% SDS) with 3.5 μl Proteinase K (20 mg/ml) per sample and incubated on a rotator at 55° C. for 2 hours. After incubation DNA was extracted with the same volume of Phenol-Chloroform-Isoamyalcohol and then with the same volume chloroform. To the supernatant from chloroform extraction 2 μl glycoblue, 20 μl 5M Sodium Chloride and 500 μl 100% cold ethanol were added. DNA was precipitated at −20° C. over night, then spun for 20 minutes at 13,000 rpm at 4 C, washed with 75% ethanol and air-dried. Dry pellet was resuspended in 20 μl H2O and concentration measured in Qubit using the Qubit ssDNA Assay Kit (Life Technologies, Carlsbad, Calif.).

### MeDIP-Seq Analysis

[0076] The MeDIP pools were used to create libraries for next generation sequencing (NGS) at the University of Reno, Nev. Genomics Core Laboratory using the NEBNEXT® ULTRA™ RNA Library Prep Kit for Illumina® (San Diego, Calif.) starting at step 1.4 of the manufacturer's protocol to generate double stranded DNA. After this step the manufacturer's protocol was followed. Each pool received a separate index primer. NGS was performed at that same laboratory using the Illumina® HiSeq 2500 with a PE50 application, with a read size of approximately 50 bp and approximately 100 million reads per pool. Two libraries each were run in one lane comparing one control with one chemotherapy exposed pool in each lane.

### CNV-Seq Analysis

[0077] Genomic DNA extracted from sperm was used to create pools containing the same individuals as used for MeDIP-seq. Equal amounts of each individual's genomic DNA were used for each pool with a final amount of 2 μg per pool. The pools were diluted to 130 μl with 1×TE buffer and sonicated in a Covaris M220 with the manufacturer's preset program to create fragments with a peak at 300 bp. Aliquots of the pools were run on a 1.5% agarose gel to confirm fragmentation. The NEBNEXT® DNA Library Kit was used to create libraries for each pool, with each pool receiving a separate index primer. The libraries were sent to the WSU Genomics Core in Spokane, Wash. for NGS on the Illumina® HiSeq 2500 using a PESO application. All 6 libraries were run in one lane and comparisons were performed. Approximately 30 million reads were obtained for each sample for comparison.

### Bioinformatics and Statistics

[0078] Basic read quality was verified using summaries produced by the FastQC program [38]. The reads for each sample for both CNV and DMR analyses were mapped to the GRCh38 human genome using Bowtie2 [39] with default parameter options. The mapped read files were then converted to sorted BAM files using SAMtools [40]. To identify DMR, the reference genome was broken into 100 bp windows. The MEDIPS R package [41] was used to calculate differential coverage between control and exposure sample groups. The edgeR p-value [42] was used to determine the relative difference between the two groups for each genomic window. Windows with an edgeR p-value less than 10⁻⁴ were considered DMRs. The DMR edges were extended until no genomic window with an edgeR p-value less than 0.1 remained within 1000 bp of the DMR. CpG density and other information was then calculated for the DMR based on the reference genome. The DMRs that included at least two windows with an edgeR p-value<10⁻⁴ were then selected for further analysis and annotated.

[0079] The cn.MOPS R package [43] was used to identify potential CNV. The cn.MOPS analysis detects CNVs by modeling read depth across all samples. The window size used by the cn.MOPS analysis was chosen dynamically for each chromosome based on the read coverage. For chromosomes 1 to 22 the window size ranged from 10 kb to 20 kb. For the MT, X, and Y chromosomes the window sizes were 1 kb, 31 kb, and 42 kb, respectively. We considered only CNV that occurred exclusively in either all control or all treatment samples.

[0080] DMR clusters were identified with R script using a 2 Mb sliding window with 50 kb intervals. DMR were annotated using the biomaRt R package [44] to access the Ensembl database [45]. The genes that overlapped with DMR were then input into the KEGG pathway search [46,47] to identify associated pathways. The DMR associated genes were manually then sorted into functional groups by consulting information provided by the DAVID [48], Panther [49], and Uniprot databases incorporated into an internal curated database.

### REFERENCES

[0081] 1. Howlader, N., Noone, A. M. & Waldron, W. SEER Cancer Statistics Review, 1975-2008. (National Cancer Institute, Bethesda, Md., 2011).
[0082] 2. Zebrack, B. J., Casillas, J., Nohr, L., Adams, H. & Zeltzer, L. K. Fertility issues for young adult survivors of childhood cancer. Psycho-oncology 13, 689-699 (2004).
[0083] 3. Hammond, C., Abrams, J. R. & Syrjala, K. L. Fertility and risk factors for elevated infertility concern in 10-year hematopoietic cell transplant survivors and casematched controls. Journal of clinical oncology: official journal of the American Society of Clinical Oncology 25, 3511-3517 (2007).
[0084] 4. Saito, K., Suzuki, K., Iwasaki, A., Yumura, Y. & Kubota, Y. Sperm cryopreservation before cancer chemotherapy helps in the emotional battle against cancer. Cancer 104, 521-524 (2005).
[0085] 5. Schover, L. R. Psychosocial aspects of infertility and decisions about reproduction in young cancer survivors: a review. Medical and pediatric oncology 33, 53-59 (1999).
[0086] 6. Skinner, M. K. Endocrine disruptor induction of epigenetic transgenerational inheritance of disease. Molecular and cellular endocrinology 398, 4-12 (2014).
[0087] 7. Anway, M. D., Cupp, A. S., Uzumcu, M. & Skinner, M. K. Epigenetic transgenerational actions of endocrine disruptors and male fertility. Science 308, 1466-1469 (2005).
[0088] 8. Guerrero-Bosagna, C., Settles, M., Lucker, B. & Skinner, M. Epigenetic transgenerational actions of vinclozolin on promoter regions of the sperm epigenome. PloS one 5, e13100 (2010).
[0089] 9. Skinner, M. K. Environmental epigenetic transgenerational inheritance and somatic epigenetic mitotic stability. Epigenetics: official journal of the DNA Methylation Society 6, 838-842 (2011).
[0090] 10. Gapp, K., von Ziegler, L., Tweedie-Cullen, R. Y. & Mansuy, I. M. Early life epigenetic programming and transmission of stress-induced traits in mammals: how and when can environmental factors influence traits and their transgenerational inheritance? BioEssays: news and reviews in molecular, cellular and developmental biology 36, 491-502 (2014).
[0091] 11. Pembrey, M., Saffery, R. & Bygren, L. O. Human transgenerational responses to early-life experience: potential impact on development, health and biomedical research. J Med Genet 51, 563-572 (2014).
[0092] 12. Nilsson, E., et al. Environmentally Induced Epigenetic Transgenerational Inheritance of Ovarian Disease. PloS one 7, e36129 (2012).
[0093] 13. Guerrero-Bosagna, C., Savenkova, M., Haque, M. M., Sadler-Riggleman, I. & Skinner, M. K. Environmentally Induced Epigenetic Transgenerational Inheritance of Altered Sertoli Cell Transcriptome and Epigenome: Molecular Etiology of Male Infertility. PloS one 8, e59922 (2013).
[0094] 14. Manikkam, M., Guerrero-Bosagna, C., Tracey, R., Haque, M. M. & Skinner, M. K. Transgenerational actions of environmental compounds on reproductive disease and identification of epigenetic biomarkers of ancestral exposures. PloS one 7, e31901 (2012).
[0095] 15. Manikkam, M., Tracey, R., Guerrero-Bosagna, C. & Skinner, M. Plastics Derived Endocrine Disruptors (BPA, DEHP and DBP) Induce Epigenetic Transgenerational Inheritance of Adult-Onset Disease and Sperm Epimutations. PloS one 8, e55387 (2013).
[0096] 16. Tracey, R., Manikkam, M., Guerrero-Bosagna, C. & Skinner, M. Hydrocarbons (jet fuel JP-8) induce epigenetic transgenerational inheritance of obesity, reproductive disease and sperm epimutations. Reproductive toxicology 36, 104-116 (2013).
[0097] 17. Nilsson, E. E., Anway, M. D., Stanfield, J. & Skinner, M. K. Transgenerational epigenetic effects of the endocrine disruptor vinclozolin on pregnancies and female adult onset disease. Reproduction 135, 713-721 (2008).
[0098] 18. Anway, M. D., Leathers, C. & Skinner, M. K. Endocrine disruptor vinclozolin induced epigenetic transgenerational adult-onset disease. Endocrinology 147, 5515-5523 (2006).
[0099] 19. Aston, K. I., et al. Aberrant sperm DNA methylation predicts male fertility status and embryo quality. Fertility and sterility (2015).
[0100] 20. Skinner, M. K. & Guerrero-Bosagna, C. Role of CpG Deserts in the Epigenetic Transgenerational Inheritance of Differential DNA Methylation Regions. BMC Genomics 15, 692 (2014).
[0101] 21. Dominguez-Salas, P., et al. Maternal nutrition at conception modulates DNA methylation of human metastable epialleles. Nature communications 5, 3746 (2014).
[0102] 22. Skinner, M. K., Manikkam, M., Hague, M. M., Zhang, B. & Savenkova, M. Epigenetic Transgenerational Inheritance of Somatic Transcriptomes and Epigenetic Control Regions. Genome biology 13, R91 (2012).
[0103] 23. Jirtle, R. L. & Skinner, M. K. Environmental epigenomics and disease susceptibility. Nature reviews. Genetics 8, 253-262 (2007).
[0104] 24. Green, D. M., et al. Pregnancy outcome after treatment for Wilms tumor: a report from the national Wilms tumor long-term follow-up study. J Clin Oncol 28, 2824-2830 (2010).
[0105] 25. Hawkins, M. M. Is there evidence of a therapy-related increase in germ cell mutation among childhood cancer survivors? J Natl Cancer Inst 83, 1643-1650 (1991).
[0106] 26. Byrne, J., et al. Genetic disease in offspring of long-term survivors of childhood and adolescent cancer. Am J Hum Genet 62, 45-52 (1998).
[0107] 27. Kelly, W. G. Transgenerational epigenetics in the germline cycle of Caenorhabditis elegans. Epigenetics Chromatin 7, 6 (2014).
[0108] 28. Gapp, K., et al. Implication of sperm RNAs in transgenerational inheritance of the effects of early trauma in mice. Nat Neurosci 17, 667-669 (2014).
[0109] 29. Feng, S., Jacobsen, S. E. & Reik, W. Epigenetic reprogramming in plant and animal development. Science 330, 622-627 (2010).
[0110] 30. Seisenberger, S., et al. The dynamics of genome-wide DNA methylation reprogramming in mouse primordial germ cells. Molecular cell 48, 849-862 (2012).
[0111] 31. Barlow, D. P. & Bartolomei, M. S. Genomic imprinting in mammals. Cold Spring Harbor perspectives in biology 6(2014).
[0112] 32. Donkin, I., et al. Obesity and Bariatric Surgery Drive Epigenetic Variation of Spermatozoa in Humans. Cell metabolism (2015).
[0113] 33. Wyrobek, A. J., Schmid, T. E. & Marchetti, F. Relative susceptibilities of male germ cells to genetic defects induced by cancer chemotherapies. Journal of the National Cancer Institute. Monographs, 31-35 (2005).
[0114] 34. Littman, A. J., et al. Physical activity in adolescence and testicular germ cell cancer risk. Cancer causes & control: CCC 20, 1281-1290 (2009).
[0115] 35. Daling, J. R., et al. Association of marijuana use and the incidence of testicular germ cell tumors. Cancer 115, 1215-1223 (2009).
[0116] 36. World Health Organization WHO Manual for the Examination of Human Semen and Sperm-Cervical Mucus Interaction, (Cambridge University Press, NY, 1999).
[0117] 37. Guzick, D. S., et al. Sperm morphology, motility, and concentration in fertile and infertile men. The New England journal of medicine 345, 1388-1393 (2001).
[0118] 38. Andrews, S. FastQC: a quality control tool for high throughput sequence data.
[0119] 39. Langmead, B. & Salzberg, S. L. Fast gapped-read alignment with Bowtie 2. Nature methods 9, 357-359 (2012).
[0120] 40. Li, H., et al. The Sequence Alignment/Map format and SAMtools. Bioinformatics 25, 2078-2079 (2009).
[0121] 41. Lienhard, M., Grimm, C., Morkel, M., Herwig, R. & Chavez, L. MEDIPS: genomewide differential coverage analysis of sequencing data derived from DNA enrichment experiments. Bioinformatics 30, 284-286 (2014).
[0122] 42. Robinson, M. D., McCarthy, D. J. & Smyth, G. K. edgeR: a Bioconductor package for differential expression analysis of digital gene expression data. Bioinformatics 26, 139-140 (2010).
[0123] 43. Klambauer, G., et al. cn.MOPS: mixture of Poissons for discovering copy number variations in next-generation sequencing data with a low false discovery rate. Nucleic acids research 40, e69 (2012).
[0124] 44. Durinck, S., Spellman, P. T., Birney, E. & Huber, W. Mapping identifiers for the integration of genomic datasets with the R/Bioconductor package biomaRt. Nature protocols 4, 1184-1191 (2009).
[0125] 45. Cunningham, F., et al. Ensembl 2015. Nucleic acids research 43, D662-669 (2015).
[0126] 46. Kanehisa, M. & Goto, S. KEGG: kyoto encyclopedia of genes and genomes. Nucleic acids research 28, 27-30 (2000).
[0127] 47. Kanehisa, M., et al. Data, information, knowledge and principle: back to metabolism in KEGG. Nucleic acids research 42, D199-205 (2014).
[0128] 48. Huang da, W., Sherman, B. T. & Lempicki, R. A. Systematic and integrative analysis of large gene lists using DAVID bioinformatics resources. Nature protocols 4, 44-57 (2009).
[0129] 49. Mi, H., Muruganujan, A., Casagrande, J. T. & Thomas, P. D. Large-scale gene function analysis with the PANTHER classification system. Nature protocols 8, 1551-1566 (2013).

[0130] While the invention has been described in terms of its preferred embodiments, those skilled in the art will recognize that the invention can be practiced with modification within the spirit and scope of the appended claims. Accordingly, the present invention should not be limited to the embodiments as described above, but should further include all modifications and equivalents thereof within the spirit and scope of the description provided herein.

| dmrName | chr | start | stop | ID | length | numSigW | minP | cpgNum | cpgDensity | annotation |
|---|---|---|---|---|---|---|---|---|---|---|
| DMR1:362301 | 1 | 362301 | 364500 | ID_85 | 2200 | 1 | 7.84E-05 | 40 | 1.81818182 | RP4-669L17.2 |
| DMR1:609301 | 1 | 609301 | 610900 | ID_145 | 1600 | 1 | 2.37E-05 | 147 | 9.1875 | RP5-857K21.4 |
| DMR1:1530801 | 1 | 1530801 | 1537500 | ID_434 | 6700 | 1 | 2.38E-05 | 268 | 4 | TMEM240;ATAD3A |
| DMR1:3170401 | 1 | 3170401 | 3171200 | ID_943 | 800 | 1 | 6.77E-06 | 32 | 4 | PRDM16 |
| DMR1:3329501 | 1 | 3329501 | 3332000 | ID_994 | 2500 | 1 | 1.29E-05 | 53 | 2.12 | PRDM16 |
| DMR1:3474501 | 1 | 3474501 | 3477100 | ID_1039 | 2600 | 1 | 4.57E-05 | 65 | 2.5 | ARHGEF16 |
| DMR1:4263501 | 1 | 4263501 | 4263900 | ID_1277 | 400 | 1 | 8.43E-05 | 1 | 0.25 | |
| DMR1:5619501 | 1 | 5619501 | 5620500 | ID_1704 | 1000 | 1 | 4.59E-05 | 10 | 1 | RP11-154H17.1 |
| DMR1:7144801 | 1 | 7144801 | 7145900 | ID_2214 | 1100 | 1 | 2.62E-05 | 23 | 2.09090909 | CAMTA1 |
| DMR1:8412201 | 1 | 8412201 | 8414700 | ID_2636 | 2500 | 1 | 4.68E-05 | 35 | 1.4 | RERE |
| DMR1:8680601 | 1 | 8680601 | 8681100 | ID_2723 | 500 | 1 | 5.96E-05 | 9 | 1.8 | RERE |
| DMR1:9979601 | 1 | 9979601 | 9980500 | ID_3144 | 900 | 1 | 7.72E-05 | 23 | 2.55555556 | NMNAT1 |
| DMR1:10278201 | 1 | 10278201 | 10279200 | ID_3250 | 1000 | 1 | 2.81E-05 | 11 | 1.1 | KIF1B |
| DMR1:10973501 | 1 | 10973501 | 10975500 | ID_3493 | 2000 | 1 | 4.89E-05 | 45 | 2.25 | C1orf127 |
| DMR1:11005101 | 1 | 11005101 | 11007800 | ID_3503 | 2700 | 1 | 5.63E-05 | 46 | 1.7037037 | |
| DMR1:11578201 | 1 | 11578201 | 11579500 | ID_3696 | 1300 | 1 | 5.02E-05 | 21 | 1.61538462 | |
| DMR1:12173801 | 1 | 12173801 | 12175200 | ID_3890 | 1400 | 2 | 4.08E-05 | 27 | 1.92857143 | TNFRSF1B |
| DMR1:12188501 | 1 | 12188501 | 12193100 | ID_3896 | 4600 | 1 | 3.93E-05 | 119 | 2.58695652 | MIR4632;TNFRSF1B |
| DMR1:12715301 | 1 | 12715301 | 12715500 | ID_4051 | 200 | 1 | 7.9E-06 | 0 | 0 | |
| DMR1:12949801 | 1 | 12949801 | 12953100 | ID_4118 | 3300 | 1 | 2.85E-05 | 42 | 1.27272727 | PRAMEF6 |
| DMR1:13546201 | 1 | 13546201 | 13549100 | ID_4275 | 2900 | 1 | 6.17E-05 | 44 | 1.51724138 | |
| DMR1:14192301 | 1 | 14192301 | 14193200 | ID_4482 | 900 | 2 | 5.38E-05 | 6 | 0.66666667 | |
| DMR1:15597801 | 1 | 15597801 | 15599800 | ID_4924 | 2000 | 1 | 7.96E-05 | 36 | 1.8 | RP4-680D5.2 |
| DMR1:16087101 | 1 | 16087101 | 16089800 | ID_5081 | 2700 | 1 | 1.31E-05 | 51 | 1.88888889 | |
| DMR1:16327201 | 1 | 16327201 | 16329200 | ID_5160 | 2000 | 1 | 8.47E-05 | 22 | 1.1 | FBXO42 |
| DMR1:17637901 | 1 | 17637901 | 17640200 | ID_5578 | 2300 | 1 | 8.15E-06 | 44 | 1.91304348 | ARHGEF10L |
| DMR1:18700701 | 1 | 18700701 | 18701900 | ID_5909 | 1200 | 1 | 5.56E-05 | 15 | 1.25 | PAX7 |
| DMR1:19986601 | 1 | 19986601 | 19986700 | ID_6310 | 100 | 1 | 3.26E-05 | 0 | 0 | |
| DMR1:20754601 | 1 | 20754601 | 20755600 | ID_6573 | 1000 | 1 | 3.02E-05 | 13 | 1.3 | HP1BP3 |
| DMR1:21594401 | 1 | 21594401 | 21598800 | ID_6844 | 4400 | 1 | 3.16E-05 | 97 | 2.20454546 | RAP1GAP |
| DMR1:21993901 | 1 | 21993901 | 21994200 | ID_6986 | 300 | 1 | 1.98E-05 | 2 | 0.66666667 | CELA3B |
| DMR1:23298701 | 1 | 23298701 | 23298800 | ID_7411 | 100 | 1 | 7.47E-05 | 0 | 0 | |
| DMR1:23685101 | 1 | 23685101 | 23686900 | ID_7533 | 1800 | 1 | 2.14E-05 | 32 | 1.77777778 | |
| DMR1:25234601 | 1 | 25234601 | 25234900 | ID_8038 | 300 | 1 | 7.26E-07 | 3 | 1 | |
| DMR1:26300401 | 1 | 26300401 | 26301200 | ID_8381 | 800 | 1 | 6.78E-05 | 12 | 1.5 | UBXN11 |
| DMR1:27069101 | 1 | 27069101 | 27070500 | ID_8641 | 1400 | 1 | 8.74E-05 | 22 | 1.57142857 | |
| DMR1:28583001 | 1 | 28583001 | 28586000 | ID_9128 | 3000 | 1 | 0.000017 | 74 | 2.46666667 | |
| DMR1:28617101 | 1 | 28617101 | 28617300 | ID_9139 | 200 | 1 | 1.83E-05 | 3 | 1.5 | TAF12 |
| DMR1:30868501 | 1 | 30868501 | 30870200 | ID_9852 | 1700 | 1 | 8.18E-05 | 28 | 1.64705882 | SDC3 |
| DMR1:31391601 | 1 | 31391601 | 31392800 | ID_10019 | 1200 | 1 | 3.58E-05 | 14 | 1.16666667 | |
| DMR1:31652501 | 1 | 31652501 | 31652700 | ID_10107 | 200 | 1 | 9.09E-05 | 1 | 0.5 | RP11-73M7.6;COL16A1 |
| DMR1:33706301 | 1 | 33706301 | 33707100 | ID_10767 | 800 | 1 | 8.31E-05 | 15 | 1.875 | CSMD2 |
| DMR1:33801701 | 1 | 33801701 | 33802500 | ID_10797 | 800 | 1 | 7.45E-05 | 4 | 0.5 | CSMD2 |
| DMR1:34962301 | 1 | 34962301 | 34964000 | ID_11182 | 1700 | 1 | 6.57E-05 | 11 | 0.64705882 | |
| DMR1:46940001 | 1 | 46940001 | 46940500 | ID_14965 | 500 | 1 | 3.65E-05 | 7 | 1.4 | CYP4A11 |
| DMR1:47050901 | 1 | 47050901 | 47052100 | ID_14998 | 1200 | 1 | 8.98E-05 | 9 | 0.75 | |
| DMR1:47322801 | 1 | 47322801 | 47323600 | ID_15079 | 800 | 1 | 6.62E-05 | 10 | 1.25 | |
| DMR1:50265301 | 1 | 50265301 | 50266800 | ID_16009 | 1500 | 1 | 4.45E-05 | 9 | 0.6 | |
| DMR1:50949001 | 1 | 50949001 | 50954200 | ID_16215 | 5200 | 1 | 9.83E-05 | 108 | 2.07692308 | FAF1 |
| DMR1:51732901 | 1 | 51732901 | 51735400 | ID_16452 | 2500 | 1 | 7.04E-05 | 22 | 0.88 | OSBPL9 |
| DMR1:52182201 | 1 | 52182201 | 52183500 | ID_16593 | 1300 | 1 | 3.63E-05 | 11 | 0.84615385 | ZFYVE9 |
| DMR1:52469801 | 1 | 52469801 | 52470400 | ID_16685 | 600 | 1 | 2.65E-05 | 5 | 0.83333333 | ZCCHC11 |
| DMR1:54604601 | 1 | 54604601 | 54610400 | ID_17357 | 5800 | 1 | 4.39E-05 | 102 | 1.75862069 | FAM151A;ACOT11 |
| DMR1:54626801 | 1 | 54626801 | 54629000 | ID_17364 | 2200 | 1 | 8.58E-05 | 36 | 1.63636364 | RP11-240D10.4;ACOT11 |
| DMR1:56809601 | 1 | 56809601 | 56811600 | ID_18040 | 2000 | 1 | 2.06E-05 | 11 | 0.55 | C1orf168 |
| DMR1:57580501 | 1 | 57580501 | 57584000 | ID_18265 | 3500 | 1 | 6.17E-05 | 29 | 0.82857143 | DAB1 |
| DMR1:57715601 | 1 | 57715601 | 57717300 | ID_18300 | 1700 | 1 | 9.87E-05 | 21 | 1.23529412 | DAB1 |
| DMR1:57930201 | 1 | 57930201 | 57931400 | ID_18370 | 1200 | 1 | 6.77E-05 | 1 | 0.08333333 | DAB1 |
| DMR1:58721701 | 1 | 58721701 | 58722500 | ID_18602 | 800 | 1 | 7.61E-05 | 9 | 1.125 | |
| DMR1:62587101 | 1 | 62587101 | 62587700 | ID_19770 | 600 | 1 | 9.77E-06 | 3 | 0.5 | DOCK7 |
| DMR1:62831801 | 1 | 62831801 | 62833300 | ID_19845 | 1500 | 1 | 7.39E-05 | 10 | 0.66666667 | ATG4C |
| DMR1:64923801 | 1 | 64923801 | 64923900 | ID_20455 | 100 | 1 | 8.77E-05 | 3 | 3 | JAK1 |
| DMR1:66253001 | 1 | 66253001 | 66253100 | ID_20846 | 100 | 1 | 8.48E-05 | 0 | 0 | PDE4B |
| DMR1:67424601 | 1 | 67424601 | 67424900 | ID_21192 | 300 | 1 | 3.72E-07 | 4 | 1.33333333 | SERBP1 |
| DMR1:68452201 | 1 | 68452201 | 68452400 | ID_21497 | 200 | 1 | 6.54E-05 | 4 | 2 | |
| DMR1:70825301 | 1 | 70825301 | 70825600 | ID_22160 | 300 | 1 | 1.81E-05 | 3 | 1 | |
| DMR1:75742801 | 1 | 75742801 | 75745800 | ID_23467 | 3000 | 1 | 2.15E-05 | 37 | 1.23333333 | RP4-682C21.2;ACADM |
| DMR1:77691501 | 1 | 77691501 | 77691700 | ID_24035 | 200 | 1 | 1.62E-05 | 0 | 0 | |
| DMR1:79924401 | 1 | 79924401 | 79924900 | ID_24649 | 500 | 1 | 9.74E-06 | 5 | 1 | |
| DMR1:80308801 | 1 | 80308801 | 80309700 | ID_24747 | 900 | 1 | 6.54E-06 | 3 | 0.33333333 | |
| DMR1:81336101 | 1 | 81336101 | 81337600 | ID_25011 | 1500 | 1 | 8.67E-05 | 22 | 1.46666667 | ADGRL2 |
| DMR1:81931301 | 1 | 81931301 | 81933700 | ID_25192 | 2400 | 1 | 2.97E-06 | 26 | 1.08333333 | ADGRL2 |
| DMR1:82157101 | 1 | 82157101 | 82159000 | ID_25253 | 1900 | 1 | 3.46E-05 | 12 | 0.63157895 | |
| DMR1:82296701 | 1 | 82296701 | 82297800 | ID_25291 | 1100 | 1 | 6.03E-05 | 8 | 0.72727273 | |
| DMR1:83359101 | 1 | 83359101 | 83359500 | ID_25595 | 400 | 1 | 4.97E-06 | 2 | 0.5 | |
| DMR1:84056101 | 1 | 84056101 | 84057300 | ID_25779 | 1200 | 1 | 0.00008 | 17 | 1.41666667 | |
| DMR1:86773001 | 1 | 86773001 | 86774500 | ID_26562 | 1500 | 1 | 1.15E-05 | 9 | 0.6 | |
| DMR1:90594901 | 1 | 90594901 | 90597900 | ID_27699 | 3000 | 1 | 9.41E-05 | 18 | 0.6 | |
| DMR1:91560201 | 1 | 91560201 | 91561400 | ID_27971 | 1200 | 1 | 3.32E-06 | 25 | 2.08333333 | |
| DMR1:93294901 | 1 | 93294901 | 93295100 | ID_28518 | 200 | 1 | 4.49E-05 | 1 | 0.5 | RP4-717I23.3 |
| DMR1:95389801 | 1 | 95389801 | 95389900 | ID_29140 | 100 | 1 | 6.16E-05 | 0 | 0 | |
| DMR1:99008401 | 1 | 99008401 | 99008500 | ID_30126 | 100 | 1 | 0.000005 | 1 | 1 | RP5-896L10.1;RP11- |
| | | | | | | | | | | 234N17.1 |
| DMR1:99556001 | 1 | 99556001 | 99557000 | ID_30276 | 1000 | 1 | 6.07E-06 | 4 | 0.4 | RP11-413P11.1 |
| DMR1:100163501 | 1 | 100163501 | 100163600 | ID_30451 | 100 | 1 | 1.71E-06 | 0 | 0 | LRRC39 |
| DMR1:100597701 | 1 | 100597701 | 100597900 | ID_30590 | 200 | 1 | 1.35E-05 | 2 | 1 | |
| DMR1:103745701 | 1 | 103745701 | 103746900 | ID_31455 | 1200 | 1 | 1.03E-05 | 11 | 0.91666667 | |
| DMR1:104305701 | 1 | 104305701 | 104306200 | ID_31593 | 500 | 1 | 6.44E-05 | 0 | 0 | |
| DMR1:104773501 | 1 | 104773501 | 104775700 | ID_31717 | 2200 | 1 | 0.000025 | 29 | 1.31818182 | |
| DMR1:104846301 | 1 | 104846301 | 104848800 | ID_31733 | 2500 | 2 | 5.56E-05 | 26 | 1.04 | |
| DMR1:105502001 | 1 | 105502001 | 105502100 | ID_31896 | 100 | 1 | 1.81E-05 | 0 | 0 | |
| DMR1:106400501 | 1 | 106400501 | 106402600 | ID_32139 | 2100 | 1 | 2.02E-05 | 11 | 0.52380952 | |
| DMR1:106966201 | 1 | 106966201 | 106968300 | ID_32290 | 2100 | 1 | 3.64E-05 | 5 | 0.23809524 | |
| DMR1:112228401 | 1 | 112228401 | 112228600 | ID_33928 | 200 | 1 | 1.54E-05 | 0 | 0 | RP5-965F6.2 |
| DMR1:113852901 | 1 | 113852901 | 113853900 | ID_34437 | 1000 | 1 | 7.78E-05 | 18 | 1.8 | PTPN22 |
| DMR1:115495201 | 1 | 115495201 | 115496600 | ID_34933 | 1400 | 1 | 0.000013 | 11 | 0.78571429 | |
| DMR1:115889901 | 1 | 115889901 | 115890100 | ID_35053 | 200 | 1 | 2.01E-05 | 3 | 1.5 | |
| DMR1:117715801 | 1 | 117715801 | 117716300 | ID_35604 | 500 | 1 | 6.27E-05 | 7 | 1.4 | |
| DMR1:117889201 | 1 | 117889201 | 117889400 | ID_35653 | 200 | 1 | 8.66E-05 | 3 | 1.5 | GDAP2 |
| DMR1:119724901 | 1 | 119724901 | 119725600 | ID_36217 | 700 | 1 | 3.35E-05 | 9 | 1.28571429 | PHGDH |
| DMR1:120838201 | 1 | 120838201 | 120840800 | ID_36560 | 2600 | 1 | 8.37E-05 | 20 | 0.76923077 | NBPF26 |
| DMR1:122309901 | 1 | 122309901 | 122312300 | ID_36921 | 2400 | 1 | 0.000027 | 43 | 1.79166667 | |
| DMR1:125085001 | 1 | 125085001 | 125085700 | ID_37564 | 700 | 1 | 9.67E-06 | 45 | 6.42857143 | |
| DMR1:143268301 | 1 | 143268301 | 143275100 | ID_37612 | 6800 | 1 | 8.06E-05 | 282 | 4.14705882 | |
| DMR1:143417501 | 1 | 143417501 | 143419500 | ID_37654 | 2000 | 1 | 0.000069 | 21 | 1.05 | |
| DMR1:143648201 | 1 | 143648201 | 143648400 | ID_37722 | 200 | 1 | 1.24E-05 | 4 | 2 | |
| DMR1:145253701 | 1 | 145253701 | 145254800 | ID_38241 | 1100 | 1 | 9.01E-05 | 2 | 0.18181818 | |
| DMR1:146051601 | 1 | 146051601 | 146052000 | ID_38500 | 400 | 1 | 8.71E-05 | 15 | 3.75 | |
| DMR1:146139001 | 1 | 146139001 | 146140500 | ID_38535 | 1500 | 1 | 1.48E-05 | 25 | 1.66666667 | RP11-458D21.5;NBPF10 |
| DMR1:147254901 | 1 | 147254901 | 147255200 | ID_38893 | 300 | 1 | 6.76E-05 | 2 | 0.66666667 | CHD1L |
| DMR1:148721801 | 1 | 148721801 | 148723900 | ID_39348 | 2100 | 1 | 2.38E-05 | 31 | 1.47619048 | |
| DMR1:149661701 | 1 | 149661701 | 149662600 | ID_39639 | 900 | 1 | 1.96E-05 | 4 | 0.44444444 | LINC00869 |
| DMR1:151642401 | 1 | 151642401 | 151643200 | ID_40259 | 800 | 1 | 7.77E-05 | 18 | 2.25 | SNX27 |
| DMR1:153326601 | 1 | 153326601 | 153327800 | ID_40791 | 1200 | 1 | 6.01E-05 | 17 | 1.41666667 | |
| DMR1:154878801 | 1 | 154878801 | 154879500 | ID_41288 | 700 | 2 | 1.08E-05 | 22 | 3.14285714 | |
| DMR1:155064201 | 1 | 155064201 | 155065100 | ID_41348 | 900 | 1 | 1.99E-06 | 14 | 1.55555556 | EFNA4;RP11-540D14.8 |
| DMR1:156187501 | 1 | 156187501 | 156187700 | ID_41716 | 200 | 1 | 6.96E-05 | 13 | 6.5 | |
| DMR1:156299901 | 1 | 156299901 | 156302200 | ID_41754 | 2300 | 1 | 0.000035 | 50 | 2.17391304 | |
| DMR1:156544301 | 1 | 156544301 | 156545300 | ID_41843 | 1000 | 1 | 4.39E-06 | 9 | 0.9 | IQGAP3 |
| DMR1:156672701 | 1 | 156672701 | 156673400 | ID_41885 | 700 | 1 | 4.94E-05 | 13 | 1.85714286 | NES |
| DMR1:158903101 | 1 | 158903101 | 158904500 | ID_42581 | 1400 | 1 | 5.49E-05 | 9 | 0.64285714 | |
| DMR1:159076601 | 1 | 159076601 | 159077100 | ID_42631 | 500 | 1 | 5.01E-05 | 5 | 1 | AIM2 |
| DMR1:159092301 | 1 | 159092301 | 159092500 | ID_42638 | 200 | 1 | 1.75E-05 | 1 | 0.5 | AIM2 |
| DMR1:159764701 | 1 | 159764701 | 159766500 | ID_42828 | 1800 | 1 | 7.87E-05 | 26 | 1.44444444 | |
| DMR1:160491401 | 1 | 160491401 | 160492100 | ID_43067 | 700 | 1 | 9.82E-05 | 3 | 0.42857143 | SLAMF6 |
| DMR1:160784501 | 1 | 160784501 | 160785000 | ID_43156 | 500 | 1 | 6.27E-05 | 5 | 1 | |
| DMR1:161097101 | 1 | 161097101 | 161097200 | ID_43250 | 100 | 1 | 4.04E-05 | 0 | 0 | |
| DMR1:161699701 | 1 | 161699701 | 161699900 | ID_43445 | 200 | 1 | 0.000069 | 4 | 2 | |
| DMR1:164408901 | 1 | 164408901 | 164409900 | ID_44223 | 1000 | 1 | 3.43E-05 | 13 | 1.3 | |
| DMR1:164708001 | 1 | 164708001 | 164710400 | ID_44317 | 2400 | 1 | 1.23E-05 | 27 | 1.125 | PBX1 |
| DMR1:165799301 | 1 | 165799301 | 165799500 | ID_44657 | 200 | 1 | 3.06E-05 | 1 | 0.5 | TMCO1 |
| DMR1:167468001 | 1 | 167468001 | 167468900 | ID_45154 | 900 | 1 | 2.06E-07 | 8 | 0.88888889 | CD247 |
| DMR1:167562401 | 1 | 167562401 | 167564900 | ID_45182 | 2500 | 1 | 1.56E-05 | 20 | 0.8 | |
| DMR1:170556701 | 1 | 170556701 | 170556900 | ID_46072 | 200 | 1 | 2.49E-05 | 1 | 0.5 | |
| DMR1:170639201 | 1 | 170639201 | 170639800 | ID_46099 | 600 | 1 | 3.27E-05 | 9 | 1.5 | RP1-79C4.1 |
| DMR1:172068201 | 1 | 172068201 | 172069100 | ID_46514 | 900 | 1 | 5.29E-05 | 12 | 1.33333333 | DNM3 |
| DMR1:173173301 | 1 | 173173301 | 173173500 | ID_46828 | 200 | 1 | 0.00005 | 2 | 1 | |
| DMR1:174085301 | 1 | 174085301 | 174085500 | ID_47087 | 200 | 1 | 4.72E-05 | 1 | 0.5 | |
| DMR1:174195501 | 1 | 174195501 | 174196200 | ID_47121 | 700 | 1 | 1.13E-05 | 6 | 0.85714286 | RABGAP1L |
| DMR1:174866101 | 1 | 174866101 | 174867500 | ID_47305 | 1400 | 1 | 9.52E-05 | 17 | 1.21428571 | RABGAP1L |
| DMR1:175491101 | 1 | 175491101 | 175494300 | ID_47500 | 3200 | 2 | 1.49E-05 | 47 | 1.46875 | TNR |
| DMR1:176845201 | 1 | 176845201 | 176846500 | ID_47893 | 1300 | 1 | 9.54E-06 | 1 | 0.07692308 | PAPPA2 |
| DMR1:177032401 | 1 | 177032401 | 177033200 | ID_47952 | 800 | 1 | 6.58E-05 | 25 | 3.125 | ASTN1 |
| DMR1:178264301 | 1 | 178264301 | 178264500 | ID_48338 | 200 | 1 | 9.97E-05 | 2 | 1 | RASAL2 |
| DMR1:179295601 | 1 | 179295601 | 179296300 | ID_48655 | 700 | 1 | 2.96E-05 | 25 | 3.57142857 | SOAT1 |
| DMR1:181006601 | 1 | 181006601 | 181006800 | ID_49189 | 200 | 1 | 0.000037 | 4 | 2 | STX6 |
| DMR1:182508701 | 1 | 182508701 | 182511900 | ID_49661 | 3200 | 1 | 4.67E-05 | 126 | 3.9375 | RGSL1 |
| DMR1:183404601 | 1 | 183404601 | 183407000 | ID_49928 | 2400 | 1 | 3.12E-05 | 21 | 0.875 | NMNAT2 |
| DMR1:185040901 | 1 | 185040901 | 185042400 | ID_50423 | 1500 | 1 | 3.08E-05 | 15 | 1 | |
| DMR1:185648801 | 1 | 185648801 | 185649500 | ID_50601 | 700 | 1 | 0.000081 | 38 | 5.42857143 | |
| DMR1:185979201 | 1 | 185979201 | 185979300 | ID_50693 | 100 | 1 | 5.06E-05 | 0 | 0 | HMCN1 |
| DMR1:187014501 | 1 | 187014501 | 187014700 | ID_50985 | 200 | 1 | 2.02E-05 | 3 | 1.5 | |
| DMR1:187877701 | 1 | 187877701 | 187878800 | ID_51220 | 1100 | 1 | 0.000069 | 6 | 0.54545455 | |
| DMR1:188058601 | 1 | 188058601 | 188058900 | ID_51263 | 300 | 1 | 2.05E-05 | 4 | 1.33333333 | |
| DMR1:192083501 | 1 | 192083501 | 192083800 | ID_52288 | 300 | 1 | 1.51E-05 | 1 | 0.33333333 | |
| DMR1:193740601 | 1 | 193740601 | 193742400 | ID_52763 | 1800 | 1 | 9.25E-05 | 11 | 0.61111111 | |
| DMR1:193795801 | 1 | 193795801 | 193796000 | ID_52781 | 200 | 1 | 6.31E-05 | 3 | 1.5 | |
| DMR1:194318501 | 1 | 194318501 | 194318800 | ID_52914 | 300 | 1 | 0.000079 | 3 | 1 | |
| DMR1:194663601 | 1 | 194663601 | 194665000 | ID_53010 | 1400 | 1 | 3.19E-05 | 13 | 0.92857143 | |
| DMR1:195733101 | 1 | 195733101 | 195733200 | ID_53285 | 100 | 1 | 0.000054 | 0 | 0 | |
| DMR1:196304301 | 1 | 196304301 | 196304800 | ID_53440 | 500 | 1 | 6.33E-05 | 5 | 1 | KCNT2 |
| DMR1:198312101 | 1 | 198312101 | 198315600 | ID_53971 | 3500 | 1 | 3.51E-05 | 64 | 1.82857143 | NEK7 |
| DMR1:201367901 | 1 | 201367901 | 201369000 | ID_54867 | 1100 | 1 | 6.71E-05 | 17 | 1.54545455 | TNNT2 |
| DMR1:203107301 | 1 | 203107301 | 203110100 | ID_55426 | 2800 | 1 | 1.89E-05 | 16 | 0.57142857 | ADORA1 |
| DMR1:203954301 | 1 | 203954301 | 203954400 | ID_55703 | 100 | 1 | 6.89E-05 | 0 | 0 | |
| DMR1:204644301 | 1 | 204644301 | 204644800 | ID_55931 | 500 | 1 | 3.89E-05 | 1 | 0.2 | LRRN2 |
| DMR1:204996801 | 1 | 204996801 | 204999300 | ID_56040 | 2500 | 1 | 7.19E-05 | 64 | 2.56 | NFASC |
| DMR1:205889601 | 1 | 205889601 | 205890100 | ID_56305 | 500 | 1 | 6.71E-05 | 3 | 0.6 | |
| DMR1:206856201 | 1 | 206856201 | 206858000 | ID_56597 | 1800 | 1 | 2.53E-05 | 15 | 0.83333333 | |
| DMR1:210435701 | 1 | 210435701 | 210436000 | ID_57718 | 300 | 1 | 4.64E-07 | 2 | 0.66666667 | HHAT |
| DMR1:211071401 | 1 | 211071401 | 211071700 | ID_57907 | 300 | 1 | 7.4E-06 | 5 | 1.66666667 | KCNH1 |
| DMR1:211796301 | 1 | 211796301 | 211798900 | ID_58130 | 2600 | 1 | 9.27E-05 | 14 | 0.53846154 | LPGAT1 |
| DMR1:212202901 | 1 | 212202901 | 212203600 | ID_58255 | 700 | 1 | 1.99E-05 | 12 | 1.71428571 | |
| DMR1:212407001 | 1 | 212407001 | 212407900 | ID_58320 | 900 | 1 | 0.0001 | 8 | 0.88888889 | TMEM206 |
| DMR1:212783601 | 1 | 212783601 | 212783900 | ID_58442 | 300 | 1 | 5.41E-05 | 2 | 0.66666667 | NSL1 |
| DMR1:212885401 | 1 | 212885401 | 212886900 | ID_58475 | 1500 | 1 | 9.88E-05 | 28 | 1.86666667 | FLVCR1 |
| DMR1:214065601 | 1 | 214065601 | 214066200 | ID_58834 | 600 | 1 | 5.78E-05 | 9 | 1.5 | |
| DMR1:215393901 | 1 | 215393901 | 215394400 | ID_59241 | 500 | 2 | 6.42E-05 | 26 | 5.2 | RP11-199H2.2 |
| DMR1:216459201 | 1 | 216459201 | 216461900 | ID_59542 | 2700 | 1 | 1.39E-05 | 11 | 0.40740741 | |
| DMR1:217663301 | 1 | 217663301 | 217663600 | ID_59874 | 300 | 1 | 7.76E-05 | 7 | 2.33333333 | SPATA17 |
| DMR1:217894301 | 1 | 217894301 | 217894800 | ID_59934 | 500 | 1 | 6.19E-05 | 12 | 2.4 | LINC00210 |
| DMR1:220461601 | 1 | 220461601 | 220462000 | ID_60669 | 400 | 1 | 3.02E-05 | 1 | 0.25 | |
| DMR1:220693301 | 1 | 220693301 | 220693600 | ID_60732 | 300 | 1 | 5.22E-06 | 3 | 1 | C1orf115 |
| DMR1:220983901 | 1 | 220983901 | 220985300 | ID_60823 | 1400 | 1 | 4.46E-05 | 22 | 1.57142857 | |
| DMR1:221526801 | 1 | 221526801 | 221527000 | ID_60994 | 200 | 1 | 6.14E-05 | 4 | 2 | |
| DMR1:223042301 | 1 | 223042301 | 223042700 | ID_61440 | 400 | 1 | 0.000032 | 3 | 0.75 | |
| DMR1:224010101 | 1 | 224010101 | 224014800 | ID_61743 | 4700 | 2 | 9.49E-06 | 108 | 2.29787234 | RP11-504P24.3 |
| DMR1:224392301 | 1 | 224392301 | 224392800 | ID_61859 | 500 | 1 | 3.68E-05 | 5 | 1 | WDR26 |
| DMR1:224416901 | 1 | 224416901 | 224418800 | ID_61867 | 1900 | 1 | 3.67E-05 | 17 | 0.89473684 | WDR26 |
| DMR1:224634801 | 1 | 224634801 | 224635800 | ID_61930 | 1000 | 1 | 1.39E-05 | 15 | 1.5 | CNIH3 |
| DMR1:225430701 | 1 | 225430701 | 225432200 | ID_62184 | 1500 | 1 | 6.68E-05 | 41 | 2.73333333 | |
| DMR1:225662001 | 1 | 225662001 | 225663200 | ID_62244 | 1200 | 1 | 0.000056 | 9 | 0.75 | |
| DMR1:226452801 | 1 | 226452801 | 226452900 | ID_62502 | 100 | 1 | 1.57E-05 | 1 | 1 | |
| DMR1:227860201 | 1 | 227860201 | 227862500 | ID_62951 | 2300 | 1 | 5.53E-07 | 17 | 0.73913044 | |
| DMR1:229042401 | 1 | 229042401 | 229042600 | ID_63308 | 200 | 1 | 2.56E-05 | 2 | 1 | ISCA1P2 |
| DMR1:230069401 | 1 | 230069401 | 230070600 | ID_63633 | 1200 | 1 | 9.76E-06 | 15 | 1.25 | GALNT2 |
| DMR1:230580301 | 1 | 230580301 | 230581900 | ID_63792 | 1600 | 1 | 9.08E-06 | 27 | 1.6875 | |
| DMR1:232058301 | 1 | 232058301 | 232058600 | ID_64247 | 300 | 1 | 6.56E-05 | 0 | 0 | |
| DMR1:232723701 | 1 | 232723701 | 232724600 | ID_64451 | 900 | 1 | 9.99E-05 | 3 | 0.33333333 | |
| DMR1:235194801 | 1 | 235194801 | 235195800 | ID_65226 | 1000 | 1 | 3.92E-06 | 14 | 1.4 | ARID4B |
| DMR1:236328101 | 1 | 236328101 | 236332700 | ID_65586 | 4600 | 1 | 3.11E-05 | 55 | 1.19565217 | |
| DMR1:237309401 | 1 | 237309401 | 237310100 | ID_65908 | 700 | 1 | 4.21E-05 | 32 | 4.57142857 | RYR2 |
| DMR1:237879801 | 1 | 237879801 | 237881200 | ID_66082 | 1400 | 1 | 3.42E-06 | 11 | 0.78571429 | RP11-193H5.1;ZP4 |
| DMR1:238221001 | 1 | 238221001 | 238223200 | ID_66174 | 2200 | 1 | 2.16E-05 | 15 | 0.68181818 | |
| DMR1:238863501 | 1 | 238863501 | 238865600 | ID_66363 | 2100 | 2 | 1.33E-07 | 8 | 0.38095238 | |
| DMR1:239906701 | 1 | 239906701 | 239909300 | ID_66657 | 2600 | 1 | 7.69E-05 | 68 | 2.61538462 | CHRM3 |
| DMR1:240912201 | 1 | 240912201 | 240912300 | ID_66989 | 100 | 1 | 8.25E-05 | 0 | 0 | RGS7 |
| DMR1:241681801 | 1 | 241681801 | 241684200 | ID_67218 | 2400 | 1 | 9.56E-05 | 10 | 0.41666667 | WDR64 |
| DMR1:243703701 | 1 | 243703701 | 243703900 | ID_67822 | 200 | 1 | 6.16E-05 | 2 | 1 | RP11-370K11.1;AKT3 |
| DMR1:244490001 | 1 | 244490001 | 244490400 | ID_68075 | 400 | 1 | 6.16E-05 | 6 | 1.5 | C1orf101 |
| DMR1:245129501 | 1 | 245129501 | 245130300 | ID_68274 | 800 | 1 | 6.92E-05 | 15 | 1.875 | |
| DMR1:245508001 | 1 | 245508001 | 245508100 | ID_68387 | 100 | 1 | 0.000084 | 2 | 2 | KIF26B |
| DMR1:245821101 | 1 | 245821101 | 245821300 | ID_68492 | 200 | 1 | 3.71E-05 | 1 | 0.5 | SMYD3 |
| DMR1:245890301 | 1 | 245890301 | 245890600 | ID_68513 | 300 | 1 | 7.95E-05 | 2 | 0.66666667 | SMYD3 |
| DMR1:245906201 | 1 | 245906201 | 245908300 | ID_68517 | 2100 | 1 | 3.26E-05 | 23 | 1.0952381 | SMYD3 |
| DMR1:247002201 | 1 | 247002201 | 247002400 | ID_68872 | 200 | 1 | 6.28E-05 | 1 | 0.5 | ZNF695;ZNF670-ZNF695 |
| DMR2:1143501 | 2 | 1143501 | 1145200 | ID_69788 | 1700 | 1 | 3.47E-05 | 20 | 1.17647059 | SNTG2 |
| DMR2:1588601 | 2 | 1588601 | 1589400 | ID_69930 | 800 | 1 | 9.59E-05 | 28 | 3.5 | AC144450.1 |
| DMR2:1634601 | 2 | 1634601 | 1638400 | ID_69946 | 3800 | 1 | 3.76E-05 | 78 | 2.05263158 | PXDN |
| DMR2:2189101 | 2 | 2189101 | 2190200 | ID_70140 | 1100 | 4 | 6.3E-07 | 35 | 3.18181818 | MYT1L |
| DMR2:2224101 | 2 | 2224101 | 2224200 | ID_70150 | 100 | 1 | 8.41E-05 | 0 | 0 | MYT1L |
| DMR2:2463801 | 2 | 2463801 | 2465000 | ID_70226 | 1200 | 1 | 2.88E-06 | 32 | 2.66666667 | |
| DMR2:2882701 | 2 | 2882701 | 2883200 | ID_70368 | 500 | 1 | 8.92E-05 | 2 | 0.4 | |
| DMR2:3717101 | 2 | 3717101 | 3720500 | ID_70636 | 3400 | 1 | 4.15E-06 | 48 | 1.41176471 | DCDC2C |
| DMR2:3959101 | 2 | 3959101 | 3961600 | ID_70718 | 2500 | 1 | 6.74E-05 | 38 | 1.52 | LINC01304 |
| DMR2:4448301 | 2 | 4448301 | 4448500 | ID_70862 | 200 | 1 | 7.95E-05 | 1 | 0.5 | |
| DMR2:5329601 | 2 | 5329601 | 5329800 | ID_71110 | 200 | 1 | 8.32E-05 | 1 | 0.5 | |
| DMR2:5932901 | 2 | 5932901 | 5933100 | ID_71291 | 200 | 1 | 0.000079 | 6 | 3 | LINC01105 |
| DMR2:6080001 | 2 | 6080001 | 6082500 | ID_71341 | 2500 | 1 | 0.000088 | 45 | 1.8 | |
| DMR2:6776401 | 2 | 6776401 | 6778100 | ID_71549 | 1700 | 1 | 7.37E-05 | 16 | 0.94117647 | |
| DMR2:6828401 | 2 | 6828401 | 6829500 | ID_71563 | 1100 | 1 | 6.63E-05 | 14 | 1.27272727 | NRIR |
| DMR2:12509001 | 2 | 12509001 | 12509700 | ID_73394 | 700 | 1 | 3.38E-05 | 10 | 1.42857143 | MIR3681HG |
| DMR2:14187101 | 2 | 14187101 | 14187300 | ID_73862 | 200 | 1 | 8.15E-05 | 3 | 1.5 | LINC00276 |
| DMR2:15258701 | 2 | 15258701 | 15260700 | ID_74179 | 2000 | 1 | 2.36E-05 | 16 | 0.8 | NBAS |
| DMR2:15522001 | 2 | 15522001 | 15523100 | ID_74261 | 1100 | 1 | 4.16E-05 | 10 | 0.90909091 | NBAS |
| DMR2:16079701 | 2 | 16079701 | 16080700 | ID_74436 | 1000 | 1 | 3.52E-05 | 7 | 0.7 | GACAT3 |
| DMR2:16520001 | 2 | 16520001 | 16521900 | ID_74570 | 1900 | 1 | 7.03E-05 | 12 | 0.63157895 | |
| DMR2:18356801 | 2 | 18356801 | 18357100 | ID_75095 | 300 | 1 | 6.9E-07 | 2 | 0.66666667 | KCNS3 |
| DMR2:19955801 | 2 | 19955801 | 19957600 | ID_75565 | 1800 | 1 | 5.69E-05 | 27 | 1.5 | WDR35 |
| DMR2:20094301 | 2 | 20094301 | 20094600 | ID_75610 | 300 | 1 | 3.01E-06 | 2 | 0.66666667 | AC098828.2 |
| DMR2:20459401 | 2 | 20459401 | 20460400 | ID_75738 | 1000 | 1 | 4.34E-05 | 4 | 0.4 | |
| DMR2:22588801 | 2 | 22588801 | 22590200 | ID_76340 | 1400 | 1 | 8.96E-05 | 13 | 0.92857143 | |
| DMR2:24390401 | 2 | 24390401 | 24394300 | ID_76907 | 3900 | 1 | 0.000018 | 30 | 0.76923077 | |
| DMR2:25243301 | 2 | 25243301 | 25244500 | ID_77179 | 1200 | 1 | 0.000087 | 32 | 2.66666667 | DNMT3A |
| DMR2:27241201 | 2 | 27241201 | 27242900 | ID_77835 | 1700 | 1 | 4.91E-05 | 52 | 3.05882353 | CAD |
| DMR2:28260801 | 2 | 28260801 | 28262400 | ID_78159 | 1600 | 1 | 5.72E-05 | 22 | 1.375 | BRE |
| DMR2:28738601 | 2 | 28738601 | 28738800 | ID_78306 | 200 | 1 | 6.82E-05 | 2 | 1 | |
| DMR2:30297601 | 2 | 30297601 | 30299500 | ID_78799 | 1900 | 1 | 3.37E-05 | 28 | 1.47368421 | LBH |
| DMR2:30366501 | 2 | 30366501 | 30367700 | ID_78820 | 1200 | 1 | 6.38E-05 | 12 | 1 | |
| DMR2:30885801 | 2 | 30885801 | 30887000 | ID_78981 | 1200 | 1 | 3.22E-05 | 9 | 0.75 | |
| DMR2:35752601 | 2 | 35752601 | 35757200 | ID_80436 | 4600 | 2 | 8.1E-06 | 24 | 0.52173913 | |
| DMR2:36991401 | 2 | 36991401 | 36991700 | ID_80834 | 300 | 1 | 3.37E-05 | 5 | 1.66666667 | HEATR5B |
| DMR2:37870401 | 2 | 37870401 | 37871700 | ID_81113 | 1300 | 1 | 3.97E-05 | 17 | 1.30769231 | LINC00211 |
| DMR2:41503601 | 2 | 41503601 | 41504600 | ID_82200 | 1000 | 1 | 8.83E-05 | 6 | 0.6 | |
| DMR2:42306401 | 2 | 42306401 | 42308800 | ID_82446 | 2400 | 1 | 0.000068 | 24 | 1 | EML4 |
| DMR2:43147901 | 2 | 43147901 | 43148100 | ID_82716 | 200 | 1 | 5.48E-05 | 1 | 0.5 | |
| DMR2:43969001 | 2 | 43969001 | 43969400 | ID_82968 | 400 | 1 | 8.93E-06 | 16 | 4 | LRPPRC |
| DMR2:45411601 | 2 | 45411601 | 45412000 | ID_83404 | 400 | 1 | 5.92E-05 | 5 | 1.25 | SRBD1 |
| DMR2:46175501 | 2 | 46175501 | 46176400 | ID_83642 | 900 | 1 | 0.000044 | 8 | 0.88888889 | PRKCE |
| DMR2:47490801 | 2 | 47490801 | 47491200 | ID_84071 | 400 | 1 | 2.14E-05 | 16 | 4 | MSH2 |
| DMR2:47866301 | 2 | 47866301 | 47866400 | ID_84185 | 100 | 1 | 1.56E-05 | 1 | 1 | FBXO11 |
| DMR2:48451101 | 2 | 48451101 | 48453000 | ID_84357 | 1900 | 1 | 6.38E-06 | 7 | 0.36842105 | PPP1R21 |
| DMR2:48510601 | 2 | 48510601 | 48510900 | ID_84378 | 300 | 1 | 6.96E-05 | 3 | 1 | PPP1R21 |
| DMR2:49184501 | 2 | 49184501 | 49188100 | ID_84582 | 3600 | 1 | 0.000018 | 35 | 0.97222222 | RP11-460M2.1 |
| DMR2:49688801 | 2 | 49688801 | 49690300 | ID_84730 | 1500 | 1 | 6.2E-06 | 8 | 0.53333333 | |
| DMR2:50756601 | 2 | 50756601 | 50757300 | ID_85026 | 700 | 1 | 5.59E-05 | 8 | 1.14285714 | NRXN1 |
| DMR2:52126401 | 2 | 52126401 | 52126600 | ID_85401 | 200 | 1 | 2.12E-05 | 1 | 0.5 | AC007682.1 |
| DMR2:55402401 | 2 | 55402401 | 55402500 | ID_86352 | 100 | 1 | 9.32E-05 | 0 | 0 | CCDC88A |
| DMR2:58508401 | 2 | 58508401 | 58511400 | ID_87220 | 3000 | 1 | 9.73E-05 | 37 | 1.23333333 | LINC01122 |
| DMR2:59030701 | 2 | 59030701 | 59032300 | ID_87365 | 1600 | 1 | 2.26E-05 | 19 | 1.1875 | LINC01122 |
| DMR2:59188101 | 2 | 59188101 | 59189800 | ID_87408 | 1700 | 1 | 4.34E-05 | 13 | 0.76470588 | |
| DMR2:60179901 | 2 | 60179901 | 60180100 | ID_87688 | 200 | 1 | 6.29E-05 | 1 | 0.5 | |
| DMR2:61223701 | 2 | 61223701 | 61223800 | ID_88030 | 100 | 1 | 6.05E-05 | 2 | 2 | USP34 |
| DMR2:61230701 | 2 | 61230701 | 61231000 | ID_88034 | 300 | 1 | 2.99E-05 | 7 | 2.33333333 | USP34 |
| DMR2:62832901 | 2 | 62832901 | 62833800 | ID_88529 | 900 | 1 | 7.53E-05 | 7 | 0.77777778 | AC007098.1;EHBP1 |
| DMR2:63155001 | 2 | 63155001 | 63157800 | ID_88621 | 2800 | 1 | 4.82E-05 | 28 | 1 | WDPCP |
| DMR2:63927901 | 2 | 63927901 | 63928100 | ID_88824 | 200 | 1 | 8.56E-05 | 2 | 1 | VPS54 |
| DMR2:64403701 | 2 | 64403701 | 64406700 | ID_88968 | 3000 | 1 | 9.52E-05 | 38 | 1.26666667 | AC008074.3 |
| DMR2:66467601 | 2 | 66467601 | 66467800 | ID_89597 | 200 | 1 | 5.21E-05 | 3 | 1.5 | MEIS1 |
| DMR2:69518101 | 2 | 69518101 | 69520700 | ID_90511 | 2600 | 1 | 3.06E-05 | 34 | 1.30769231 | AAK1;SNORA36C; |
| | | | | | | | | | | AC079121.1 |
| DMR2:70565001 | 2 | 70565001 | 70566000 | ID_90830 | 1000 | 1 | 5.31E-05 | 11 | 1.1 | |
| DMR2:72417601 | 2 | 72417601 | 72418300 | ID_91428 | 700 | 1 | 9.14E-05 | 3 | 0.42857143 | EXOC6B |
| DMR2:73701601 | 2 | 73701601 | 73702600 | ID_91789 | 1000 | 1 | 5.53E-05 | 9 | 0.9 | |
| DMR2:74901901 | 2 | 74901901 | 74902200 | ID_92185 | 300 | 1 | 1.43E-05 | 6 | 2 | |
| DMR2:79822601 | 2 | 79822601 | 79823100 | ID_93615 | 500 | 1 | 6.76E-05 | 2 | 0.4 | CTNNA2 |
| DMR2:80134601 | 2 | 80134601 | 80134800 | ID_93715 | 200 | 1 | 4.12E-05 | 4 | 2 | CTNNA2 |
| DMR2:86880201 | 2 | 86880201 | 86881300 | ID_95698 | 1100 | 1 | 8.68E-05 | 13 | 1.18181818 | ANAPC1P1 |
| DMR2:87760201 | 2 | 87760201 | 87761300 | ID_95973 | 1100 | 1 | 6.15E-05 | 13 | 1.18181818 | RGPD2 |
| DMR2:87983601 | 2 | 87983601 | 87984600 | ID_96041 | 1000 | 1 | 5.25E-05 | 14 | 1.4 | RP11-1378G18.1 |
| DMR2:88190201 | 2 | 88190201 | 88191900 | ID_96110 | 1700 | 1 | 4.28E-06 | 21 | 1.23529412 | |
| DMR2:89010901 | 2 | 89010901 | 89013600 | ID_96360 | 2700 | 1 | 0.000065 | 12 | 0.44444444 | IGKV1-12;IGKC |
| DMR2:89801501 | 2 | 89801501 | 89806000 | ID_96525 | 4500 | 1 | 8.51E-05 | 159 | 3.53333333 | |
| DMR2:89967301 | 2 | 89967301 | 89968200 | ID_96565 | 900 | 1 | 7.27E-05 | 7 | 0.77777778 | |
| DMR2:90378801 | 2 | 90378801 | 90402500 | ID_96683 | 23700 | 1 | 3.69E-06 | 975 | 4.11392405 | |
| DMR2:95516601 | 2 | 95516601 | 95516800 | ID_97631 | 200 | 1 | 8.46E-05 | 2 | 1 | TRIM64FP |
| DMR2:95550301 | 2 | 95550301 | 95551600 | ID_97640 | 1300 | 2 | 3.14E-06 | 29 | 2.23076923 | |
| DMR2:96148501 | 2 | 96148501 | 96148900 | ID_97838 | 400 | 1 | 2.05E-06 | 15 | 3.75 | |
| DMR2:96416301 | 2 | 96416301 | 96416700 | ID_97921 | 400 | 1 | 8.15E-05 | 4 | 1 | |
| DMR2:97542601 | 2 | 97542601 | 97542800 | ID_98257 | 200 | 1 | 3.44E-05 | 3 | 1.5 | ANKRD36B |
| DMR2:97722201 | 2 | 97722201 | 97722900 | ID_98312 | 700 | 1 | 8.32E-05 | 10 | 1.42857143 | ZAP70 |
| DMR2:98941001 | 2 | 98941001 | 98941300 | ID_98688 | 300 | 1 | 1.06E-05 | 7 | 2.33333333 | |
| DMR2:100186401 | 2 | 100186401 | 100187100 | ID_99091 | 700 | 1 | 7.69E-05 | 12 | 1.71428571 | |
| DMR2:100702301 | 2 | 100702301 | 100704500 | ID_99261 | 2200 | 1 | 4.96E-05 | 24 | 1.09090909 | |
| DMR2:101542501 | 2 | 101542501 | 101545100 | ID_99534 | 2600 | 1 | 8.16E-06 | 17 | 0.65384615 | |
| DMR2:103312901 | 2 | 103312901 | 103313400 | ID_100072 | 500 | 1 | 2.71E-05 | 7 | 1.4 | |
| DMR2:103714901 | 2 | 103714901 | 103715600 | ID_100187 | 700 | 1 | 6.07E-05 | 2 | 0.28571429 | |
| DMR2:106582501 | 2 | 106582501 | 106582700 | ID_101049 | 200 | 1 | 9.97E-05 | 6 | 3 | |
| DMR2:108066601 | 2 | 108066601 | 108066800 | ID_101487 | 200 | 1 | 3.12E-05 | 2 | 1 | |
| DMR2:108812601 | 2 | 108812601 | 108813400 | ID_101698 | 800 | 1 | 8.63E-05 | 15 | 1.875 | CCDC138 |
| DMR2:110402801 | 2 | 110402801 | 110403200 | ID_102192 | 400 | 1 | 1.12E-05 | 6 | 1.5 | RP13-1039J1.4;RP13- |
| | | | | | | | | | | 1039J1.2; AC108938.5 |
| DMR2:110555801 | 2 | 110555801 | 110561700 | ID_102242 | 5900 | 1 | 2.45E-05 | 122 | 2.06779661 | RGPD6 |
| DMR2:111504201 | 2 | 111504201 | 111505100 | ID_102544 | 900 | 1 | 0.000017 | 6 | 0.66666667 | AC017002.1;RP11- |
| | | | | | | | | | | 68E19.2 |
| DMR2:112687801 | 2 | 112687801 | 112688400 | ID_102909 | 600 | 1 | 1.56E-05 | 10 | 1.66666667 | |
| DMR2:113104201 | 2 | 113104201 | 113105000 | ID_103047 | 800 | 1 | 0.000084 | 3 | 0.375 | |
| DMR2:113192601 | 2 | 113192601 | 113193700 | ID_103072 | 1100 | 1 | 6.45E-05 | 14 | 1.27272727 | PSD4 |
| DMR2:114189001 | 2 | 114189001 | 114194000 | ID_103367 | 5000 | 1 | 7.57E-05 | 63 | 1.26 | |
| DMR2:114417701 | 2 | 114417701 | 114419600 | ID_103431 | 1900 | 1 | 5.15E-05 | 11 | 0.57894737 | |
| DMR2:114493501 | 2 | 114493501 | 114494100 | ID_103458 | 600 | 1 | 2.99E-05 | 6 | 1 | DPP10 |
| DMR2:118509501 | 2 | 118509501 | 118510300 | ID_104630 | 800 | 1 | 1.89E-05 | 8 | 1 | |
| DMR2:118990601 | 2 | 118990601 | 118991400 | ID_104778 | 800 | 1 | 5.01E-06 | 10 | 1.25 | MARCO |
| DMR2:120793901 | 2 | 120793901 | 120794100 | ID_105343 | 200 | 1 | 5.51E-05 | 3 | 1.5 | GLI2 |
| DMR2:121166301 | 2 | 121166301 | 121168700 | ID_105465 | 2400 | 1 | 1.63E-05 | 32 | 1.33333333 | |
| DMR2:122697701 | 2 | 122697701 | 122697900 | ID_105943 | 200 | 1 | 5.36E-06 | 1 | 0.5 | |
| DMR2:125898501 | 2 | 125898501 | 125899000 | ID_106882 | 500 | 1 | 6.71E-05 | 3 | 0.6 | |
| DMR2:127110201 | 2 | 127110201 | 127110300 | ID_107262 | 100 | 1 | 4.77E-05 | 1 | 1 | |
| DMR2:128436301 | 2 | 128436301 | 128437100 | ID_107687 | 800 | 1 | 4.46E-05 | 15 | 1.875 | |
| DMR2:129972801 | 2 | 129972801 | 129978300 | ID_108173 | 5500 | 1 | 4.72E-05 | 71 | 1.29090909 | RAB6C-AS1 |
| DMR2:130555701 | 2 | 130555701 | 130556000 | ID_108341 | 300 | 1 | 9.67E-05 | 7 | 2.33333333 | |
| DMR2:131866101 | 2 | 131866101 | 131866300 | ID_108743 | 200 | 1 | 6.56E-06 | 0 | 0 | |
| DMR2:132252301 | 2 | 132252301 | 132254500 | ID_108852 | 2200 | 1 | 0.000017 | 119 | 5.40909091 | ANKRD30BL;RNA5-8SP5 |
| DMR2:132274601 | 2 | 132274601 | 132276400 | ID_108859 | 1800 | 1 | 2.94E-05 | 43 | 2.38888889 | |
| DMR2:133301501 | 2 | 133301501 | 133301700 | ID_109153 | 200 | 1 | 6.25E-05 | 1 | 0.5 | NCKAP5 |
| DMR2:135713601 | 2 | 135713601 | 135713800 | ID_109898 | 200 | 1 | 6.77E-05 | 0 | 0 | R3HDM1 |
| DMR2:136946301 | 2 | 136946301 | 136947100 | ID_110272 | 800 | 1 | 0.000058 | 16 | 2 | THSD7B |
| DMR2:138455801 | 2 | 138455801 | 138457900 | ID_110703 | 2100 | 1 | 2.89E-05 | 13 | 0.61904762 | AC097721.2 |
| DMR2:139092301 | 2 | 139092301 | 139093600 | ID_110886 | 1300 | 1 | 9.87E-05 | 7 | 0.53846154 | |
| DMR2:139292501 | 2 | 139292501 | 139292700 | ID_110948 | 200 | 1 | 7.05E-05 | 1 | 0.5 | |
| DMR2:141210901 | 2 | 141210901 | 141213600 | ID_111449 | 2700 | 1 | 9.15E-05 | 37 | 1.37037037 | LRP1B |
| DMR2:143336601 | 2 | 143336601 | 143337200 | ID_112030 | 600 | 1 | 8.97E-05 | 1 | 0.16666667 | RP11-570L15.2;ARHGAP15; |
| | | | | | | | | | | AC096558.1 |
| DMR2:144492201 | 2 | 144492201 | 144493600 | ID_112370 | 1400 | 2 | 1.52E-06 | 11 | 0.78571429 | ZEB2 |
| DMR2:147820001 | 2 | 147820001 | 147820100 | ID_113282 | 100 | 1 | 0.000057 | 0 | 0 | |
| DMR2:149391701 | 2 | 149391701 | 149392200 | ID_113738 | 500 | 1 | 3.27E-05 | 2 | 0.4 | LYPD6 |
| DMR2:150048401 | 2 | 150048401 | 150048600 | ID_113946 | 200 | 1 | 3.31E-05 | 1 | 0.5 | |
| DMR2:151460401 | 2 | 151460401 | 151462800 | ID_114361 | 2400 | 1 | 1.68E-05 | 29 | 1.20833333 | RIF1 |
| DMR2:152679601 | 2 | 152679601 | 152680700 | ID_114748 | 1100 | 1 | 1.26E-05 | 25 | 2.27272727 | PRPF40A |
| DMR2:161278601 | 2 | 161278601 | 161283000 | ID_117182 | 4400 | 1 | 1.32E-05 | 87 | 1.97727273 | AC009299.2;AC009299.4 |
| DMR2:161516401 | 2 | 161516401 | 161517300 | ID_117249 | 900 | 1 | 3.45E-05 | 3 | 0.33333333 | SLC4A10 |
| DMR2:161549501 | 2 | 161549501 | 161549700 | ID_117261 | 200 | 1 | 1.42E-05 | 1 | 0.5 | SLC4A10 |
| DMR2:162062901 | 2 | 162062901 | 162064700 | ID_117394 | 1800 | 1 | 1.01E-05 | 7 | 0.38888889 | DPP4 |
| DMR2:162327701 | 2 | 162327701 | 162329100 | ID_117470 | 1400 | 1 | 2.65E-05 | 28 | 2 | GCA |
| DMR2:163051601 | 2 | 163051601 | 163052200 | ID_117649 | 600 | 1 | 7.46E-06 | 4 | 0.66666667 | |
| DMR2:165922201 | 2 | 165922201 | 165923400 | ID_118441 | 1200 | 1 | 0.000019 | 7 | 0.58333333 | TTC21B |
| DMR2:167634501 | 2 | 167634501 | 167634600 | ID_118908 | 100 | 1 | 4.41E-06 | 0 | 0 | |
| DMR2:168549701 | 2 | 168549701 | 168550500 | ID_119181 | 800 | 1 | 6.26E-06 | 6 | 0.75 | CERS6 |
| DMR2:169711601 | 2 | 169711601 | 169713500 | ID_119552 | 1900 | 1 | 8.98E-05 | 26 | 1.36842105 | KLHL23 |
| DMR2:173045801 | 2 | 173045801 | 173046400 | ID_120583 | 600 | 1 | 8.32E-05 | 5 | 0.83333333 | RAPGEF4 |
| DMR2:176419301 | 2 | 176419301 | 176419600 | ID_121607 | 300 | 1 | 4.28E-06 | 1 | 0.33333333 | |
| DMR2:176914201 | 2 | 176914201 | 176916100 | ID_121745 | 1900 | 1 | 0.000017 | 12 | 0.63157895 | |
| DMR2:178228501 | 2 | 178228501 | 178230300 | ID_122122 | 1800 | 1 | 9.74E-05 | 14 | 0.77777778 | OSBPL6 |
| DMR2:178775401 | 2 | 178775401 | 178776200 | ID_122279 | 800 | 1 | 0.000056 | 19 | 2.375 | TTN;TTN-AS1 |
| DMR2:179416101 | 2 | 179416101 | 179416400 | ID_122462 | 300 | 1 | 4.93E-05 | 5 | 1.66666667 | |
| DMR2:181382801 | 2 | 181382801 | 181384100 | ID_122985 | 1300 | 1 | 5.57E-05 | 3 | 0.23076923 | AC104820.2 |
| DMR2:182184201 | 2 | 182184201 | 182186700 | ID_123197 | 2500 | 1 | 6.63E-05 | 10 | 0.4 | PDE1A |
| DMR2:184840701 | 2 | 184840701 | 184841200 | ID_123917 | 500 | 1 | 6.07E-05 | 8 | 1.6 | ZNF804A |
| DMR2:184908301 | 2 | 184908301 | 184908500 | ID_123935 | 200 | 1 | 0.000048 | 1 | 0.5 | ZNF804A |
| DMR2:185299401 | 2 | 185299401 | 185300600 | ID_124035 | 1200 | 1 | 3.68E-05 | 11 | 0.91666667 | |
| DMR2:186479301 | 2 | 186479301 | 186479500 | ID_124348 | 200 | 1 | 6.56E-05 | 1 | 0.5 | |
| DMR2:186855401 | 2 | 186855401 | 186855700 | ID_124465 | 300 | 1 | 3.56E-05 | 4 | 1.33333333 | |
| DMR2:187508801 | 2 | 187508801 | 187509000 | ID_124636 | 200 | 1 | 8.16E-05 | 3 | 1.5 | AC007319.1;TFPI |
| DMR2:190208201 | 2 | 190208201 | 190208800 | ID_125378 | 600 | 1 | 4.17E-05 | 1 | 0.16666667 | HIBCH |
| DMR2:190365501 | 2 | 190365501 | 190366900 | ID_125431 | 1400 | 1 | 7.74E-05 | 31 | 2.21428571 | INPP1 |
| DMR2:192034501 | 2 | 192034501 | 192037100 | ID_125938 | 2600 | 1 | 1.81E-05 | 15 | 0.57692308 | TMEFF2;AC098617.1 |
| DMR2:194259501 | 2 | 194259501 | 194260700 | ID_126516 | 1200 | 1 | 2.23E-05 | 3 | 0.25 | |
| DMR2:196165201 | 2 | 196165201 | 196165400 | ID_127035 | 200 | 1 | 7.69E-05 | 4 | 2 | STK17B |
| DMR2:196831401 | 2 | 196831401 | 196832800 | ID_127237 | 1400 | 1 | 5.16E-05 | 28 | 2 | RP11-84A12.1 |
| DMR2:197195001 | 2 | 197195001 | 197195200 | ID_127337 | 200 | 1 | 2.97E-05 | 2 | 1 | ANKRD44 |
| DMR2:197761801 | 2 | 197761801 | 197763100 | ID_127499 | 1300 | 1 | 8.35E-05 | 12 | 0.92307692 | BOLL;AC011997.1 |
| DMR2:200787601 | 2 | 200787601 | 200790900 | ID_128393 | 3300 | 1 | 0.000085 | 38 | 1.15151515 | AC007163.6;AOX2P |
| DMR2:201009501 | 2 | 201009501 | 201009600 | ID_128460 | 100 | 1 | 2.35E-05 | 1 | 1 | FAM126B |
| DMR2:202685301 | 2 | 202685301 | 202686400 | ID_128965 | 1100 | 1 | 8.59E-05 | 6 | 0.54545455 | FAM117B |
| DMR2:202973201 | 2 | 202973201 | 202974600 | ID_129048 | 1400 | 1 | 0.000017 | 24 | 1.71428571 | CARF;WDR12 |
| DMR2:203538501 | 2 | 203538501 | 203538700 | ID_129216 | 200 | 1 | 3.76E-05 | 2 | 1 | |
| DMR2:203620401 | 2 | 203620401 | 203622600 | ID_129244 | 2200 | 1 | 0.000063 | 13 | 0.59090909 | |
| DMR2:204153801 | 2 | 204153801 | 204154300 | ID_129400 | 500 | 1 | 7.27E-05 | 4 | 0.8 | |
| DMR2:205936601 | 2 | 205936601 | 205940300 | ID_129932 | 3700 | 1 | 1.65E-05 | 61 | 1.64864865 | |
| DMR2:207826401 | 2 | 207826401 | 207829100 | ID_130487 | 2700 | 1 | 8.36E-05 | 51 | 1.88888889 | PLEKHM3 |
| DMR2:215948701 | 2 | 215948701 | 215949800 | ID_132770 | 1100 | 1 | 1.01E-05 | 12 | 1.09090909 | MREG |
| DMR2:216079301 | 2 | 216079301 | 216079600 | ID_132808 | 300 | 1 | 7.71E-05 | 8 | 2.66666667 | PECR |
| DMR2:216485601 | 2 | 216485601 | 216485800 | ID_132937 | 200 | 1 | 0.000037 | 1 | 0.5 | AC098820.4;AC098820.3 |
| DMR2:217774101 | 2 | 217774101 | 217775500 | ID_133375 | 1400 | 1 | 5.41E-05 | 5 | 0.35714286 | |
| DMR2:218031101 | 2 | 218031101 | 218033900 | ID_133470 | 2800 | 1 | 6.71E-05 | 36 | 1.28571429 | |
| DMR2:222706401 | 2 | 222706401 | 222706800 | ID_134865 | 400 | 1 | 1.71E-05 | 1 | 0.25 | MOGAT1 |
| DMR2:223175601 | 2 | 223175601 | 223176800 | ID_135008 | 1200 | 1 | 6.94E-05 | 12 | 1 | KCNE4 |
| DMR2:223191101 | 2 | 223191101 | 223191400 | ID_135013 | 300 | 1 | 9.27E-05 | 5 | 1.66666667 | KCNE4 |
| DMR2:223972701 | 2 | 223972701 | 223974500 | ID_135238 | 1800 | 1 | 8.25E-05 | 20 | 1.11111111 | |
| DMR2:224585501 | 2 | 224585501 | 224586500 | ID_135434 | 1000 | 1 | 0.000071 | 41 | 4.1 | |
| DMR2:225103901 | 2 | 225103901 | 225104200 | ID_135606 | 300 | 1 | 9.82E-05 | 2 | 0.66666667 | |
| DMR2:225536201 | 2 | 225536201 | 225536400 | ID_135726 | 200 | 1 | 3.58E-05 | 2 | 1 | NYAP2 |
| DMR2:225600201 | 2 | 225600201 | 225601200 | ID_135746 | 1000 | 1 | 7.45E-05 | 4 | 0.4 | NYAP2 |
| DMR2:226792201 | 2 | 226792201 | 226797800 | ID_136107 | 5600 | 1 | 0.000038 | 131 | 2.33928571 | IRS1 |
| DMR2:229364201 | 2 | 229364201 | 229365600 | ID_136883 | 1400 | 1 | 1.63E-05 | 14 | 1 | DNER |
| DMR2:230118001 | 2 | 230118001 | 230118300 | ID_137123 | 300 | 1 | 4.59E-05 | 4 | 1.33333333 | |
| DMR2:230784801 | 2 | 230784801 | 230785800 | ID_137331 | 1000 | 1 | 1.96E-05 | 10 | 1 | CAB39 |
| DMR2:231892201 | 2 | 231892201 | 231893600 | ID_137671 | 1400 | 1 | 8.67E-05 | 34 | 2.42857143 | MIR1471 |
| DMR2:232534801 | 2 | 232534801 | 232537400 | ID_137862 | 2600 | 1 | 6.21E-05 | 26 | 1 | CHRND |
| DMR2:235285201 | 2 | 235285201 | 235287100 | ID_138710 | 1900 | 1 | 9.73E-05 | 15 | 0.78947368 | |
| DMR2:237240201 | 2 | 237240201 | 237241100 | ID_139347 | 900 | 1 | 0.000092 | 11 | 1.22222222 | |
| DMR2:237336501 | 2 | 237336501 | 237336700 | ID_139376 | 200 | 1 | 9.24E-06 | 2 | 1 | COL6A3 |
| DMR2:237679301 | 2 | 237679301 | 237679600 | ID_139490 | 300 | 1 | 7.57E-05 | 2 | 0.66666667 | LRRFIP1 |
| DMR2:238198201 | 2 | 238198201 | 238199300 | ID_139649 | 1100 | 2 | 3.28E-06 | 8 | 0.72727273 | ILKAP |
| DMR2:238780501 | 2 | 238780501 | 238780700 | ID_139830 | 200 | 1 | 3.22E-05 | 0 | 0 | |
| DMR2:239301201 | 2 | 239301201 | 239304200 | ID_139996 | 3000 | 1 | 6.56E-06 | 77 | 2.56666667 | HDAC4 |
| DMR2:239918201 | 2 | 239918201 | 239920100 | ID_140194 | 1900 | 1 | 0.000048 | 31 | 1.63157895 | NDUFA10 |
| DMR2:240108901 | 2 | 240108901 | 240111400 | ID_140257 | 2500 | 1 | 7.21E-05 | 50 | 2 | OR5S1P |
| DMR2:240305301 | 2 | 240305301 | 240305600 | ID_140319 | 300 | 1 | 7.04E-05 | 13 | 4.33333333 | |
| DMR2:240891401 | 2 | 240891401 | 240896100 | ID_140502 | 4700 | 1 | 1.04E-05 | 136 | 2.89361702 | C2orf54 |
| DMR2:241405201 | 2 | 241405201 | 241407300 | ID_140655 | 2100 | 1 | 0.000091 | 47 | 2.23809524 | FARP2 |
| DMR3:2443201 | 3 | 2443201 | 2444100 | ID_141643 | 900 | 1 | 3.76E-05 | 6 | 0.66666667 | CNTN4 |
| DMR3:3007701 | 3 | 3007701 | 3010200 | ID_141811 | 2500 | 1 | 8.31E-05 | 45 | 1.8 | CNTN4 |
| DMR3:5093401 | 3 | 5093401 | 5094000 | ID_142431 | 600 | 1 | 6.43E-05 | 6 | 1 | |
| DMR3:5349501 | 3 | 5349501 | 5349900 | ID_142508 | 400 | 1 | 6.21E-05 | 3 | 0.75 | |
| DMR3:5401101 | 3 | 5401101 | 5401400 | ID_142522 | 300 | 1 | 1.73E-05 | 9 | 3 | |
| DMR3:5525401 | 3 | 5525401 | 5526500 | ID_142552 | 1100 | 1 | 2.96E-05 | 10 | 0.90909091 | |
| DMR3:8679301 | 3 | 8679301 | 8679900 | ID_143498 | 600 | 1 | 3.26E-05 | 18 | 3 | SSUH2 |
| DMR3:8715901 | 3 | 8715901 | 8716000 | ID_143512 | 100 | 1 | 4.99E-05 | 1 | 1 | SSUH2 |
| DMR3:9237801 | 3 | 9237801 | 9240800 | ID_143690 | 3000 | 1 | 9.64E-05 | 19 | 0.63333333 | SRGAP3 |
| DMR3:11652701 | 3 | 11652701 | 11654700 | ID_144473 | 2000 | 1 | 4.99E-05 | 23 | 1.15 | VGLL4 |
| DMR3:12030601 | 3 | 12030601 | 12033600 | ID_144589 | 3000 | 1 | 7.26E-05 | 46 | 1.53333333 | SYN2 |
| DMR3:13704501 | 3 | 13704501 | 13707700 | ID_145132 | 3200 | 1 | 8.73E-05 | 21 | 0.65625 | LINC00620 |
| DMR3:14411301 | 3 | 14411301 | 14411900 | ID_145370 | 600 | 1 | 2.96E-05 | 8 | 1.33333333 | SLC6A6 |
| DMR3:14611901 | 3 | 14611901 | 14613100 | ID_145436 | 1200 | 1 | 8.12E-05 | 8 | 0.66666667 | |
| DMR3:14971701 | 3 | 14971701 | 14972300 | ID_145554 | 600 | 1 | 3.16E-06 | 12 | 2 | NR2C2 |
| DMR3:16091301 | 3 | 16091301 | 16092800 | ID_145914 | 1500 | 1 | 4.08E-06 | 8 | 0.53333333 | |
| DMR3:17503401 | 3 | 17503401 | 17504300 | ID_146321 | 900 | 1 | 9.11E-05 | 3 | 0.33333333 | TBC1D5 |
| DMR3:17582701 | 3 | 17582701 | 17585000 | ID_146351 | 2300 | 1 | 5.26E-06 | 37 | 1.60869565 | TBC1D5 |
| DMR3:19240001 | 3 | 19240001 | 19240800 | ID_146850 | 800 | 1 | 2.02E-05 | 15 | 1.875 | KCNH8 |
| DMR3:19947101 | 3 | 19947101 | 19947400 | ID_147062 | 300 | 1 | 7.04E-05 | 34 | 11.3333333 | RAB5A |
| DMR3:20043901 | 3 | 20043901 | 20044200 | ID_147095 | 300 | 1 | 6.74E-05 | 3 | 1 | KAT2B |
| DMR3:21651301 | 3 | 21651301 | 21651400 | ID_147566 | 100 | 1 | 6.52E-05 | 0 | 0 | ZNF385D |
| DMR3:22798901 | 3 | 22798901 | 22799400 | ID_147890 | 500 | 1 | 9.03E-05 | 4 | 0.8 | |
| DMR3:26369201 | 3 | 26369201 | 26369400 | ID_148962 | 200 | 1 | 2.68E-05 | 5 | 2.5 | |
| DMR3:32179201 | 3 | 32179201 | 32180200 | ID_150660 | 1000 | 1 | 7.15E-05 | 10 | 1 | |
| DMR3:34224001 | 3 | 34224001 | 34225700 | ID_151279 | 1700 | 1 | 7.45E-05 | 10 | 0.58823529 | AC018359.1;AC123023.1 |
| DMR3:34519401 | 3 | 34519401 | 34521700 | ID_151367 | 2300 | 1 | 7.94E-05 | 10 | 0.43478261 | AC018359.1 |
| DMR3:34653201 | 3 | 34653201 | 34656300 | ID_151407 | 3100 | 1 | 6.75E-05 | 21 | 0.67741936 | |
| DMR3:35290001 | 3 | 35290001 | 35290800 | ID_151571 | 800 | 1 | 7.55E-05 | 7 | 0.875 | |
| DMR3:36010901 | 3 | 36010901 | 36011200 | ID_151762 | 300 | 1 | 4.43E-05 | 1 | 0.33333333 | |
| DMR3:36836601 | 3 | 36836601 | 36837400 | ID_152000 | 800 | 1 | 2.04E-05 | 5 | 0.625 | TRANK1 |
| DMR3:37487801 | 3 | 37487801 | 37488400 | ID_152190 | 600 | 1 | 1.37E-05 | 6 | 1 | ITGA9 |
| DMR3:38894101 | 3 | 38894101 | 38894900 | ID_152625 | 800 | 1 | 4.37E-05 | 8 | 1 | SCN11A |
| DMR3:40683001 | 3 | 40683001 | 40685100 | ID_153200 | 2100 | 1 | 1.65E-05 | 19 | 0.90476191 | |
| DMR3:42858501 | 3 | 42858501 | 42858900 | ID_153866 | 400 | 1 | 9.42E-05 | 0 | 0 | KRBOX1;RP11-141M3.6; |
| | | | | | | | | | | RP11-136C24.3;CYP8B1; |
| | | | | | | | | | | ACKR2 |
| DMR3:42940801 | 3 | 42940801 | 42941700 | ID_153891 | 900 | 1 | 3.67E-05 | 13 | 1.44444444 | KRBOX1;RP11-136C24.3 |
| DMR3:44379601 | 3 | 44379601 | 44380500 | ID_154345 | 900 | 1 | 6.14E-05 | 7 | 0.77777778 | TCAIM |
| DMR3:44495901 | 3 | 44495901 | 44497300 | ID_154389 | 1400 | 2 | 4.11E-05 | 21 | 1.5 | |
| DMR3:45080001 | 3 | 45080001 | 45080900 | ID_154584 | 900 | 1 | 0.000013 | 4 | 0.44444444 | |
| DMR3:46281901 | 3 | 46281901 | 46283200 | ID_154964 | 1300 | 1 | 2.22E-06 | 11 | 0.84615385 | |
| DMR3:46661201 | 3 | 46661201 | 46662300 | ID_155086 | 1100 | 1 | 9.52E-05 | 10 | 0.90909091 | |
| DMR3:47735801 | 3 | 47735801 | 47736600 | ID_155428 | 800 | 1 | 7.59E-06 | 11 | 1.375 | SMARCC1 |
| DMR3:48189501 | 3 | 48189501 | 48191100 | ID_155578 | 1600 | 1 | 5.65E-05 | 31 | 1.9375 | |
| DMR3:48461101 | 3 | 48461101 | 48462600 | ID_155672 | 1500 | 1 | 5.09E-05 | 19 | 1.26666667 | ATRIP |
| DMR3:49270901 | 3 | 49270901 | 49271300 | ID_155922 | 400 | 1 | 3.18E-05 | 2 | 0.5 | C3orf62 |
| DMR3:50021601 | 3 | 50021601 | 50023200 | ID_156170 | 1600 | 1 | 7.65E-05 | 22 | 1.375 | RBM6 |
| DMR3:51385701 | 3 | 51385701 | 51386900 | ID_156598 | 1200 | 1 | 7.55E-05 | 25 | 2.08333333 | MANF |
| DMR3:51469201 | 3 | 51469201 | 51471600 | ID_156621 | 2400 | 1 | 9.22E-05 | 37 | 1.54166667 | VPRBP |
| DMR3:51597101 | 3 | 51597101 | 51597400 | ID_156667 | 300 | 1 | 8.39E-05 | 2 | 0.66666667 | RAD54L2 |
| DMR3:52622301 | 3 | 52622301 | 52622500 | ID_157006 | 200 | 1 | 9.76E-05 | 1 | 0.5 | PBRM1 |
| DMR3:52729001 | 3 | 52729001 | 52729700 | ID_157045 | 700 | 1 | 0.000061 | 11 | 1.57142857 | NEK4 |
| DMR3:54446501 | 3 | 54446501 | 54446700 | ID_157597 | 200 | 1 | 5.95E-05 | 0 | 0 | CACNA2D3 |
| DMR3:55470001 | 3 | 55470001 | 55471000 | ID_157911 | 1000 | 2 | 7.95E-07 | 35 | 3.5 | WNT5A |
| DMR3:55544001 | 3 | 55544001 | 55545700 | ID_157934 | 1700 | 1 | 5.69E-05 | 18 | 1.05882353 | ERC2 |
| DMR3:55567401 | 3 | 55567401 | 55570100 | ID_157940 | 2700 | 1 | 8.02E-05 | 32 | 1.18518519 | ERC2 |
| DMR3:56280801 | 3 | 56280801 | 56281700 | ID_158168 | 900 | 1 | 7.95E-05 | 23 | 2.55555556 | ERC2 |
| DMR3:58317201 | 3 | 58317201 | 58317900 | ID_158808 | 700 | 1 | 6.3E-06 | 7 | 1 | RP11-80H18.3;RPP14 |
| DMR3:59701001 | 3 | 59701001 | 59701500 | ID_159254 | 500 | 1 | 2.32E-05 | 14 | 2.8 | |
| DMR3:60963801 | 3 | 60963801 | 60964600 | ID_159660 | 800 | 1 | 8.62E-05 | 4 | 0.5 | FHIT |
| DMR3:61199101 | 3 | 61199101 | 61201400 | ID_159731 | 2300 | 1 | 4.37E-05 | 9 | 0.39130435 | FHIT |
| DMR3:65314301 | 3 | 65314301 | 65315500 | ID_160966 | 1200 | 1 | 7.88E-05 | 9 | 0.75 | |
| DMR3:68059901 | 3 | 68059901 | 68060600 | ID_161782 | 700 | 1 | 2.09E-05 | 6 | 0.85714286 | FAM19A1 |
| DMR3:68191801 | 3 | 68191801 | 68192300 | ID_161816 | 500 | 1 | 4.37E-07 | 6 | 1.2 | FAM19A1 |
| DMR3:73228201 | 3 | 73228201 | 73229300 | ID_163349 | 1100 | 1 | 0.000066 | 17 | 1.54545455 | |
| DMR3:74209701 | 3 | 74209701 | 74210700 | ID_163633 | 1000 | 1 | 5.55E-06 | 7 | 0.7 | |
| DMR3:75279301 | 3 | 75279301 | 75281300 | ID_163930 | 2000 | 1 | 1.46E-05 | 13 | 0.65 | |
| DMR3:75658101 | 3 | 75658101 | 75659000 | ID_164049 | 900 | 1 | 7.28E-05 | 54 | 6 | RARRES2P1 |
| DMR3:78481101 | 3 | 78481101 | 78482000 | ID_164846 | 900 | 1 | 3.93E-05 | 19 | 2.11111111 | |
| DMR3:78658301 | 3 | 78658301 | 78658400 | ID_164898 | 100 | 1 | 6.24E-05 | 1 | 1 | ROBO1 |
| DMR3:81970301 | 3 | 81970301 | 81971400 | ID_165746 | 1100 | 1 | 9.56E-06 | 6 | 0.54545455 | |
| DMR3:85518101 | 3 | 85518101 | 85518400 | ID_166678 | 300 | 1 | 6.34E-05 | 4 | 1.33333333 | CADM2 |
| DMR3:85782301 | 3 | 85782301 | 85782900 | ID_166742 | 600 | 1 | 1.19E-05 | 11 | 1.83333333 | CADM2 |
| DMR3:86209301 | 3 | 86209301 | 86209400 | ID_166846 | 100 | 1 | 5.75E-05 | 1 | 1 | |
| DMR3:86212201 | 3 | 86212201 | 86212600 | ID_166847 | 400 | 1 | 3.05E-06 | 3 | 0.75 | |
| DMR3:87183701 | 3 | 87183701 | 87185000 | ID_167088 | 1300 | 1 | 5.29E-05 | 8 | 0.61538462 | |
| DMR3:88009101 | 3 | 88009101 | 88010800 | ID_167310 | 1700 | 1 | 8.53E-05 | 16 | 0.94117647 | |
| DMR3:88574101 | 3 | 88574101 | 88574400 | ID_167457 | 300 | 1 | 9.96E-06 | 6 | 2 | |
| DMR3:89851701 | 3 | 89851701 | 89854100 | ID_167787 | 2400 | 1 | 2.84E-05 | 22 | 0.91666667 | |
| DMR3:91693901 | 3 | 91693901 | 91694100 | ID_168308 | 200 | 1 | 8.12E-05 | 2 | 1 | |
| DMR3:92182701 | 3 | 92182701 | 92184600 | ID_168476 | 1900 | 1 | 4.54E-05 | 35 | 1.84210526 | |
| DMR3:92286501 | 3 | 92286501 | 92288000 | ID_168511 | 1500 | 1 | 4.68E-05 | 23 | 1.53333333 | |
| DMR3:92683001 | 3 | 92683001 | 92687700 | ID_168648 | 4700 | 1 | 4.97E-05 | 80 | 1.70212766 | |
| DMR3:93488201 | 3 | 93488201 | 93490100 | ID_168910 | 1900 | 1 | 5.57E-05 | 30 | 1.57894737 | |
| DMR3:93491501 | 3 | 93491501 | 93493100 | ID_168911 | 1600 | 1 | 4.33E-05 | 27 | 1.6875 | |
| DMR3:94647601 | 3 | 94647601 | 94648800 | ID_169226 | 1200 | 1 | 7.62E-05 | 13 | 1.08333333 | |
| DMR3:94847301 | 3 | 94847301 | 94848800 | ID_169280 | 1500 | 1 | 8.24E-05 | 15 | 1 | |
| DMR3:95592401 | 3 | 95592401 | 95593600 | ID_169477 | 1200 | 1 | 6.63E-05 | 5 | 0.41666667 | |
| DMR3:96477901 | 3 | 96477901 | 96478000 | ID_169695 | 100 | 1 | 5.42E-05 | 0 | 0 | |
| DMR3:96703601 | 3 | 96703601 | 96704300 | ID_169760 | 700 | 1 | 9.56E-05 | 15 | 2.14285714 | |
| DMR3:97425001 | 3 | 97425001 | 97427500 | ID_169946 | 2500 | 1 | 6.71E-05 | 13 | 0.52 | EPHA6 |
| DMR3:98428801 | 3 | 98428801 | 98429300 | ID_170220 | 500 | 1 | 3.04E-05 | 1 | 0.2 | RP11-325B23.2 |
| DMR3:98856801 | 3 | 98856801 | 98858400 | ID_170342 | 1600 | 1 | 0.000038 | 54 | 3.375 | DCBLD2 |
| DMR3:99103301 | 3 | 99103301 | 99103500 | ID_170410 | 200 | 1 | 3.26E-05 | 0 | 0 | |
| DMR3:99976201 | 3 | 99976201 | 99976400 | ID_170641 | 200 | 1 | 2.86E-05 | 2 | 1 | FILIP1L;CMSS1 |
| DMR3:101300301 | 3 | 101300301 | 101300900 | ID_171044 | 600 | 1 | 8.42E-05 | 12 | 2 | IMPG2 |
| DMR3:101696501 | 3 | 101696501 | 101696800 | ID_171158 | 300 | 1 | 9.34E-05 | 2 | 0.66666667 | |
| DMR3:106136701 | 3 | 106136701 | 106137500 | ID_172393 | 800 | 1 | 8.63E-05 | 6 | 0.75 | |
| DMR3:106563501 | 3 | 106563501 | 106563800 | ID_172507 | 300 | 1 | 0.000071 | 0 | 0 | |
| DMR3:107291101 | 3 | 107291101 | 107291400 | ID_172709 | 300 | 1 | 2.63E-05 | 3 | 1 | DUBR;RP11-446H18.5 |
| DMR3:108657201 | 3 | 108657201 | 108659600 | ID_173084 | 2400 | 1 | 7.29E-05 | 17 | 0.70833333 | DZIP3 |
| DMR3:109976201 | 3 | 109976201 | 109979600 | ID_173472 | 3400 | 1 | 0.000061 | 23 | 0.67647059 | RP11-696F10.1 |
| DMR3:111346301 | 3 | 111346301 | 111346600 | ID_173830 | 300 | 1 | 1.37E-05 | 1 | 0.33333333 | CD96 |
| DMR3:112357601 | 3 | 112357601 | 112358200 | ID_174120 | 600 | 1 | 7.55E-05 | 9 | 1.5 | CD200 |
| DMR3:113198301 | 3 | 113198301 | 113198500 | ID_174371 | 200 | 2 | 4.33E-05 | 2 | 1 | |
| DMR3:113478901 | 3 | 113478901 | 113480800 | ID_174455 | 1900 | 1 | 0.00004 | 13 | 0.68421053 | SPICE1 |
| DMR3:113917601 | 3 | 113917601 | 113918700 | ID_174592 | 1100 | 1 | 2.48E-05 | 10 | 0.90909091 | GRAMD1C |
| DMR3:115192201 | 3 | 115192201 | 115195100 | ID_174959 | 2900 | 1 | 3.04E-05 | 22 | 0.75862069 | |
| DMR3:116586401 | 3 | 116586401 | 116586900 | ID_175354 | 500 | 1 | 3.92E-05 | 6 | 1.2 | LSAMP |
| DMR3:117831401 | 3 | 117831401 | 117831600 | ID_175724 | 200 | 1 | 4.31E-05 | 1 | 0.5 | RP11-384F7.2 |
| DMR3:118145101 | 3 | 118145101 | 118145200 | ID_175817 | 100 | 1 | 9.01E-05 | 0 | 0 | RP11-384F7.1 |
| DMR3:118898901 | 3 | 118898901 | 118900300 | ID_176007 | 1400 | 1 | 9.53E-05 | 10 | 0.71428571 | |
| DMR3:121366901 | 3 | 121366901 | 121368600 | ID_176746 | 1700 | 1 | 8.49E-05 | 4 | 0.23529412 | STXBP5L |
| DMR3:121458801 | 3 | 121458801 | 121459500 | ID_176767 | 700 | 1 | 1.02E-05 | 12 | 1.71428571 | POLQ |
| DMR3:122491601 | 3 | 122491601 | 122492000 | ID_177071 | 400 | 1 | 7.71E-05 | 14 | 3.5 | KPNA1 |
| DMR3:125708601 | 3 | 125708601 | 125708800 | ID_178045 | 200 | 1 | 5.57E-05 | 3 | 1.5 | |
| DMR3:126932501 | 3 | 126932501 | 126932900 | ID_178423 | 400 | 1 | 1.09E-05 | 10 | 2.5 | CHCHD6 |
| DMR3:128465301 | 3 | 128465301 | 128465900 | ID_178912 | 600 | 1 | 1.5E-06 | 5 | 0.83333333 | DNAJB8;DNAJB8-AS1 |
| DMR3:128805501 | 3 | 128805501 | 128808900 | ID_179015 | 3400 | 1 | 8.62E-06 | 39 | 1.14705882 | RAB7A |
| DMR3:129108301 | 3 | 129108301 | 129109300 | ID_179109 | 1000 | 1 | 3.77E-05 | 15 | 1.5 | RAB43;ISY1-RAB43 |
| DMR3:131535501 | 3 | 131535501 | 131536500 | ID_179856 | 1000 | 1 | 5.19E-05 | 4 | 0.4 | CPNE4 |
| DMR3:135093801 | 3 | 135093801 | 135094800 | ID_180917 | 1000 | 1 | 5.07E-05 | 6 | 0.6 | EPHB1 |
| DMR3:135252701 | 3 | 135252701 | 135253100 | ID_180966 | 400 | 1 | 5.51E-06 | 1 | 0.25 | EPHB1 |
| DMR3:135502601 | 3 | 135502601 | 135502800 | ID_181046 | 200 | 1 | 0.000088 | 5 | 2.5 | |
| DMR3:137878401 | 3 | 137878401 | 137879800 | ID_181780 | 1400 | 1 | 7.55E-05 | 3 | 0.21428571 | |
| DMR3:139742301 | 3 | 139742301 | 139744000 | ID_182361 | 1700 | 1 | 9.65E-05 | 11 | 0.64705882 | |
| DMR3:141658901 | 3 | 141658901 | 141659200 | ID_182943 | 300 | 1 | 0.000014 | 3 | 1 | |
| DMR3:142042801 | 3 | 142042801 | 142045200 | ID_183068 | 2400 | 1 | 3.32E-06 | 78 | 3.25 | RP11-343B5.1;TFDP2 |
| DMR3:142269101 | 3 | 142269101 | 142269200 | ID_183138 | 100 | 1 | 9.76E-05 | 0 | 0 | |
| DMR3:144093001 | 3 | 144093001 | 144093300 | ID_183673 | 300 | 1 | 8.97E-05 | 1 | 0.33333333 | |
| DMR3:145893501 | 3 | 145893501 | 145895500 | ID_184155 | 2000 | 1 | 1.77E-05 | 13 | 0.65 | |
| DMR3:147251601 | 3 | 147251601 | 147251700 | ID_184499 | 100 | 1 | 4.87E-05 | 1 | 1 | RP11-649A16.1 |
| DMR3:151613001 | 3 | 151613001 | 151618600 | ID_185748 | 5600 | 1 | 8.84E-05 | 42 | 0.75 | |
| DMR3:151651201 | 3 | 151651201 | 151652300 | ID_185758 | 1100 | 1 | 8.68E-05 | 14 | 1.27272727 | RP11-454C18.1 |
| DMR3:151871201 | 3 | 151871201 | 151871900 | ID_185826 | 700 | 1 | 1.75E-05 | 6 | 0.85714286 | AADACL2-AS1 |
| DMR3:152296701 | 3 | 152296701 | 152297300 | ID_185943 | 600 | 1 | 8.07E-05 | 1 | 0.16666667 | MBNL1 |
| DMR3:153449201 | 3 | 153449201 | 153450400 | ID_186273 | 1200 | 1 | 9.66E-05 | 17 | 1.41666667 | RP11-23D24.2 |
| DMR3:153998101 | 3 | 153998101 | 154000400 | ID_186422 | 2300 | 1 | 2.49E-05 | 15 | 0.65217391 | |
| DMR3:154628401 | 3 | 154628401 | 154628700 | ID_186614 | 300 | 1 | 5.38E-05 | 0 | 0 | |
| DMR3:155510501 | 3 | 155510501 | 155511300 | ID_186868 | 800 | 1 | 8.46E-05 | 13 | 1.625 | PLCH1 |
| DMR3:157495901 | 3 | 157495901 | 157496100 | ID_187461 | 200 | 1 | 0.000068 | 2 | 1 | VEPH1 |
| DMR3:159746701 | 3 | 159746701 | 159747500 | ID_188091 | 800 | 1 | 9.68E-05 | 2 | 0.25 | IQCJ-SCHIP1 |
| DMR3:159965301 | 3 | 159965301 | 159967200 | ID_188156 | 1900 | 1 | 0.000021 | 21 | 1.10526316 | IL12A-AS1 |
| DMR3:161075701 | 3 | 161075701 | 161076100 | ID_188470 | 400 | 1 | 1.45E-05 | 6 | 1.5 | PPM1L |
| DMR3:165586001 | 3 | 165586001 | 165586600 | ID_189604 | 600 | 1 | 3.32E-05 | 14 | 2.33333333 | LINC01322 |
| DMR3:170859001 | 3 | 170859001 | 170863600 | ID_191116 | 4600 | 1 | 9.04E-05 | 63 | 1.36956522 | CLDN11 |
| DMR3:172098401 | 3 | 172098401 | 172099000 | ID_191501 | 600 | 1 | 3.29E-05 | 6 | 1 | FNDC3B |
| DMR3:173404201 | 3 | 173404201 | 173405800 | ID_191885 | 1600 | 1 | 1.19E-06 | 9 | 0.5625 | NLGN1 |
| DMR3:173413601 | 3 | 173413601 | 173414600 | ID_191887 | 1000 | 1 | 3.24E-05 | 6 | 0.6 | NLGN1 |
| DMR3:175795101 | 3 | 175795101 | 175795200 | ID_192534 | 100 | 1 | 6.27E-05 | 0 | 0 | NAALADL2 |
| DMR3:176080201 | 3 | 176080201 | 176081500 | ID_192611 | 1300 | 1 | 5.84E-05 | 11 | 0.84615385 | |
| DMR3:177269701 | 3 | 177269701 | 177272700 | ID_192940 | 3000 | 1 | 2.56E-05 | 103 | 3.43333333 | |
| DMR3:177742701 | 3 | 177742701 | 177742900 | ID_193090 | 200 | 1 | 4.54E-05 | 1 | 0.5 | LINC00578 |
| DMR3:177801901 | 3 | 177801901 | 177802700 | ID_193107 | 800 | 1 | 9.1E-06 | 4 | 0.5 | |
| DMR3:178789201 | 3 | 178789201 | 178791700 | ID_193393 | 2500 | 1 | 2.96E-05 | 9 | 0.36 | KCNMB2;KCNMB2-AS1; |
| | | | | | | | | | | RP11-385J1.3 |
| DMR3:180323601 | 3 | 180323601 | 180326400 | ID_193856 | 2800 | 1 | 2.21E-06 | 60 | 2.14285714 | RP11-420J11.1 |
| DMR3:181299801 | 3 | 181299801 | 181300800 | ID_194155 | 1000 | 1 | 8.35E-05 | 9 | 0.9 | SOX2-OT |
| DMR3:181768701 | 3 | 181768701 | 181770100 | ID_194283 | 1400 | 1 | 1.41E-05 | 6 | 0.42857143 | SOX2-OT |
| DMR3:181800901 | 3 | 181800901 | 181802000 | ID_194293 | 1100 | 1 | 0.000039 | 14 | 1.27272727 | SOX2-OT |
| DMR3:182202701 | 3 | 182202701 | 182203000 | ID_194415 | 300 | 1 | 9.47E-06 | 4 | 1.33333333 | |
| DMR3:182355701 | 3 | 182355701 | 182356000 | ID_194464 | 300 | 1 | 1.81E-06 | 2 | 0.66666667 | |
| DMR3:182691601 | 3 | 182691601 | 182693000 | ID_194562 | 1400 | 1 | 8.87E-06 | 15 | 1.07142857 | RP11-646E18.3 |
| DMR3:182707901 | 3 | 182707901 | 182708600 | ID_194566 | 700 | 1 | 3.13E-05 | 6 | 0.85714286 | |
| DMR3:186492201 | 3 | 186492201 | 186494900 | ID_195766 | 2700 | 1 | 1.57E-06 | 50 | 1.85185185 | RP11-48F14.1 |
| DMR3:187329601 | 3 | 187329601 | 187329800 | ID_196031 | 200 | 1 | 5.31E-05 | 2 | 1 | |
| DMR3:189591501 | 3 | 189591501 | 189591700 | ID_196709 | 200 | 1 | 5.72E-05 | 0 | 0 | |
| DMR3:190242601 | 3 | 190242601 | 190245200 | ID_196906 | 2600 | 1 | 9.37E-05 | 15 | 0.57692308 | |
| DMR3:191958201 | 3 | 191958201 | 191959300 | ID_197404 | 1100 | 1 | 0.000019 | 6 | 0.54545455 | |
| DMR3:192780601 | 3 | 192780601 | 192782000 | ID_197652 | 1400 | 1 | 6.43E-05 | 12 | 0.85714286 | |
| DMR3:193574601 | 3 | 193574601 | 193576300 | ID_197892 | 1700 | 1 | 0.000074 | 9 | 0.52941177 | ATP13A4 |
| DMR3:195060401 | 3 | 195060401 | 195062300 | ID_198363 | 1900 | 1 | 8.52E-05 | 50 | 2.63157895 | |
| DMR3:195099001 | 3 | 195099001 | 195101100 | ID_198376 | 2100 | 1 | 1.25E-05 | 46 | 2.19047619 | XXYLT1 |
| DMR3:195621601 | 3 | 195621601 | 195623800 | ID_198537 | 2200 | 1 | 6.37E-06 | 47 | 2.13636364 | |
| DMR3:197873401 | 3 | 197873401 | 197874500 | ID_199248 | 1100 | 1 | 3.43E-05 | 16 | 1.45454546 | LRCH3 |
| DMR3:198096901 | 3 | 198096901 | 198107800 | ID_199321 | 10900 | 73 | 9.27E-30 | 397 | 3.64220184 | |
| DMR4:266401 | 4 | 266401 | 267700 | ID_199433 | 1300 | 1 | 4.91E-05 | 14 | 1.07692308 | |
| DMR4:602401 | 4 | 602401 | 602900 | ID_199536 | 500 | 1 | 7.03E-05 | 9 | 1.8 | |
| DMR4:866901 | 4 | 866901 | 868100 | ID_199613 | 1200 | 1 | 7.79E-05 | 51 | 4.25 | GAK |
| DMR4:971301 | 4 | 971301 | 972100 | ID_199645 | 800 | 1 | 6.56E-05 | 25 | 3.125 | DGKQ |
| DMR4:1003701 | 4 | 1003701 | 1004800 | ID_199656 | 1100 | 1 | 2.98E-05 | 44 | 4 | IDUA |
| DMR4:1469101 | 4 | 1469101 | 1470400 | ID_199809 | 1300 | 1 | 6.69E-05 | 30 | 2.30769231 | |
| DMR4:2710701 | 4 | 2710701 | 2712500 | ID_200187 | 1800 | 1 | 5.39E-05 | 41 | 2.27777778 | FAM193A |
| DMR4:3266501 | 4 | 3266501 | 3269300 | ID_200359 | 2800 | 1 | 8.21E-05 | 73 | 2.60714286 | MSANTD1 |
| DMR4:3792201 | 4 | 3792201 | 3792600 | ID_200532 | 400 | 1 | 8.98E-05 | 7 | 1.75 | |
| DMR4:4918201 | 4 | 4918201 | 4919400 | ID_200881 | 1200 | 1 | 5.87E-05 | 13 | 1.08333333 | |
| DMR4:6252901 | 4 | 6252901 | 6253200 | ID_201289 | 300 | 1 | 4.01E-05 | 7 | 2.33333333 | |
| DMR4:6736401 | 4 | 6736401 | 6737700 | ID_201442 | 1300 | 1 | 1.96E-07 | 14 | 1.07692308 | |
| DMR4:7203701 | 4 | 7203701 | 7203900 | ID_201583 | 200 | 1 | 5.09E-05 | 2 | 1 | SORCS2 |
| DMR4:7825801 | 4 | 7825801 | 7828700 | ID_201791 | 2900 | 1 | 8.87E-08 | 56 | 1.93103448 | AFAP1 |
| DMR4:9642901 | 4 | 9642901 | 9643700 | ID_202344 | 800 | 1 | 3.93E-05 | 8 | 1 | |
| DMR4:12059301 | 4 | 12059301 | 12061200 | ID_203066 | 1900 | 1 | 4.42E-05 | 6 | 0.31578947 | |
| DMR4:14660801 | 4 | 14660801 | 14662900 | ID_203826 | 2100 | 1 | 1.81E-05 | 10 | 0.47619048 | LINC00504 |
| DMR4:14807801 | 4 | 14807801 | 14808100 | ID_203869 | 300 | 1 | 6.96E-05 | 4 | 1.33333333 | LINC00504 |
| DMR4:15888301 | 4 | 15888301 | 15890100 | ID_204187 | 1800 | 1 | 3.35E-05 | 25 | 1.38888889 | |
| DMR4:18842301 | 4 | 18842301 | 18843400 | ID_205112 | 1100 | 1 | 3.88E-05 | 9 | 0.81818182 | |
| DMR4:23261101 | 4 | 23261101 | 23262200 | ID_206426 | 1100 | 1 | 4.28E-05 | 5 | 0.45454546 | RP11-453O5.1 |
| DMR4:24425801 | 4 | 24425801 | 24427600 | ID_206766 | 1800 | 1 | 5.05E-05 | 15 | 0.83333333 | |
| DMR4:24588101 | 4 | 24588101 | 24588300 | ID_206815 | 200 | 1 | 9.82E-05 | 0 | 0 | |
| DMR4:24627801 | 4 | 24627801 | 24628100 | ID_206829 | 300 | 1 | 5.23E-06 | 2 | 0.66666667 | |
| DMR4:25104501 | 4 | 25104501 | 25107900 | ID_206971 | 3400 | 1 | 6.14E-06 | 46 | 1.35294118 | |
| DMR4:26411601 | 4 | 26411601 | 26412200 | ID_207363 | 600 | 1 | 6.43E-05 | 15 | 2.5 | RBPJ |
| DMR4:26524201 | 4 | 26524201 | 26526100 | ID_207394 | 1900 | 1 | 7.02E-05 | 14 | 0.73684211 | |
| DMR4:27326801 | 4 | 27326801 | 27328400 | ID_207625 | 1600 | 1 | 1.12E-05 | 13 | 0.8125 | |
| DMR4:30359901 | 4 | 30359901 | 30361500 | ID_208420 | 1600 | 1 | 5.26E-07 | 9 | 0.5625 | |
| DMR4:31437301 | 4 | 31437301 | 31439900 | ID_208715 | 2600 | 2 | 9.28E-06 | 51 | 1.96153846 | |
| DMR4:31620401 | 4 | 31620401 | 31620600 | ID_208756 | 200 | 1 | 2.57E-06 | 2 | 1 | |
| DMR4:34475601 | 4 | 34475601 | 34477300 | ID_209462 | 1700 | 1 | 9.33E-05 | 7 | 0.41176471 | |
| DMR4:35333601 | 4 | 35333601 | 35335900 | ID_209686 | 2300 | 1 | 9.08E-05 | 27 | 1.17391304 | |
| DMR4:35360701 | 4 | 35360701 | 35362200 | ID_209692 | 1500 | 1 | 5.85E-05 | 4 | 0.26666667 | |
| DMR4:36743201 | 4 | 36743201 | 36743800 | ID_210055 | 600 | 1 | 1.15E-05 | 5 | 0.83333333 | |
| DMR4:37841101 | 4 | 37841101 | 37844700 | ID_210394 | 3600 | 1 | 2.61E-05 | 32 | 0.88888889 | PGM2 |
| DMR4:37936701 | 4 | 37936701 | 37936800 | ID_210421 | 100 | 1 | 8.34E-07 | 1 | 1 | TBC1D1 |
| DMR4:38897601 | 4 | 38897601 | 38898600 | ID_210738 | 1000 | 1 | 7.94E-05 | 9 | 0.9 | FAM114A1 |
| DMR4:39309401 | 4 | 39309401 | 39309700 | ID_210859 | 300 | 1 | 4.67E-06 | 3 | 1 | RFC1 |
| DMR4:39462101 | 4 | 39462101 | 39462300 | ID_210904 | 200 | 1 | 1.19E-05 | 1 | 0.5 | LIAS |
| DMR4:40304301 | 4 | 40304301 | 40305500 | ID_211177 | 1200 | 1 | 4.49E-05 | 7 | 0.58333333 | |
| DMR4:41331401 | 4 | 41331401 | 41333700 | ID_211480 | 2300 | 1 | 3.87E-05 | 16 | 0.69565217 | |
| DMR4:41644801 | 4 | 41644801 | 41646000 | ID_211561 | 1200 | 1 | 4.61E-05 | 8 | 0.66666667 | LIMCH1 |
| DMR4:49123201 | 4 | 49123201 | 49155000 | ID_213695 | 31800 | 1 | 1.62E-05 | 613 | 1.92767296 | |
| DMR4:49489601 | 4 | 49489601 | 49491800 | ID_213756 | 2200 | 1 | 6.85E-05 | 14 | 0.63636364 | |
| DMR4:50262401 | 4 | 50262401 | 50263500 | ID_213975 | 1100 | 1 | 1.08E-06 | 15 | 1.36363636 | |
| DMR4:50783301 | 4 | 50783301 | 50784200 | ID_214144 | 900 | 1 | 9.43E-05 | 12 | 1.33333333 | |
| DMR4:51638501 | 4 | 51638501 | 51639700 | ID_214434 | 1200 | 1 | 1.57E-05 | 19 | 1.58333333 | |
| DMR4:51687901 | 4 | 51687901 | 51688200 | ID_214449 | 300 | 1 | 4.54E-05 | 5 | 1.66666667 | |
| DMR4:52463501 | 4 | 52463501 | 52463700 | ID_214684 | 200 | 1 | 9.73E-05 | 1 | 0.5 | |
| DMR4:53707601 | 4 | 53707601 | 53707800 | ID_215057 | 200 | 1 | 4.12E-05 | 2 | 1 | RP11-317M11.1;RP11- |
| | | | | | | | | | | 231C18.3 |
| DMR4:53924201 | 4 | 53924201 | 53925500 | ID_215130 | 1300 | 1 | 1.94E-05 | 9 | 0.69230769 | RP11-231C18.3 |
| DMR4:56463901 | 4 | 56463901 | 56464100 | ID_215885 | 200 | 1 | 6.37E-05 | 4 | 2 | PAICS |
| DMR4:57188501 | 4 | 57188501 | 57190600 | ID_216112 | 2100 | 1 | 0.000025 | 16 | 0.76190476 | IGFBP7-AS1 |
| DMR4:58680201 | 4 | 58680201 | 58681700 | ID_216501 | 1500 | 1 | 8.34E-05 | 5 | 0.33333333 | |
| DMR4:60509901 | 4 | 60509901 | 60510100 | ID_216958 | 200 | 1 | 8.67E-05 | 2 | 1 | |
| DMR4:63729801 | 4 | 63729801 | 63731300 | ID_217811 | 1500 | 1 | 3.78E-05 | 6 | 0.4 | |
| DMR4:66893101 | 4 | 66893101 | 66893400 | ID_218610 | 300 | 1 | 2.41E-06 | 2 | 0.66666667 | |
| DMR4:68913701 | 4 | 68913701 | 68914000 | ID_219179 | 300 | 1 | 6.17E-05 | 3 | 1 | |
| DMR4:70121301 | 4 | 70121301 | 70121600 | ID_219505 | 300 | 1 | 7.68E-05 | 3 | 1 | |
| DMR4:70763601 | 4 | 70763601 | 70764700 | ID_219677 | 1100 | 1 | 1.82E-05 | 5 | 0.45454546 | RUFY3 |
| DMR4:73049501 | 4 | 73049501 | 73051000 | ID_220341 | 1500 | 1 | 7.44E-05 | 20 | 1.33333333 | |
| DMR4:73529801 | 4 | 73529801 | 73530700 | ID_220494 | 900 | 1 | 4.86E-06 | 4 | 0.44444444 | RP11-622A1.2 |
| DMR4:74386601 | 4 | 74386601 | 74386700 | ID_220740 | 100 | 1 | 9.41E-05 | 0 | 0 | EREG |
| DMR4:78306401 | 4 | 78306401 | 78309300 | ID_221911 | 2900 | 1 | 7.92E-08 | 61 | 2.10344828 | FRAS1 |
| DMR4:78942601 | 4 | 78942601 | 78943100 | ID_222109 | 500 | 1 | 5.69E-07 | 3 | 0.6 | |
| DMR4:79770901 | 4 | 79770901 | 79773200 | ID_222337 | 2300 | 1 | 7.49E-05 | 8 | 0.34782609 | |
| DMR4:82732501 | 4 | 82732501 | 82733400 | ID_223160 | 900 | 1 | 0.000086 | 11 | 1.22222222 | SCD5 |
| DMR4:83040301 | 4 | 83040301 | 83041500 | ID_223255 | 1200 | 1 | 4.36E-05 | 15 | 1.25 | COPS4 |
| DMR4:83266101 | 4 | 83266101 | 83268600 | ID_223322 | 2500 | 1 | 8.45E-05 | 15 | 0.6 | COQ2 |
| DMR4:83425301 | 4 | 83425301 | 83425600 | ID_223372 | 300 | 1 | 3.24E-05 | 2 | 0.66666667 | HELQ |
| DMR4:83435301 | 4 | 83435301 | 83436900 | ID_223375 | 1600 | 1 | 7.45E-05 | 9 | 0.5625 | HELQ |
| DMR4:85300501 | 4 | 85300501 | 85300700 | ID_223939 | 200 | 1 | 8.75E-05 | 1 | 0.5 | |
| DMR4:87924601 | 4 | 87924601 | 87925500 | ID_224675 | 900 | 1 | 4.74E-05 | 10 | 1.11111111 | |
| DMR4:90317401 | 4 | 90317401 | 90317700 | ID_225360 | 300 | 1 | 3.18E-05 | 4 | 1.33333333 | CCSER1 |
| DMR4:91001901 | 4 | 91001901 | 91003400 | ID_225541 | 1500 | 1 | 4.99E-05 | 6 | 0.4 | CCSER1 |
| DMR4:91877401 | 4 | 91877401 | 91879100 | ID_225758 | 1700 | 1 | 0.000065 | 10 | 0.58823529 | |
| DMR4:94137901 | 4 | 94137901 | 94138400 | ID_226335 | 500 | 1 | 0.000016 | 3 | 0.6 | RP11-363G15.2 |
| DMR4:95956901 | 4 | 95956901 | 95957500 | ID_226866 | 600 | 1 | 4.96E-05 | 6 | 1 | |
| DMR4:97337101 | 4 | 97337101 | 97339200 | ID_227259 | 2100 | 1 | 4.37E-05 | 9 | 0.42857143 | RP11-681L8.1;STPG2 |
| DMR4:98437501 | 4 | 98437501 | 98439100 | ID_227552 | 1600 | 1 | 0.000017 | 17 | 1.0625 | RAP1GDS1 |
| DMR4:98494301 | 4 | 98494301 | 98494500 | ID_227571 | 200 | 1 | 1.72E-05 | 1 | 0.5 | TSPAN5 |
| DMR4:98641101 | 4 | 98641101 | 98641900 | ID_227610 | 800 | 1 | 4.5E-06 | 6 | 0.75 | TSPAN5 |
| DMR4:99262101 | 4 | 99262101 | 99262200 | ID_227786 | 100 | 1 | 6.77E-05 | 0 | 0 | RP11-696N14.1 |
| DMR4:100004501 | 4 | 100004501 | 100005400 | ID_227987 | 900 | 1 | 3.81E-05 | 16 | 1.77777778 | RP11-15B17.1 |
| DMR4:101206001 | 4 | 101206001 | 101206200 | ID_228343 | 200 | 1 | 9.17E-06 | 3 | 1.5 | PPP3CA |
| DMR4:102670001 | 4 | 102670001 | 102670400 | ID_228771 | 400 | 1 | 5.67E-06 | 5 | 1.25 | MANBA |
| DMR4:104601701 | 4 | 104601701 | 104601900 | ID_229328 | 200 | 1 | 3.51E-05 | 1 | 0.5 | AC004053.1 |
| DMR4:105739101 | 4 | 105739101 | 105739300 | ID_229654 | 200 | 1 | 7.52E-05 | 0 | 0 | GSTCD;INTS12 |
| DMR4:107815401 | 4 | 107815401 | 107816500 | ID_230228 | 1100 | 1 | 8.99E-05 | 10 | 0.90909091 | |
| DMR4:109476201 | 4 | 109476201 | 109477400 | ID_230718 | 1200 | 1 | 2.02E-05 | 25 | 2.08333333 | SEC24B |
| DMR4:111383801 | 4 | 111383801 | 111384300 | ID_231262 | 500 | 1 | 7.73E-05 | 2 | 0.4 | |
| DMR4:112756301 | 4 | 112756301 | 112758800 | ID_231665 | 2500 | 1 | 6.94E-05 | 64 | 2.56 | |
| DMR4:113246101 | 4 | 113246101 | 113247300 | ID_231802 | 1200 | 1 | 6.11E-05 | 3 | 0.25 | ANK2 |
| DMR4:116237101 | 4 | 116237101 | 116237800 | ID_232591 | 700 | 1 | 8.01E-05 | 2 | 0.28571429 | RP11-659O3.1 |
| DMR4:117340101 | 4 | 117340101 | 117342100 | ID_232885 | 2000 | 1 | 3.14E-05 | 6 | 0.3 | AC107399.2 |
| DMR4:117823201 | 4 | 117823201 | 117825300 | ID_233014 | 2100 | 1 | 2.97E-06 | 22 | 1.04761905 | |
| DMR4:118791101 | 4 | 118791101 | 118792500 | ID_233285 | 1400 | 1 | 3.91E-06 | 72 | 5.14285714 | SEC24D |
| DMR4:120508101 | 4 | 120508101 | 120510100 | ID_233774 | 2000 | 1 | 9.09E-05 | 18 | 0.9 | |
| DMR4:120582201 | 4 | 120582201 | 120582700 | ID_233798 | 500 | 1 | 4.76E-05 | 6 | 1.2 | |
| DMR4:120784201 | 4 | 120784201 | 120784500 | ID_233850 | 300 | 1 | 3.04E-06 | 4 | 1.33333333 | PRDM5 |
| DMR4:122192801 | 4 | 122192801 | 122194000 | ID_234253 | 1200 | 1 | 3.36E-05 | 11 | 0.91666667 | KIAA1109 |
| DMR4:123010801 | 4 | 123010801 | 123012600 | ID_234480 | 1800 | 1 | 9.27E-05 | 16 | 0.88888889 | SPATA5 |
| DMR4:123073901 | 4 | 123073901 | 123075400 | ID_234497 | 1500 | 1 | 3.47E-05 | 19 | 1.26666667 | SPATA5 |
| DMR4:125682501 | 4 | 125682501 | 125683200 | ID_235232 | 700 | 1 | 9.69E-05 | 23 | 3.28571429 | NUP58P1;RP11-399F2.2 |
| DMR4:126859401 | 4 | 126859401 | 126859700 | ID_235551 | 300 | 1 | 3.58E-07 | 2 | 0.66666667 | |
| DMR4:127065701 | 4 | 127065701 | 127067700 | ID_235611 | 2000 | 1 | 9.41E-05 | 24 | 1.2 | RP11-810P8.1 |
| DMR4:128188401 | 4 | 128188401 | 128189300 | ID_235923 | 900 | 1 | 7.38E-05 | 4 | 0.44444444 | LARP1B |
| DMR4:132386201 | 4 | 132386201 | 132386500 | ID_237049 | 300 | 1 | 1.28E-05 | 1 | 0.33333333 | |
| DMR4:133560401 | 4 | 133560401 | 133561500 | ID_237344 | 1100 | 1 | 7.04E-05 | 9 | 0.81818182 | AC105252.1 |
| DMR4:134312901 | 4 | 134312901 | 134313100 | ID_237528 | 200 | 1 | 9.79E-05 | 1 | 0.5 | RP11-400D2.2 |
| DMR4:135995101 | 4 | 135995101 | 135997300 | ID_237946 | 2200 | 1 | 0.000016 | 11 | 0.5 | RNU1-89P |
| DMR4:138485201 | 4 | 138485201 | 138486200 | ID_238584 | 1000 | 1 | 9.68E-05 | 8 | 0.8 | |
| DMR4:140884601 | 4 | 140884601 | 140884900 | ID_239306 | 300 | 1 | 1.94E-05 | 2 | 0.66666667 | RNF150 |
| DMR4:141421201 | 4 | 141421201 | 141421300 | ID_239461 | 100 | 1 | 8.24E-05 | 0 | 0 | |
| DMR4:141826601 | 4 | 141826601 | 141828500 | ID_239576 | 1900 | 1 | 5.41E-05 | 6 | 0.31578947 | |
| DMR4:141876101 | 4 | 141876101 | 141876200 | ID_239591 | 100 | 1 | 3.65E-05 | 0 | 0 | |
| DMR4:142457001 | 4 | 142457001 | 142457200 | ID_239749 | 200 | 1 | 0.000079 | 0 | 0 | INPP4B |
| DMR4:143101301 | 4 | 143101301 | 143103600 | ID_239931 | 2300 | 1 | 8.52E-05 | 25 | 1.08695652 | RP11-284M14.1 |
| DMR4:143534701 | 4 | 143534701 | 143535800 | ID_240063 | 1100 | 1 | 6.16E-05 | 7 | 0.63636364 | SMARCA5 |
| DMR4:144244101 | 4 | 144244101 | 144245400 | ID_240276 | 1300 | 1 | 0.000092 | 6 | 0.46153846 | |
| DMR4:144791601 | 4 | 144791601 | 144792500 | ID_240440 | 900 | 1 | 5.07E-05 | 15 | 1.66666667 | |
| DMR4:146592201 | 4 | 146592201 | 146592600 | ID_240977 | 400 | 2 | 1.71E-05 | 2 | 0.5 | |
| DMR4:147024001 | 4 | 147024001 | 147025100 | ID_241097 | 1100 | 1 | 8.13E-05 | 6 | 0.54545455 | |
| DMR4:151545201 | 4 | 151545201 | 151546500 | ID_242414 | 1300 | 1 | 5.34E-05 | 16 | 1.23076923 | FAM160A1 |
| DMR4:151848001 | 4 | 151848001 | 151848300 | ID_242506 | 300 | 1 | 6.94E-06 | 2 | 0.66666667 | |
| DMR4:151968301 | 4 | 151968301 | 151970500 | ID_242542 | 2200 | 1 | 0.000002 | 21 | 0.95454546 | RP11-73G16.1 |
| DMR4:152011301 | 4 | 152011301 | 152015000 | ID_242553 | 3700 | 1 | 8.03E-06 | 30 | 0.81081081 | |
| DMR4:157065701 | 4 | 157065701 | 157066400 | ID_244015 | 700 | 1 | 3.65E-05 | 4 | 0.57142857 | |
| DMR4:157720001 | 4 | 157720001 | 157723100 | ID_244189 | 3100 | 1 | 3.47E-05 | 19 | 0.61290323 | |
| DMR4:158570501 | 4 | 158570501 | 158573700 | ID_244434 | 3200 | 1 | 7.87E-05 | 53 | 1.65625 | RXFP1 |
| DMR4:159887701 | 4 | 159887701 | 159888700 | ID_244824 | 1000 | 1 | 8.59E-05 | 7 | 0.7 | |
| DMR4:161359201 | 4 | 161359201 | 161360100 | ID_245212 | 900 | 1 | 6.17E-05 | 6 | 0.66666667 | |
| DMR4:161560201 | 4 | 161560201 | 161560900 | ID_245261 | 700 | 1 | 4.63E-05 | 6 | 0.85714286 | FSTL5 |
| DMR4:163021001 | 4 | 163021001 | 163021200 | ID_245640 | 200 | 1 | 7.18E-05 | 1 | 0.5 | |
| DMR4:163683601 | 4 | 163683601 | 163683900 | ID_245834 | 300 | 1 | 0.000039 | 1 | 0.33333333 | 42795 |
| DMR4:166756901 | 4 | 166756901 | 166761200 | ID_246704 | 4300 | 1 | 2.22E-05 | 44 | 1.02325581 | SPOCK3 |
| DMR4:166895301 | 4 | 166895301 | 166895600 | ID_246741 | 300 | 1 | 0.000019 | 1 | 0.33333333 | SPOCK3 |
| DMR4:167243201 | 4 | 167243201 | 167245100 | ID_246834 | 1900 | 1 | 4.32E-05 | 32 | 1.68421053 | |
| DMR4:168870001 | 4 | 168870001 | 168870200 | ID_247315 | 200 | 1 | 4.59E-05 | 0 | 0 | PALLD;CBR4 |
| DMR4:169644201 | 4 | 169644201 | 169645500 | ID_247544 | 1300 | 1 | 8.68E-05 | 18 | 1.38461539 | CLCN3 |
| DMR4:171517101 | 4 | 171517101 | 171517300 | ID_248093 | 200 | 1 | 7.11E-05 | 0 | 0 | |
| DMR4:174510401 | 4 | 174510401 | 174511800 | ID_248956 | 1400 | 1 | 9.08E-05 | 21 | 1.5 | HPGD |
| DMR4:175332201 | 4 | 175332201 | 175332900 | ID_249190 | 700 | 1 | 4.09E-05 | 5 | 0.71428571 | |
| DMR4:176587201 | 4 | 176587201 | 176587500 | ID_249550 | 300 | 1 | 3.06E-05 | 1 | 0.33333333 | |
| DMR4:176844701 | 4 | 176844701 | 176846400 | ID_249624 | 1700 | 1 | 7.21E-05 | 22 | 1.29411765 | |
| DMR4:181683401 | 4 | 181683401 | 181684800 | ID_250941 | 1400 | 1 | 8.92E-05 | 24 | 1.71428571 | |
| DMR4:182421001 | 4 | 182421001 | 182421400 | ID_251175 | 400 | 1 | 5.2E-06 | 2 | 0.5 | TENM3 |
| DMR4:183982601 | 4 | 183982601 | 183983100 | ID_251685 | 500 | 1 | 8.37E-05 | 3 | 0.6 | STOX2 |
| DMR4:184858101 | 4 | 184858101 | 184863000 | ID_251962 | 4900 | 1 | 7.04E-05 | 82 | 1.67346939 | |
| DMR4:185119001 | 4 | 185119001 | 185119600 | ID_252042 | 600 | 1 | 9.33E-05 | 10 | 1.66666667 | |
| DMR4:185162701 | 4 | 185162701 | 185163800 | ID_252057 | 1100 | 1 | 2.57E-05 | 17 | 1.54545455 | CFAP97 |
| DMR4:185648701 | 4 | 185648701 | 185649000 | ID_252202 | 300 | 1 | 3.49E-06 | 3 | 1 | SORBS2 |
| DMR4:186175701 | 4 | 186175701 | 186180700 | ID_252363 | 5000 | 1 | 1.76E-05 | 35 | 0.7 | |
| DMR4:186315601 | 4 | 186315601 | 186315800 | ID_252406 | 200 | 1 | 0.00005 | 1 | 0.5 | F11-AS1 |
| DMR4:186476501 | 4 | 186476501 | 186478400 | ID_252453 | 1900 | 2 | 8.09E-06 | 17 | 0.89473684 | RP11-215A19.2;F11-AS1 |
| DMR4:187181101 | 4 | 187181101 | 187181300 | ID_252675 | 200 | 1 | 4.72E-05 | 2 | 1 | |
| DMR4:187313901 | 4 | 187313901 | 187314600 | ID_252714 | 700 | 1 | 1.24E-07 | 2 | 0.28571429 | |
| DMR4:187432401 | 4 | 187432401 | 187434000 | ID_252755 | 1600 | 1 | 6.95E-05 | 17 | 1.0625 | |
| DMR4:187898701 | 4 | 187898701 | 187901000 | ID_252898 | 2300 | 1 | 2.59E-05 | 21 | 0.91304348 | |
| DMR4:188342801 | 4 | 188342801 | 188343100 | ID_253037 | 300 | 1 | 5.19E-05 | 4 | 1.33333333 | |
| DMR4:188443001 | 4 | 188443001 | 188449600 | ID_253068 | 6600 | 2 | 1.7E-06 | 99 | 1.5 | LINC01060 |
| DMR4:188904601 | 4 | 188904601 | 188905900 | ID_253189 | 1300 | 1 | 0.000019 | 47 | 3.61538462 | |
| DMR4:190078801 | 4 | 190078801 | 190083700 | ID_253540 | 4900 | 1 | 5.38E-05 | 480 | 9.79591837 | DUX4L5;DUX4L4; |
| | | | | | | | | | | AC126281.5;AC126281.2 |
| DMR4:190120901 | 4 | 190120901 | 190122400 | ID_253555 | 1500 | 1 | 1.07E-07 | 263 | 17.5333333 | |
| DMR5:164501 | 5 | 164501 | 166700 | ID_253608 | 2200 | 3 | 8.79E-06 | 142 | 6.45454546 | PLEKHG4B |
| DMR5:561701 | 5 | 561701 | 565600 | ID_253734 | 3900 | 3 | 1.46E-07 | 396 | 10.1538462 | |
| DMR5:682101 | 5 | 682101 | 682400 | ID_253770 | 300 | 1 | 4.99E-05 | 4 | 1.33333333 | TPPP |
| DMR5:769701 | 5 | 769701 | 779700 | ID_253797 | 10000 | 1 | 3.71E-05 | 310 | 3.1 | |
| DMR5:1414001 | 5 | 1414001 | 1414400 | ID_254005 | 400 | 1 | 6.38E-06 | 13 | 3.25 | SLC6A3 |
| DMR5:1473001 | 5 | 1473001 | 1473600 | ID_254025 | 600 | 1 | 8.98E-05 | 22 | 3.66666667 | LPCAT1 |
| DMR5:1722201 | 5 | 1722201 | 1723800 | ID_254101 | 1600 | 1 | 6.31E-05 | 24 | 1.5 | |
| DMR5:3879101 | 5 | 3879101 | 3881800 | ID_254784 | 2700 | 2 | 6.99E-05 | 32 | 1.18518519 | |
| DMR5:3892101 | 5 | 3892101 | 3892300 | ID_254787 | 200 | 1 | 8.88E-05 | 3 | 1.5 | |
| DMR5:4311001 | 5 | 4311001 | 4311700 | ID_254917 | 700 | 3 | 9.2E-06 | 19 | 2.71428571 | |
| DMR5:6906901 | 5 | 6906901 | 6907100 | ID_255731 | 200 | 1 | 0.000097 | 3 | 1.5 | |
| DMR5:7729101 | 5 | 7729101 | 7729400 | ID_255990 | 300 | 1 | 7.75E-06 | 1 | 0.33333333 | RP11-711G10.1;ADCY2 |
| DMR5:9122501 | 5 | 9122501 | 9123200 | ID_256399 | 700 | 2 | 1.21E-05 | 27 | 3.85714286 | SEMA5A |
| DMR5:9349101 | 5 | 9349101 | 9351000 | ID_256470 | 1900 | 1 | 7.41E-05 | 16 | 0.84210526 | SEMA5A |
| DMR5:10002601 | 5 | 10002601 | 10002900 | ID_256683 | 300 | 1 | 1.01E-05 | 5 | 1.66666667 | |
| DMR5:10065201 | 5 | 10065201 | 10067400 | ID_256701 | 2200 | 1 | 4.48E-05 | 65 | 2.95454546 | |
| DMR5:10387201 | 5 | 10387201 | 10387500 | ID_256801 | 300 | 1 | 8.29E-06 | 5 | 1.66666667 | 42800 |
| DMR5:10531901 | 5 | 10531901 | 10533700 | ID_256848 | 1800 | 1 | 5.12E-05 | 33 | 1.83333333 | |
| DMR5:10792801 | 5 | 10792801 | 10794600 | ID_256922 | 1800 | 1 | 6.57E-06 | 30 | 1.66666667 | |
| DMR5:10916701 | 5 | 10916701 | 10918300 | ID_256962 | 1600 | 1 | 2.49E-05 | 38 | 2.375 | |
| DMR5:11145001 | 5 | 11145001 | 11145600 | ID_257037 | 600 | 1 | 3.83E-05 | 4 | 0.66666667 | CTNND2 |
| DMR5:13080601 | 5 | 13080601 | 13080800 | ID_257599 | 200 | 1 | 7.55E-05 | 3 | 1.5 | |
| DMR5:13199501 | 5 | 13199501 | 13200500 | ID_257635 | 1000 | 1 | 1.37E-05 | 5 | 0.5 | |
| DMR5:13736001 | 5 | 13736001 | 13737700 | ID_257782 | 1700 | 1 | 9.64E-05 | 23 | 1.35294118 | DNAH5 |
| DMR5:14115001 | 5 | 14115001 | 14117200 | ID_257899 | 2200 | 1 | 6.99E-05 | 32 | 1.45454546 | |
| DMR5:16052601 | 5 | 16052601 | 16053300 | ID_258482 | 700 | 1 | 1.91E-07 | 3 | 0.42857143 | |
| DMR5:19200301 | 5 | 19200301 | 19200600 | ID_259396 | 300 | 1 | 4.67E-05 | 6 | 2 | |
| DMR5:23303701 | 5 | 23303701 | 23305400 | ID_260513 | 1700 | 2 | 7.07E-05 | 44 | 2.58823529 | CTD-2272G21.2 |
| DMR5:24508501 | 5 | 24508501 | 24508900 | ID_260839 | 400 | 1 | 0.000025 | 1 | 0.25 | CDH10 |
| DMR5:24512901 | 5 | 24512901 | 24513000 | ID_260841 | 100 | 1 | 3.81E-06 | 0 | 0 | CDH10 |
| DMR5:25302901 | 5 | 25302901 | 25303800 | ID_261071 | 900 | 1 | 4.63E-05 | 8 | 0.88888889 | RP11-184E9.1 |
| DMR5:27993601 | 5 | 27993601 | 27993800 | ID_261787 | 200 | 1 | 1.18E-06 | 0 | 0 | |
| DMR5:30068101 | 5 | 30068101 | 30071000 | ID_262330 | 2900 | 2 | 1.28E-07 | 38 | 1.31034483 | |
| DMR5:30247601 | 5 | 30247601 | 30248700 | ID_262378 | 1100 | 1 | 1.98E-05 | 5 | 0.45454546 | HPRT1P2 |
| DMR5:30458001 | 5 | 30458001 | 30458200 | ID_262445 | 200 | 1 | 3.19E-05 | 0 | 0 | |
| DMR5:30502201 | 5 | 30502201 | 30502300 | ID_262462 | 100 | 1 | 3.58E-05 | 0 | 0 | |
| DMR5:33916601 | 5 | 33916601 | 33916900 | ID_263519 | 300 | 1 | 4.56E-05 | 1 | 0.33333333 | |
| DMR5:36234301 | 5 | 36234301 | 36234600 | ID_264231 | 300 | 1 | 1.81E-07 | 9 | 3 | NADK2 |
| DMR5:37175101 | 5 | 37175101 | 37175200 | ID_264515 | 100 | 1 | 6.64E-05 | 0 | 0 | C5orf42 |
| DMR5:37686401 | 5 | 37686401 | 37686900 | ID_264684 | 500 | 1 | 1.08E-05 | 6 | 1.2 | WDR70 |
| DMR5:38142601 | 5 | 38142601 | 38144000 | ID_264819 | 1400 | 1 | 4.64E-05 | 13 | 0.92857143 | CTD-2116N24.1 |
| DMR5:46045001 | 5 | 46045001 | 46047300 | ID_267113 | 2300 | 1 | 2.31E-05 | 13 | 0.56521739 | |
| DMR5:46246101 | 5 | 46246101 | 46246400 | ID_267167 | 300 | 1 | 6.11E-05 | 3 | 1 | |
| DMR5:50730801 | 5 | 50730801 | 50731400 | ID_268231 | 600 | 1 | 6.72E-05 | 4 | 0.66666667 | PARP8 |
| DMR5:51064301 | 5 | 51064301 | 51069800 | ID_268316 | 5500 | 1 | 1.77E-06 | 26 | 0.47272727 | |
| DMR5:51251101 | 5 | 51251101 | 51253900 | ID_268367 | 2800 | 1 | 9.79E-06 | 30 | 1.07142857 | |
| DMR5:54175101 | 5 | 54175101 | 54175400 | ID_269181 | 300 | 1 | 8.75E-05 | 3 | 1 | ARL15 |
| DMR5:55067601 | 5 | 55067601 | 55068700 | ID_269452 | 1100 | 1 | 3.43E-05 | 8 | 0.72727273 | |
| DMR5:55530601 | 5 | 55530601 | 55531100 | ID_269600 | 500 | 2 | 2.89E-05 | 28 | 5.6 | PLPP1;RNF138P1 |
| DMR5:56393001 | 5 | 56393001 | 56393900 | ID_269875 | 900 | 1 | 9.98E-05 | 1 | 0.11111111 | |
| DMR5:57248101 | 5 | 57248101 | 57249100 | ID_270127 | 1000 | 1 | 4.69E-05 | 19 | 1.9 | GPBP1 |
| DMR5:57549501 | 5 | 57549501 | 57550900 | ID_270222 | 1400 | 2 | 1.42E-05 | 15 | 1.07142857 | |
| DMR5:60335201 | 5 | 60335201 | 60338400 | ID_271001 | 3200 | 1 | 9.97E-05 | 22 | 0.6875 | PDE4D |
| DMR5:60528201 | 5 | 60528201 | 60529300 | ID_271050 | 1100 | 1 | 6.63E-05 | 6 | 0.54545455 | PART1 |
| DMR5:61525801 | 5 | 61525801 | 61526400 | ID_271351 | 600 | 1 | 2.28E-05 | 14 | 2.33333333 | ZSWIM6 |
| DMR5:61627401 | 5 | 61627401 | 61628300 | ID_271378 | 900 | 1 | 1.04E-05 | 8 | 0.88888889 | |
| DMR5:61762201 | 5 | 61762201 | 61762500 | ID_271416 | 300 | 1 | 5.35E-05 | 7 | 2.33333333 | |
| DMR5:62453401 | 5 | 62453401 | 62454200 | ID_271628 | 800 | 1 | 8.26E-06 | 12 | 1.5 | IPO11;KIF2A |
| DMR5:62663101 | 5 | 62663101 | 62663600 | ID_271701 | 500 | 1 | 3.95E-05 | 7 | 1.4 | |
| DMR5:63289201 | 5 | 63289201 | 63289400 | ID_271896 | 200 | 1 | 7.08E-06 | 2 | 1 | |
| DMR5:65165301 | 5 | 65165301 | 65167100 | ID_272453 | 1800 | 1 | 1.24E-05 | 21 | 1.16666667 | ADAMTS6 |
| DMR5:65719901 | 5 | 65719901 | 65720200 | ID_272612 | 300 | 1 | 1.37E-07 | 2 | 0.66666667 | SGTB |
| DMR5:65981401 | 5 | 65981401 | 65981500 | ID_272692 | 100 | 1 | 8.98E-05 | 0 | 0 | ERBB2IP |
| DMR5:68127701 | 5 | 68127701 | 68131400 | ID_273334 | 3700 | 1 | 9.93E-05 | 45 | 1.21621622 | |
| DMR5:68263801 | 5 | 68263801 | 68265000 | ID_273375 | 1200 | 1 | 0.000022 | 10 | 0.83333333 | PIK3R1 |
| DMR5:69052901 | 5 | 69052901 | 69055600 | ID_273593 | 2700 | 1 | 6.63E-05 | 31 | 1.14814815 | |
| DMR5:69073901 | 5 | 69073901 | 69075800 | ID_273600 | 1900 | 1 | 3.92E-07 | 49 | 2.57894737 | |
| DMR5:69873801 | 5 | 69873801 | 69874100 | ID_273845 | 300 | 1 | 5.67E-05 | 5 | 1.66666667 | |
| DMR5:69910601 | 5 | 69910601 | 69917400 | ID_273858 | 6800 | 1 | 4.86E-05 | 128 | 1.88235294 | RP11-98J23.2 |
| DMR5:70497401 | 5 | 70497401 | 70499500 | ID_274036 | 2100 | 1 | 7.22E-05 | 42 | 2 | RP11-497H16.8 |
| DMR5:70764401 | 5 | 70764401 | 70765600 | ID_274116 | 1200 | 1 | 0.000016 | 14 | 1.16666667 | RP11-589F5.4 |
| DMR5:71385101 | 5 | 71385101 | 71386800 | ID_274302 | 1700 | 1 | 9.75E-05 | 23 | 1.35294118 | RP11-136K7.2;PMCHL2 |
| DMR5:74674101 | 5 | 74674101 | 74674400 | ID_275292 | 300 | 1 | 6.14E-05 | 5 | 1.66666667 | HEXB |
| DMR5:74772001 | 5 | 74772001 | 74774100 | ID_275316 | 2100 | 1 | 8.49E-05 | 34 | 1.61904762 | NSA2 |
| DMR5:76420301 | 5 | 76420301 | 76420600 | ID_275808 | 300 | 1 | 4.05E-05 | 7 | 2.33333333 | IQGAP2 |
| DMR5:76647501 | 5 | 76647501 | 76647900 | ID_275877 | 400 | 1 | 5.24E-05 | 3 | 0.75 | IQGAP2 |
| DMR5:76649101 | 5 | 76649101 | 76649800 | ID_275878 | 700 | 1 | 1.58E-06 | 5 | 0.71428571 | IQGAP2 |
| DMR5:77084201 | 5 | 77084201 | 77084600 | ID_276007 | 400 | 1 | 3.76E-05 | 15 | 3.75 | ZBED3 |
| DMR5:77912901 | 5 | 77912901 | 77914200 | ID_276254 | 1300 | 2 | 3.39E-05 | 24 | 1.84615385 | |
| DMR5:79664101 | 5 | 79664101 | 79664800 | ID_276777 | 700 | 1 | 3.03E-05 | 13 | 1.85714286 | PAPD4 |
| DMR5:81292901 | 5 | 81292901 | 81293400 | ID_277294 | 500 | 1 | 5.92E-05 | 5 | 1 | CKMT2-AS1 |
| DMR5:83329801 | 5 | 83329801 | 83330000 | ID_277889 | 200 | 1 | 6.11E-06 | 2 | 1 | XRCC4 |
| DMR5:83849701 | 5 | 83849701 | 83852500 | ID_278037 | 2800 | 1 | 8.08E-05 | 24 | 0.85714286 | |
| DMR5:84518601 | 5 | 84518601 | 84519700 | ID_278215 | 1100 | 1 | 9.39E-05 | 7 | 0.63636364 | |
| DMR5:85164601 | 5 | 85164601 | 85166000 | ID_278363 | 1400 | 1 | 2.12E-05 | 23 | 1.64285714 | |
| DMR5:85247601 | 5 | 85247601 | 85248900 | ID_278382 | 1300 | 1 | 7.75E-09 | 6 | 0.46153846 | |
| DMR5:88970301 | 5 | 88970301 | 88971600 | ID_279435 | 1300 | 1 | 0.000014 | 7 | 0.53846154 | MEF2C-AS1 |
| DMR5:90874901 | 5 | 90874901 | 90875000 | ID_279962 | 100 | 1 | 5.74E-05 | 0 | 0 | ADGRV1 |
| DMR5:91562301 | 5 | 91562301 | 91564000 | ID_280171 | 1700 | 1 | 3.23E-05 | 12 | 0.70588235 | |
| DMR5:96201701 | 5 | 96201701 | 96201900 | ID_281421 | 200 | 1 | 7.29E-05 | 2 | 1 | CTD-2337A12.1;RP11- |
| | | | | | | | | | | 254I22.1 |
| DMR5:97298501 | 5 | 97298501 | 97300300 | ID_281759 | 1800 | 1 | 3.13E-05 | 19 | 1.05555556 | CTD-2215E18.1 |
| DMR5:98811601 | 5 | 98811601 | 98813700 | ID_282174 | 2100 | 1 | 4.08E-05 | 12 | 0.57142857 | |
| DMR5:99507001 | 5 | 99507001 | 99507100 | ID_282370 | 100 | 1 | 3.08E-06 | 2 | 2 | |
| DMR5:100472601 | 5 | 100472601 | 100475100 | ID_282618 | 2500 | 1 | 5.95E-05 | 22 | 0.88 | CTD-2001C12.1 |
| DMR5:101027501 | 5 | 101027501 | 101028600 | ID_282769 | 1100 | 1 | 8.51E-05 | 2 | 0.18181818 | |
| DMR5:101432601 | 5 | 101432601 | 101432800 | ID_282866 | 200 | 1 | 9.78E-05 | 4 | 2 | |
| DMR5:102190101 | 5 | 102190101 | 102192800 | ID_283077 | 2700 | 1 | 0.00008 | 35 | 1.2962963 | |
| DMR5:102345701 | 5 | 102345701 | 102345900 | ID_283122 | 200 | 1 | 8.23E-05 | 1 | 0.5 | |
| DMR5:102521401 | 5 | 102521401 | 102521900 | ID_283175 | 500 | 1 | 3.18E-05 | 2 | 0.4 | |
| DMR5:103666501 | 5 | 103666501 | 103666700 | ID_283488 | 200 | 1 | 4.71E-06 | 0 | 0 | |
| DMR5:104297301 | 5 | 104297301 | 104298400 | ID_283656 | 1100 | 1 | 0.000031 | 3 | 0.27272727 | |
| DMR5:107811301 | 5 | 107811301 | 107813100 | ID_284564 | 1800 | 1 | 5.43E-05 | 16 | 0.88888889 | |
| DMR5:107847801 | 5 | 107847801 | 107847900 | ID_284577 | 100 | 1 | 6.38E-06 | 1 | 1 | |
| DMR5:108097901 | 5 | 108097901 | 108099800 | ID_284646 | 1900 | 1 | 5.72E-05 | 19 | 1 | FBXL17 |
| DMR5:109286401 | 5 | 109286401 | 109287400 | ID_284979 | 1000 | 1 | 5.02E-05 | 9 | 0.9 | CTD-2587M2.1 |
| DMR5:110712001 | 5 | 110712001 | 110712200 | ID_285394 | 200 | 1 | 3.58E-05 | 4 | 2 | TMEM232 |
| DMR5:112089101 | 5 | 112089101 | 112089400 | ID_285800 | 300 | 1 | 3.22E-05 | 3 | 1 | |
| DMR5:116224401 | 5 | 116224401 | 116224700 | ID_287026 | 300 | 1 | 6.57E-05 | 5 | 1.66666667 | COMMD10 |
| DMR5:116446601 | 5 | 116446601 | 116446900 | ID_287090 | 300 | 1 | 8.95E-05 | 14 | 4.66666667 | SEMA6A |
| DMR5:116449201 | 5 | 116449201 | 116449500 | ID_287091 | 300 | 1 | 2.58E-05 | 3 | 1 | SEMA6A-AS1;SEMA6A |
| DMR5:118339501 | 5 | 118339501 | 118340200 | ID_287616 | 700 | 1 | 0.000018 | 2 | 0.28571429 | |
| DMR5:119068001 | 5 | 119068001 | 119068200 | ID_287834 | 200 | 1 | 4.17E-05 | 3 | 1.5 | CTB-161M19.4;DMXL1 |
| DMR5:120137201 | 5 | 120137201 | 120137300 | ID_288147 | 100 | 1 | 4.59E-05 | 1 | 1 | |
| DMR5:120564801 | 5 | 120564801 | 120565100 | ID_288264 | 300 | 1 | 5.8E-06 | 6 | 2 | PRR16 |
| DMR5:121647901 | 5 | 121647901 | 121648100 | ID_288546 | 200 | 1 | 9.19E-05 | 1 | 0.5 | |
| DMR5:124154801 | 5 | 124154801 | 124155500 | ID_289271 | 700 | 1 | 0.000088 | 4 | 0.57142857 | LINC01170 |
| DMR5:125711701 | 5 | 125711701 | 125712000 | ID_289733 | 300 | 1 | 9.85E-05 | 5 | 1.66666667 | |
| DMR5:125817501 | 5 | 125817501 | 125818500 | ID_289767 | 1000 | 1 | 4.12E-05 | 5 | 0.5 | |
| DMR5:128557101 | 5 | 128557101 | 128557300 | ID_290586 | 200 | 1 | 1.46E-05 | 0 | 0 | SLC27A6;FBN2 |
| DMR5:129163401 | 5 | 129163401 | 129164000 | ID_290766 | 600 | 1 | 1.62E-05 | 2 | 0.33333333 | |
| DMR5:134314001 | 5 | 134314001 | 134314900 | ID_292326 | 900 | 2 | 3.23E-05 | 10 | 1.11111111 | CTD-2410N18.4;CDKL3 |
| DMR5:134573801 | 5 | 134573801 | 134575200 | ID_292407 | 1400 | 1 | 2.08E-05 | 19 | 1.35714286 | JADE2 |
| DMR5:135745201 | 5 | 135745201 | 135747900 | ID_292781 | 2700 | 1 | 8.64E-05 | 43 | 1.59259259 | AC011431.1 |
| DMR5:136158801 | 5 | 136158801 | 136159700 | ID_292894 | 900 | 1 | 1.89E-05 | 10 | 1.11111111 | SMAD5 |
| DMR5:137662801 | 5 | 137662801 | 137663600 | ID_293341 | 800 | 1 | 0.000052 | 12 | 1.5 | KLHL3 |
| DMR5:139223601 | 5 | 139223601 | 139226500 | ID_293839 | 2900 | 1 | 1.05E-05 | 96 | 3.31034483 | SIL1 |
| DMR5:139636101 | 5 | 139636101 | 139637000 | ID_293963 | 900 | 1 | 0.000081 | 3 | 0.33333333 | |
| DMR5:140052001 | 5 | 140052001 | 140052100 | ID_294104 | 100 | 1 | 1.52E-05 | 0 | 0 | |
| DMR5:140183201 | 5 | 140183201 | 140183400 | ID_294143 | 200 | 1 | 9.07E-05 | 1 | 0.5 | CYSTM1 |
| DMR5:140511701 | 5 | 140511701 | 140512400 | ID_294236 | 700 | 1 | 9.49E-05 | 14 | 2 | ANKHD1-EIF4EBP3; |
| | | | | | | | | | | ANKHD1 |
| DMR5:141193901 | 5 | 141193901 | 141194100 | ID_294429 | 200 | 1 | 3.67E-05 | 17 | 8.5 | CH17-140K24.2;CH17- |
| | | | | | | | | | | 140K24.7; PCDHB10;CH17- |
| | | | | | | | | | | 140K24.6 |
| DMR5:141644401 | 5 | 141644401 | 141648200 | ID_294567 | 3800 | 1 | 0.000087 | 52 | 1.36842105 | FCHSD1 |
| DMR5:142129301 | 5 | 142129301 | 142130100 | ID_294726 | 800 | 1 | 3.44E-05 | 13 | 1.625 | NDFIP1 |
| DMR5:142659001 | 5 | 142659001 | 142659200 | ID_294896 | 200 | 1 | 7.35E-05 | 2 | 1 | AC005592.2;FGF1 |
| DMR5:142777401 | 5 | 142777401 | 142777500 | ID_294932 | 100 | 1 | 2.86E-05 | 0 | 0 | ARHGAP26 |
| DMR5:143529101 | 5 | 143529101 | 143530100 | ID_295159 | 1000 | 1 | 8.39E-05 | 6 | 0.6 | CTD-2050E21.1 |
| DMR5:143586601 | 5 | 143586601 | 143589200 | ID_295171 | 2600 | 1 | 2.16E-05 | 14 | 0.53846154 | |
| DMR5:146354401 | 5 | 146354401 | 146355200 | ID_295963 | 800 | 1 | 2.54E-05 | 10 | 1.25 | CTC-359M8.1 |
| DMR5:147243301 | 5 | 147243301 | 147244200 | ID_296239 | 900 | 1 | 9.53E-05 | 10 | 1.11111111 | STK32A |
| DMR5:150042401 | 5 | 150042401 | 150042700 | ID_297090 | 300 | 1 | 8.19E-05 | 3 | 1 | HMGXB3 |
| DMR5:151531101 | 5 | 151531101 | 151532100 | ID_297574 | 1000 | 3 | 2.76E-06 | 44 | 4.4 | FAT2 |
| DMR5:153084201 | 5 | 153084201 | 153084600 | ID_298057 | 400 | 1 | 4.03E-05 | 4 | 1 | LINC01470 |
| DMR5:158288601 | 5 | 158288601 | 158291700 | ID_299661 | 3100 | 1 | 4.61E-05 | 19 | 0.61290323 | |
| DMR5:158428501 | 5 | 158428501 | 158430800 | ID_299706 | 2300 | 1 | 4.22E-06 | 15 | 0.65217391 | RP11-542A14.1 |
| DMR5:159368301 | 5 | 159368301 | 159368700 | ID_299993 | 400 | 1 | 3.52E-05 | 3 | 0.75 | AC008697.1 |
| DMR5:162807701 | 5 | 162807701 | 162808500 | ID_300975 | 800 | 1 | 0.000079 | 14 | 1.75 | |
| DMR5:162993101 | 5 | 162993101 | 162993900 | ID_301028 | 800 | 2 | 1.1E-06 | 10 | 1.25 | |
| DMR5:163886601 | 5 | 163886601 | 163886800 | ID_301290 | 200 | 1 | 6.95E-06 | 1 | 0.5 | |
| DMR5:166891101 | 5 | 166891101 | 166892800 | ID_302158 | 1700 | 1 | 9.57E-05 | 38 | 2.23529412 | |
| DMR5:167860801 | 5 | 167860801 | 167863100 | ID_302445 | 2300 | 1 | 6.18E-05 | 30 | 1.30434783 | TENM2 |
| DMR5:168710901 | 5 | 168710901 | 168711200 | ID_302716 | 300 | 1 | 3.56E-05 | 9 | 3 | CTC-558O2.1;SLIT3 |
| DMR5:174055801 | 5 | 174055801 | 174056000 | ID_304376 | 200 | 1 | 6.01E-05 | 3 | 1.5 | HMP19 |
| DMR5:174624001 | 5 | 174624001 | 174624600 | ID_304551 | 600 | 1 | 4.21E-06 | 11 | 1.83333333 | RP11-267A15.3 |
| DMR5:175198401 | 5 | 175198401 | 175198500 | ID_304736 | 100 | 1 | 0.000062 | 0 | 0 | |
| DMR5:177430201 | 5 | 177430201 | 177434200 | ID_305472 | 4000 | 1 | 3.11E-05 | 134 | 3.35 | GRK6 |
| DMR5:177790501 | 5 | 177790501 | 177791000 | ID_305591 | 500 | 1 | 4.26E-05 | 5 | 1 | RP11-1026M7.2 |
| DMR5:177816401 | 5 | 177816401 | 177818000 | ID_305600 | 1600 | 1 | 3.38E-05 | 25 | 1.5625 | RP11-423H2.1 |
| DMR5:177976201 | 5 | 177976201 | 177978200 | ID_305656 | 2000 | 1 | 9.95E-06 | 45 | 2.25 | RP11-1252I4.2 |
| DMR5:178094001 | 5 | 178094001 | 178096900 | ID_305692 | 2900 | 1 | 7.46E-05 | 120 | 4.13793103 | |
| DMR5:178972001 | 5 | 178972001 | 178972100 | ID_305973 | 100 | 1 | 5.42E-05 | 1 | 1 | RP11-281O15.4 |
| DMR5:179574801 | 5 | 179574801 | 179575000 | ID_306183 | 200 | 1 | 9.32E-05 | 0 | 0 | RUFY1 |
| DMR5:180569101 | 5 | 180569101 | 180569900 | ID_306518 | 800 | 1 | 5.23E-05 | 10 | 1.25 | CNOT6 |
| DMR5:181142701 | 5 | 181142701 | 181143300 | ID_306696 | 600 | 1 | 1.87E-05 | 10 | 1.66666667 | |
| DMR6:684801 | 6 | 684801 | 686700 | ID_306997 | 1900 | 1 | 4.22E-05 | 23 | 1.21052632 | EXOC2 |
| DMR6:1514701 | 6 | 1514701 | 1515800 | ID_307259 | 1100 | 2 | 0.000017 | 38 | 3.45454546 | RP11-157J24.1 |
| DMR6:1557601 | 6 | 1557601 | 1558800 | ID_307272 | 1200 | 1 | 2.37E-05 | 18 | 1.5 | |
| DMR6:1707401 | 6 | 1707401 | 1707700 | ID_307312 | 300 | 1 | 4.71E-06 | 1 | 0.33333333 | GMDS |
| DMR6:2851901 | 6 | 2851901 | 2854200 | ID_307677 | 2300 | 1 | 0.000071 | 48 | 2.08695652 | MIR4645 |
| DMR6:3463301 | 6 | 3463301 | 3464300 | ID_307872 | 1000 | 1 | 5.17E-05 | 25 | 2.5 | |
| DMR6:5092901 | 6 | 5092901 | 5093200 | ID_308372 | 300 | 2 | 4.79E-05 | 2 | 0.66666667 | |
| DMR6:5664201 | 6 | 5664201 | 5668600 | ID_308555 | 4400 | 1 | 7.44E-05 | 44 | 1 | FARS2;RP1-256G22.2 |
| DMR6:5792601 | 6 | 5792601 | 5795000 | ID_308588 | 2400 | 2 | 1.74E-05 | 23 | 0.95833333 | |
| DMR6:7158401 | 6 | 7158401 | 7158600 | ID_309019 | 200 | 1 | 5.39E-05 | 0 | 0 | RREB1 |
| DMR6:7482201 | 6 | 7482201 | 7482400 | ID_309118 | 200 | 1 | 2.91E-05 | 10 | 5 | HNRNPLP1 |
| DMR6:7490001 | 6 | 7490001 | 7490400 | ID_309121 | 400 | 1 | 1.61E-05 | 6 | 1.5 | |
| DMR6:7691701 | 6 | 7691701 | 7692100 | ID_309184 | 400 | 1 | 0.000061 | 8 | 2 | |
| DMR6:7849201 | 6 | 7849201 | 7850000 | ID_309238 | 800 | 1 | 4.71E-06 | 7 | 0.875 | BMP6 |
| DMR6:9877001 | 6 | 9877001 | 9878500 | ID_309836 | 1500 | 1 | 0.000046 | 9 | 0.6 | OFCC1 |
| DMR6:13577101 | 6 | 13577101 | 13578800 | ID_310950 | 1700 | 1 | 8.79E-05 | 19 | 1.11764706 | SIRT5 |
| DMR6:14313701 | 6 | 14313701 | 14313900 | ID_311166 | 200 | 1 | 0.000092 | 1 | 0.5 | |
| DMR6:16877001 | 6 | 16877001 | 16877100 | ID_311931 | 100 | 1 | 1.98E-05 | 1 | 1 | |
| DMR6:18323801 | 6 | 18323801 | 18327200 | ID_312398 | 3400 | 1 | 2.24E-05 | 43 | 1.26470588 | |
| DMR6:18876801 | 6 | 18876801 | 18877700 | ID_312553 | 900 | 1 | 1.14E-05 | 3 | 0.33333333 | |
| DMR6:19477101 | 6 | 19477101 | 19478900 | ID_312727 | 1800 | 1 | 9.76E-05 | 13 | 0.72222222 | |
| DMR6:19657501 | 6 | 19657501 | 19658500 | ID_312783 | 1000 | 1 | 1.07E-05 | 4 | 0.4 | RP1-167F1.2 |
| DMR6:22282901 | 6 | 22282901 | 22283500 | ID_313588 | 600 | 1 | 0.000022 | 7 | 1.16666667 | RP3-404K8.2 |
| DMR6:23750601 | 6 | 23750601 | 23751500 | ID_313994 | 900 | 1 | 0.000024 | 6 | 0.66666667 | |
| DMR6:24333801 | 6 | 24333801 | 24333900 | ID_314167 | 100 | 1 | 9.93E-05 | 0 | 0 | DCDC2 |
| DMR6:24871101 | 6 | 24871101 | 24871200 | ID_314334 | 100 | 1 | 0.000038 | 0 | 0 | FAM65B |
| DMR6:24872801 | 6 | 24872801 | 24875000 | ID_314335 | 2200 | 1 | 6.89E-05 | 11 | 0.5 | FAM65B |
| DMR6:26438901 | 6 | 26438901 | 26439600 | ID_314804 | 700 | 1 | 4.97E-05 | 4 | 0.57142857 | |
| DMR6:27882001 | 6 | 27882001 | 27882400 | ID_315210 | 400 | 1 | 2.46E-06 | 19 | 4.75 | |
| DMR6:30996901 | 6 | 30996901 | 30997200 | ID_316152 | 300 | 1 | 6.42E-06 | 2 | 0.66666667 | |
| DMR6:31061201 | 6 | 31061201 | 31061900 | ID_316176 | 700 | 1 | 3.05E-05 | 9 | 1.28571429 | |
| DMR6:31080501 | 6 | 31080501 | 31081900 | ID_316182 | 1400 | 1 | 7.14E-05 | 17 | 1.21428571 | |
| DMR6:31326001 | 6 | 31326001 | 31327000 | ID_316262 | 1000 | 2 | 3.38E-05 | 17 | 1.7 | |
| DMR6:31814701 | 6 | 31814701 | 31818400 | ID_316423 | 3700 | 3 | 1.17E-05 | 217 | 5.86486487 | HSPA1L;HSPA1A |
| DMR6:31828001 | 6 | 31828001 | 31829600 | ID_316425 | 1600 | 2 | 2.62E-05 | 130 | 8.125 | HSPA1B |
| DMR6:32631801 | 6 | 32631801 | 32632300 | ID_316678 | 500 | 1 | 1.08E-05 | 10 | 2 | HLA-DQA1 |
| DMR6:33310201 | 6 | 33310201 | 33310300 | ID_316885 | 100 | 1 | 3.22E-05 | 2 | 2 | TAPBP |
| DMR6:33632201 | 6 | 33632201 | 33633400 | ID_316986 | 1200 | 1 | 9.45E-05 | 32 | 2.66666667 | ITPR3 |
| DMR6:33643501 | 6 | 33643501 | 33644000 | ID_316989 | 500 | 1 | 1.51E-05 | 14 | 2.8 | ITPR3 |
| DMR6:36243601 | 6 | 36243601 | 36246300 | ID_317838 | 2700 | 1 | 6.03E-05 | 23 | 0.85185185 | PNPLA1 |
| DMR6:36786001 | 6 | 36786001 | 36786100 | ID_318013 | 100 | 1 | 0.000044 | 2 | 2 | CPNE5 |
| DMR6:37443101 | 6 | 37443101 | 37443400 | ID_318226 | 300 | 1 | 3.85E-06 | 2 | 0.66666667 | CMTR1 |
| DMR6:37750901 | 6 | 37750901 | 37754600 | ID_318323 | 3700 | 1 | 2.39E-05 | 88 | 2.37837838 | |
| DMR6:37809601 | 6 | 37809601 | 37810600 | ID_318347 | 1000 | 1 | 8.96E-06 | 14 | 1.4 | |
| DMR6:39172401 | 6 | 39172401 | 39172700 | ID_318769 | 300 | 1 | 4.59E-05 | 4 | 1.33333333 | |
| DMR6:39654601 | 6 | 39654601 | 39655200 | ID_318913 | 600 | 1 | 5.39E-06 | 4 | 0.66666667 | KIF6 |
| DMR6:39771101 | 6 | 39771101 | 39771600 | ID_318951 | 500 | 1 | 6.58E-05 | 5 | 1 | |
| DMR6:39781801 | 6 | 39781801 | 39781900 | ID_318955 | 100 | 1 | 9.82E-05 | 0 | 0 | |
| DMR6:42209601 | 6 | 42209601 | 42209800 | ID_319744 | 200 | 1 | 6.73E-05 | 5 | 2.5 | MRPS10 |
| DMR6:43594901 | 6 | 43594901 | 43595200 | ID_320178 | 300 | 1 | 7.25E-05 | 3 | 1 | POLH |
| DMR6:43596601 | 6 | 43596601 | 43599000 | ID_320179 | 2400 | 1 | 8.06E-05 | 35 | 1.45833333 | POLH |
| DMR6:43722601 | 6 | 43722601 | 43725100 | ID_320222 | 2500 | 1 | 0.00009 | 31 | 1.24 | RP1-261G23.5 |
| DMR6:45598001 | 6 | 45598001 | 45600400 | ID_320806 | 2400 | 1 | 3.33E-05 | 9 | 0.375 | RUNX2 |
| DMR6:47891001 | 6 | 47891001 | 47891700 | ID_321517 | 700 | 1 | 9.14E-05 | 8 | 1.14285714 | PTCHD4 |
| DMR6:48443101 | 6 | 48443101 | 48443200 | ID_321662 | 100 | 1 | 9.17E-06 | 0 | 0 | |
| DMR6:49340801 | 6 | 49340801 | 49341900 | ID_321909 | 1100 | 1 | 1.96E-05 | 10 | 0.90909091 | |
| DMR6:52785901 | 6 | 52785901 | 52787200 | ID_322872 | 1300 | 1 | 2.49E-05 | 26 | 2 | |
| DMR6:54295201 | 6 | 54295201 | 54296400 | ID_323338 | 1200 | 1 | 5.63E-05 | 6 | 0.5 | |
| DMR6:56177601 | 6 | 56177601 | 56177800 | ID_323838 | 200 | 1 | 5.48E-05 | 10 | 5 | COL21A1 |
| DMR6:56446001 | 6 | 56446001 | 56447900 | ID_323924 | 1900 | 1 | 1.34E-05 | 20 | 1.05263158 | |
| DMR6:57053901 | 6 | 57053901 | 57055000 | ID_324100 | 1100 | 1 | 5.07E-05 | 10 | 0.90909091 | KIAA1586 |
| DMR6:58449501 | 6 | 58449501 | 58451200 | ID_324521 | 1700 | 1 | 5.18E-06 | 35 | 2.05882353 | |
| DMR6:58560701 | 6 | 58560701 | 58562800 | ID_324525 | 2100 | 2 | 4.49E-06 | 37 | 1.76190476 | |
| DMR6:58593201 | 6 | 58593201 | 58596400 | ID_324538 | 3200 | 2 | 6.04E-09 | 60 | 1.875 | |
| DMR6:58677001 | 6 | 58677001 | 58677300 | ID_324565 | 300 | 1 | 4.95E-05 | 5 | 1.66666667 | |
| DMR6:58734901 | 6 | 58734901 | 58736100 | ID_324588 | 1200 | 1 | 1.03E-05 | 17 | 1.41666667 | |
| DMR6:58768201 | 6 | 58768201 | 58768600 | ID_324598 | 400 | 1 | 1.16E-05 | 4 | 1 | |
| DMR6:58791301 | 6 | 58791301 | 58794700 | ID_324605 | 3400 | 1 | 3.05E-07 | 63 | 1.85294118 | |
| DMR6:58817701 | 6 | 58817701 | 58819900 | ID_324613 | 2200 | 1 | 9.73E-06 | 40 | 1.81818182 | |
| DMR6:58823201 | 6 | 58823201 | 58823500 | ID_324614 | 300 | 1 | 3.37E-07 | 5 | 1.66666667 | |
| DMR6:58890401 | 6 | 58890401 | 58893600 | ID_324641 | 3200 | 1 | 1.65E-05 | 57 | 1.78125 | |
| DMR6:58919301 | 6 | 58919301 | 58921200 | ID_324652 | 1900 | 1 | 9.05E-05 | 42 | 2.21052632 | |
| DMR6:58950301 | 6 | 58950301 | 58950500 | ID_324663 | 200 | 1 | 1.32E-05 | 5 | 2.5 | |
| DMR6:59033701 | 6 | 59033701 | 59034300 | ID_324687 | 600 | 2 | 3.44E-11 | 13 | 2.16666667 | |
| DMR6:59163101 | 6 | 59163101 | 59164700 | ID_324738 | 1600 | 2 | 2.73E-06 | 34 | 2.125 | |
| DMR6:59165801 | 6 | 59165801 | 59168300 | ID_324739 | 2500 | 1 | 1.45E-05 | 48 | 1.92 | |
| DMR6:59241401 | 6 | 59241401 | 59241900 | ID_324767 | 500 | 1 | 1.23E-05 | 8 | 1.6 | |
| DMR6:59255401 | 6 | 59255401 | 59263000 | ID_324773 | 7600 | 1 | 4.32E-05 | 142 | 1.86842105 | |
| DMR6:59274801 | 6 | 59274801 | 59278000 | ID_324780 | 3200 | 2 | 1.3E-07 | 57 | 1.78125 | |
| DMR6:59342901 | 6 | 59342901 | 59344400 | ID_324802 | 1500 | 4 | 3.08E-06 | 36 | 2.4 | |
| DMR6:59565501 | 6 | 59565501 | 59566500 | ID_324876 | 1000 | 2 | 5.85E-06 | 12 | 1.2 | |
| DMR6:59586801 | 6 | 59586801 | 59587100 | ID_324885 | 300 | 1 | 3.87E-05 | 2 | 0.66666667 | |
| DMR6:59652301 | 6 | 59652301 | 59653800 | ID_324912 | 1500 | 1 | 6.12E-06 | 32 | 2.13333333 | |
| DMR6:59688201 | 6 | 59688201 | 59688400 | ID_324925 | 200 | 2 | 7.98E-08 | 5 | 2.5 | |
| DMR6:59747801 | 6 | 59747801 | 59748100 | ID_324944 | 300 | 1 | 1.98E-05 | 6 | 2 | |
| DMR6:60412401 | 6 | 60412401 | 60412700 | ID_325028 | 300 | 1 | 1.33E-06 | 6 | 2 | |
| DMR6:67197701 | 6 | 67197701 | 67198000 | ID_326762 | 300 | 1 | 8.98E-05 | 1 | 0.33333333 | |
| DMR6:67486901 | 6 | 67486901 | 67487100 | ID_326838 | 200 | 1 | 2.47E-05 | 0 | 0 | |
| DMR6:68449901 | 6 | 68449901 | 68450000 | ID_327078 | 100 | 1 | 6.21E-06 | 1 | 1 | |
| DMR6:69467001 | 6 | 69467001 | 69467700 | ID_327338 | 700 | 1 | 2.07E-05 | 28 | 4 | |
| DMR6:71652801 | 6 | 71652801 | 71653000 | ID_327960 | 200 | 1 | 0.000068 | 1 | 0.5 | |
| DMR6:74468001 | 6 | 74468001 | 74469300 | ID_328762 | 1300 | 1 | 5.61E-05 | 24 | 1.84615385 | RP11-554D15.1 |
| DMR6:75447101 | 6 | 75447101 | 75448800 | ID_329050 | 1700 | 1 | 4.58E-05 | 3 | 0.17647059 | FILIP1 |
| DMR6:75953601 | 6 | 75953601 | 75953800 | ID_329208 | 200 | 1 | 7.87E-05 | 1 | 0.5 | IMPG1 |
| DMR6:76453001 | 6 | 76453001 | 76453500 | ID_329335 | 500 | 1 | 5.54E-05 | 11 | 2.2 | |
| DMR6:76631001 | 6 | 76631001 | 76632500 | ID_329385 | 1500 | 1 | 6.61E-05 | 24 | 1.6 | |
| DMR6:77332301 | 6 | 77332301 | 77333600 | ID_329565 | 1300 | 1 | 5.2E-07 | 18 | 1.38461539 | |
| DMR6:79482901 | 6 | 79482901 | 79483000 | ID_330183 | 100 | 1 | 2.26E-05 | 0 | 0 | |
| DMR6:80278301 | 6 | 80278301 | 80279200 | ID_330414 | 900 | 1 | 4.23E-05 | 9 | 1 | BCKDHB |
| DMR6:80781701 | 6 | 80781701 | 80782200 | ID_330556 | 500 | 1 | 9.11E-06 | 4 | 0.8 | |
| DMR6:81336501 | 6 | 81336501 | 81337400 | ID_330696 | 900 | 1 | 7.07E-05 | 12 | 1.33333333 | |
| DMR6:82522001 | 6 | 82522001 | 82525000 | ID_331025 | 3000 | 1 | 9.39E-05 | 35 | 1.16666667 | |
| DMR6:83131401 | 6 | 83131401 | 83131700 | ID_331191 | 300 | 1 | 8.13E-05 | 5 | 1.66666667 | DOPEY1 |
| DMR6:83724301 | 6 | 83724301 | 83724600 | ID_331358 | 300 | 1 | 9.95E-05 | 1 | 0.33333333 | |
| DMR6:85435301 | 6 | 85435301 | 85435600 | ID_331870 | 300 | 1 | 2.23E-05 | 4 | 1.33333333 | |
| DMR6:85979601 | 6 | 85979601 | 85980800 | ID_332026 | 1200 | 1 | 8.16E-05 | 4 | 0.33333333 | |
| DMR6:86041601 | 6 | 86041601 | 86041900 | ID_332045 | 300 | 1 | 5.35E-05 | 4 | 1.33333333 | |
| DMR6:86048301 | 6 | 86048301 | 86049300 | ID_332047 | 1000 | 1 | 4.69E-05 | 4 | 0.4 | |
| DMR6:86178301 | 6 | 86178301 | 86178500 | ID_332086 | 200 | 1 | 9.78E-05 | 2 | 1 | |
| DMR6:86430101 | 6 | 86430101 | 86432100 | ID_332157 | 2000 | 1 | 5.67E-05 | 7 | 0.35 | |
| DMR6:88703301 | 6 | 88703301 | 88704500 | ID_332819 | 1200 | 1 | 2.58E-05 | 17 | 1.41666667 | RNGTT |
| DMR6:88729001 | 6 | 88729001 | 88729300 | ID_332824 | 300 | 1 | 9.15E-05 | 7 | 2.33333333 | RNGTT |
| DMR6:88798901 | 6 | 88798901 | 88799900 | ID_332843 | 1000 | 1 | 5.86E-06 | 13 | 1.3 | RNGTT |
| DMR6:88965701 | 6 | 88965701 | 88966800 | ID_332890 | 1100 | 1 | 2.69E-05 | 11 | 1 | RP1-72A23.4 |
| DMR6:91213301 | 6 | 91213301 | 91213900 | ID_333549 | 600 | 1 | 3.53E-05 | 5 | 0.83333333 | |
| DMR6:92870101 | 6 | 92870101 | 92871600 | ID_334020 | 1500 | 1 | 3.71E-06 | 12 | 0.8 | |
| DMR6:93868701 | 6 | 93868701 | 93870500 | ID_334285 | 1800 | 1 | 8.28E-05 | 16 | 0.88888889 | |
| DMR6:94233601 | 6 | 94233601 | 94234800 | ID_334381 | 1200 | 1 | 6.41E-05 | 21 | 1.75 | |
| DMR6:101429601 | 6 | 101429601 | 101431800 | ID_336316 | 2200 | 1 | 6.45E-05 | 19 | 0.86363636 | GRIK2;ACTG1P18 |
| DMR6:102389901 | 6 | 102389901 | 102391100 | ID_336567 | 1200 | 1 | 1.02E-05 | 23 | 1.91666667 | |
| DMR6:105482401 | 6 | 105482401 | 105482700 | ID_337441 | 300 | 1 | 0.000055 | 1 | 0.33333333 | |
| DMR6:105716301 | 6 | 105716301 | 105717000 | ID_337509 | 700 | 1 | 8.38E-07 | 19 | 2.71428571 | |
| DMR6:106016501 | 6 | 106016501 | 106017600 | ID_337591 | 1100 | 1 | 2.63E-05 | 18 | 1.63636364 | |
| DMR6:106624301 | 6 | 106624301 | 106625100 | ID_337760 | 800 | 1 | 6.42E-05 | 7 | 0.875 | RTN4IP1 |
| DMR6:106817701 | 6 | 106817701 | 106820900 | ID_337827 | 3200 | 1 | 0.00009 | 22 | 0.6875 | |
| DMR6:107411701 | 6 | 107411701 | 107411900 | ID_338005 | 200 | 1 | 1.91E-05 | 1 | 0.5 | PDSS2 |
| DMR6:107874901 | 6 | 107874901 | 107876000 | ID_338149 | 1100 | 1 | 4.79E-05 | 17 | 1.54545455 | SEC63 |
| DMR6:109249101 | 6 | 109249101 | 109250300 | ID_338559 | 1200 | 1 | 4.72E-05 | 18 | 1.5 | C6orf183 |
| DMR6:113850901 | 6 | 113850901 | 113852400 | ID_339924 | 1500 | 1 | 0.000075 | 6 | 0.4 | |
| DMR6:114280101 | 6 | 114280101 | 114280300 | ID_340052 | 200 | 1 | 2.08E-05 | 0 | 0 | HS3ST5;RP3-399L15.3 |
| DMR6:115453801 | 6 | 115453801 | 115454000 | ID_340350 | 200 | 1 | 7.58E-05 | 0 | 0 | |
| DMR6:116616001 | 6 | 116616001 | 116616300 | ID_340655 | 300 | 2 | 3.05E-06 | 10 | 3.33333333 | |
| DMR6:120638201 | 6 | 120638201 | 120639300 | ID_341804 | 1100 | 1 | 1.29E-05 | 6 | 0.54545455 | |
| DMR6:121198701 | 6 | 121198701 | 121199300 | ID_341963 | 600 | 1 | 2.51E-05 | 8 | 1.33333333 | TBC1D32 |
| DMR6:123397501 | 6 | 123397501 | 123397700 | ID_342575 | 200 | 1 | 1.02E-05 | 1 | 0.5 | RP11-532N4.2;TRDN |
| DMR6:124060801 | 6 | 124060801 | 124063000 | ID_342767 | 2200 | 1 | 4.06E-06 | 15 | 0.68181818 | NKAIN2 |
| DMR6:124521401 | 6 | 124521401 | 124521900 | ID_342889 | 500 | 1 | 3.31E-05 | 4 | 0.8 | NKAIN2 |
| DMR6:125484501 | 6 | 125484501 | 125484900 | ID_343165 | 400 | 1 | 5.57E-05 | 1 | 0.25 | |
| DMR6:126147501 | 6 | 126147501 | 126147800 | ID_343364 | 300 | 1 | 5.72E-05 | 4 | 1.33333333 | |
| DMR6:127049901 | 6 | 127049901 | 127050600 | ID_343610 | 700 | 1 | 4.33E-05 | 6 | 0.85714286 | |
| DMR6:128202901 | 6 | 128202901 | 128203800 | ID_343920 | 900 | 1 | 3.17E-05 | 5 | 0.55555556 | PTPRK |
| DMR6:128343101 | 6 | 128343101 | 128343200 | ID_343956 | 100 | 1 | 9.53E-05 | 2 | 2 | PTPRK |
| DMR6:128893901 | 6 | 128893901 | 128895200 | ID_344111 | 1300 | 1 | 2.71E-05 | 5 | 0.38461539 | LAMA2 |
| DMR6:129729201 | 6 | 129729201 | 129730000 | ID_344348 | 800 | 1 | 9.88E-05 | 16 | 2 | |
| DMR6:130382201 | 6 | 130382201 | 130382500 | ID_344551 | 300 | 1 | 9.24E-05 | 4 | 1.33333333 | TMEM200A |
| DMR6:131741601 | 6 | 131741601 | 131742300 | ID_344937 | 700 | 1 | 8.01E-05 | 1 | 0.14285714 | ENPP3 |
| DMR6:131967801 | 6 | 131967801 | 131968200 | ID_345009 | 400 | 1 | 6.85E-06 | 1 | 0.25 | RP11-69I8.3 |
| DMR6:132099001 | 6 | 132099001 | 132099700 | ID_345051 | 700 | 1 | 2.12E-05 | 2 | 0.28571429 | RP3-523C21.2 |
| DMR6:132393401 | 6 | 132393401 | 132395000 | ID_345133 | 1600 | 1 | 4.94E-05 | 3 | 0.1875 | MOXD1 |
| DMR6:133137601 | 6 | 133137601 | 133138500 | ID_345357 | 900 | 1 | 3.19E-05 | 8 | 0.88888889 | |
| DMR6:135247501 | 6 | 135247501 | 135247800 | ID_345996 | 300 | 1 | 3.88E-05 | 6 | 2 | |
| DMR6:137983901 | 6 | 137983901 | 137985000 | ID_346842 | 1100 | 1 | 8.31E-05 | 14 | 1.27272727 | |
| DMR6:138160901 | 6 | 138160901 | 138161200 | ID_346898 | 300 | 1 | 7.24E-06 | 6 | 2 | |
| DMR6:138315201 | 6 | 138315201 | 138316100 | ID_346948 | 900 | 1 | 2.77E-05 | 14 | 1.55555556 | ARFGEF3 |
| DMR6:138737701 | 6 | 138737701 | 138740500 | ID_347080 | 2800 | 1 | 8.23E-06 | 31 | 1.10714286 | GVQW2 |
| DMR6:138884101 | 6 | 138884101 | 138885300 | ID_347127 | 1200 | 1 | 1.02E-05 | 19 | 1.58333333 | ECT2L |
| DMR6:139441101 | 6 | 139441101 | 139443400 | ID_347295 | 2300 | 1 | 9.49E-06 | 39 | 1.69565217 | |
| DMR6:140006101 | 6 | 140006101 | 140009200 | ID_347473 | 3100 | 1 | 8.69E-05 | 26 | 0.83870968 | |
| DMR6:140364801 | 6 | 140364801 | 140366000 | ID_347572 | 1200 | 1 | 7.94E-05 | 3 | 0.25 | |
| DMR6:142492401 | 6 | 142492401 | 142492900 | ID_348146 | 500 | 1 | 5.45E-05 | 6 | 1.2 | |
| DMR6:144221401 | 6 | 144221401 | 144222900 | ID_348694 | 1500 | 1 | 0.000072 | 13 | 0.86666667 | |
| DMR6:147713501 | 6 | 147713501 | 147714800 | ID_349682 | 1300 | 1 | 1.06E-05 | 5 | 0.38461539 | SAMD5;RP11-307P5.1 |
| DMR6:148434001 | 6 | 148434001 | 148434700 | ID_349901 | 700 | 1 | 3.05E-05 | 14 | 2 | SASH1 |
| DMR6:149944601 | 6 | 149944601 | 149944900 | ID_350362 | 300 | 1 | 6.99E-05 | 1 | 0.33333333 | ULBP2 |
| DMR6:151563201 | 6 | 151563201 | 151565700 | ID_350868 | 2500 | 1 | 4.22E-05 | 16 | 0.64 | CCDC170 |
| DMR6:152067101 | 6 | 152067101 | 152067400 | ID_351017 | 300 | 1 | 1.35E-05 | 3 | 1 | ESR1 |
| DMR6:152319201 | 6 | 152319201 | 152319400 | ID_351086 | 200 | 1 | 1.64E-05 | 1 | 0.5 | SYNE1 |
| DMR6:153093901 | 6 | 153093901 | 153094100 | ID_351302 | 200 | 1 | 6.94E-06 | 2 | 1 | RGS17 |
| DMR6:153335501 | 6 | 153335501 | 153336400 | ID_351366 | 900 | 1 | 0.000092 | 2 | 0.22222222 | RP11-306O13.1 |
| DMR6:154571101 | 6 | 154571101 | 154572000 | ID_351760 | 900 | 1 | 2.14E-05 | 8 | 0.88888889 | |
| DMR6:156778101 | 6 | 156778101 | 156778300 | ID_352431 | 200 | 1 | 1.17E-05 | 8 | 4 | ARID1B;RP11-230C9.2 |
| DMR6:157169401 | 6 | 157169401 | 157169600 | ID_352555 | 200 | 1 | 0.000056 | 0 | 0 | ARID1B |
| DMR6:157308601 | 6 | 157308601 | 157308900 | ID_352599 | 300 | 1 | 1.71E-05 | 1 | 0.33333333 | TMEM242 |
| DMR6:157962901 | 6 | 157962901 | 157964200 | ID_352797 | 1300 | 1 | 6.85E-05 | 26 | 2 | |
| DMR6:159275201 | 6 | 159275201 | 159276700 | ID_353191 | 1500 | 1 | 6.62E-05 | 27 | 1.8 | |
| DMR6:159743101 | 6 | 159743101 | 159743200 | ID_353336 | 100 | 1 | 3.18E-05 | 0 | 0 | WTAP;SOD2 |
| DMR6:160954401 | 6 | 160954401 | 160954700 | ID_353710 | 300 | 1 | 3.14E-05 | 3 | 1 | RP3-428L16.1 |
| DMR6:161791301 | 6 | 161791301 | 161792400 | ID_353962 | 1100 | 1 | 9.73E-05 | 8 | 0.72727273 | PARK2 |
| DMR6:162624201 | 6 | 162624201 | 162625200 | ID_354205 | 1000 | 1 | 5.18E-05 | 8 | 0.8 | PARK2 |
| DMR6:163054501 | 6 | 163054501 | 163060100 | ID_354334 | 5600 | 1 | 6.92E-05 | 69 | 1.23214286 | PACRG |
| DMR6:164396101 | 6 | 164396101 | 164396500 | ID_354745 | 400 | 1 | 9.66E-06 | 6 | 1.5 | |
| DMR6:164908601 | 6 | 164908601 | 164908800 | ID_354885 | 200 | 1 | 7.26E-05 | 1 | 0.5 | |
| DMR6:165300101 | 6 | 165300101 | 165302400 | ID_354998 | 2300 | 1 | 4.57E-06 | 76 | 3.30434783 | C6orf118 |
| DMR6:165557401 | 6 | 165557401 | 165557500 | ID_355083 | 100 | 1 | 7.98E-06 | 0 | 0 | PDE10A |
| DMR6:166002301 | 6 | 166002301 | 166003500 | ID_355225 | 1200 | 1 | 2.46E-05 | 8 | 0.66666667 | |
| DMR6:166545401 | 6 | 166545401 | 166549800 | ID_355408 | 4400 | 1 | 1.72E-05 | 70 | 1.59090909 | RPS6KA2 |
| DMR6:167096901 | 6 | 167096901 | 167099000 | ID_355570 | 2100 | 1 | 4.81E-05 | 57 | 2.71428571 | RP11-517H2.6 |
| DMR6:167110501 | 6 | 167110501 | 167112100 | ID_355575 | 1600 | 1 | 1.42E-05 | 20 | 1.25 | CCR6;RP11-517H2.6 |
| DMR6:167466101 | 6 | 167466101 | 167468500 | ID_355688 | 2400 | 1 | 9.07E-07 | 65 | 2.70833333 | |
| DMR6:167702601 | 6 | 167702601 | 167705500 | ID_355748 | 2900 | 2 | 4.71E-05 | 70 | 2.4137931 | |
| DMR6:167709701 | 6 | 167709701 | 167711200 | ID_355750 | 1500 | 1 | 4.65E-05 | 26 | 1.73333333 | |
| DMR6:168234001 | 6 | 168234001 | 168240100 | ID_355915 | 6100 | 1 | 3.18E-05 | 102 | 1.67213115 | RP11-503C24.3 |
| DMR6:168290601 | 6 | 168290601 | 168291200 | ID_355931 | 600 | 1 | 2.47E-05 | 17 | 2.83333333 | |
| DMR6:168592301 | 6 | 168592301 | 168596000 | ID_356041 | 3700 | 1 | 1.43E-05 | 147 | 3.97297297 | SMOC2 |
| DMR6:168713101 | 6 | 168713101 | 168716000 | ID_356076 | 2900 | 1 | 1.21E-05 | 19 | 0.65517241 | |
| DMR6:168803301 | 6 | 168803301 | 168803800 | ID_356104 | 500 | 1 | 4.61E-05 | 12 | 2.4 | |
| DMR7:1425701 | 7 | 1425701 | 1426200 | ID_357169 | 500 | 1 | 0.000084 | 12 | 2.4 | |
| DMR7:1669901 | 7 | 1669901 | 1671100 | ID_357243 | 1200 | 1 | 6.27E-05 | 126 | 10.5 | |
| DMR7:1905601 | 7 | 1905601 | 1905800 | ID_357320 | 200 | 1 | 6.39E-05 | 2 | 1 | MAD1L1 |
| DMR7:3648001 | 7 | 3648001 | 3648900 | ID_357874 | 900 | 1 | 8.75E-05 | 10 | 1.11111111 | SDK1 |
| DMR7:4366601 | 7 | 4366601 | 4367900 | ID_358104 | 1300 | 1 | 2.05E-05 | 15 | 1.15384615 | |
| DMR7:4801401 | 7 | 4801401 | 4804000 | ID_358225 | 2600 | 1 | 5.54E-05 | 139 | 5.34615385 | RADIL |
| DMR7:4863801 | 7 | 4863801 | 4865500 | ID_358243 | 1700 | 1 | 0.000015 | 5 | 0.29411765 | AC092610.12;RADIL |
| DMR7:5497001 | 7 | 5497001 | 5497500 | ID_358459 | 500 | 1 | 9.67E-05 | 18 | 3.6 | FBXL18 |
| DMR7:5720701 | 7 | 5720701 | 5722500 | ID_358539 | 1800 | 1 | 1.81E-05 | 22 | 1.22222222 | RNF216 |
| DMR7:6501801 | 7 | 6501801 | 6502900 | ID_358777 | 1100 | 1 | 6.89E-05 | 16 | 1.45454546 | GRID2IP |
| DMR7:8401701 | 7 | 8401701 | 8403400 | ID_359330 | 1700 | 1 | 6.53E-05 | 12 | 0.70588235 | |
| DMR7:8646101 | 7 | 8646101 | 8647700 | ID_359403 | 1600 | 1 | 3.28E-05 | 12 | 0.75 | NXPH1 |
| DMR7:8713501 | 7 | 8713501 | 8714400 | ID_359420 | 900 | 1 | 7.02E-05 | 5 | 0.55555556 | NXPH1 |
| DMR7:9288501 | 7 | 9288501 | 9289400 | ID_359572 | 900 | 1 | 6.58E-05 | 4 | 0.44444444 | |
| DMR7:11220901 | 7 | 11220901 | 11221500 | ID_360117 | 600 | 1 | 9.76E-05 | 3 | 0.5 | AC004538.3 |
| DMR7:12440701 | 7 | 12440701 | 12441500 | ID_360472 | 800 | 1 | 1.54E-05 | 6 | 0.75 | |
| DMR7:16553901 | 7 | 16553901 | 16555500 | ID_361578 | 1600 | 1 | 2.88E-05 | 23 | 1.4375 | LRRC72 |
| DMR7:17335901 | 7 | 17335901 | 17336200 | ID_361800 | 300 | 1 | 1.19E-05 | 1 | 0.33333333 | AHR |
| DMR7:18675701 | 7 | 18675701 | 18676200 | ID_362190 | 500 | 1 | 1.24E-05 | 4 | 0.8 | HDAC9 |
| DMR7:19053501 | 7 | 19053501 | 19053700 | ID_362299 | 200 | 1 | 8.81E-05 | 0 | 0 | TWIST1 |
| DMR7:19924901 | 7 | 19924901 | 19926300 | ID_362530 | 1400 | 1 | 2.73E-05 | 3 | 0.21428571 | AC005062.2 |
| DMR7:20888001 | 7 | 20888001 | 20889000 | ID_362810 | 1000 | 1 | 3.23E-05 | 8 | 0.8 | LINC01162 |
| DMR7:21999101 | 7 | 21999101 | 21999600 | ID_363162 | 500 | 1 | 6.38E-05 | 10 | 2 | |
| DMR7:23988501 | 7 | 23988501 | 23989500 | ID_363771 | 1000 | 1 | 4.48E-05 | 4 | 0.4 | |
| DMR7:27601301 | 7 | 27601301 | 27602200 | ID_364885 | 900 | 1 | 6.83E-05 | 4 | 0.44444444 | HIBADH |
| DMR7:27784701 | 7 | 27784701 | 27786100 | ID_364944 | 1400 | 1 | 4.21E-05 | 5 | 0.35714286 | TAX1BP1 |
| DMR7:29439401 | 7 | 29439401 | 29439600 | ID_365466 | 200 | 1 | 8.92E-05 | 2 | 1 | CHN2 |
| DMR7:29667001 | 7 | 29667001 | 29668500 | ID_365536 | 1500 | 1 | 9.48E-07 | 8 | 0.53333333 | DPY19L2P3;ZNRF2P2 |
| DMR7:30071001 | 7 | 30071001 | 30071300 | ID_365654 | 300 | 1 | 5.26E-05 | 2 | 0.66666667 | PLEKHA8;AC007285.7 |
| DMR7:30932101 | 7 | 30932101 | 30932300 | ID_365922 | 200 | 1 | 4.97E-05 | 5 | 2.5 | |
| DMR7:32513501 | 7 | 32513501 | 32513800 | ID_366394 | 300 | 1 | 1.9E-06 | 6 | 2 | AVL9 |
| DMR7:32736701 | 7 | 32736701 | 32738000 | ID_366466 | 1300 | 1 | 1.46E-05 | 18 | 1.38461539 | DPY19L1P1 |
| DMR7:34672001 | 7 | 34672001 | 34672200 | ID_367046 | 200 | 1 | 4.7E-06 | 2 | 1 | NPSR1;NPSR1-AS1 |
| DMR7:34781901 | 7 | 34781901 | 34782200 | ID_367073 | 300 | 1 | 1.71E-05 | 2 | 0.66666667 | NPSR1;NPSR1-AS1 |
| DMR7:35170201 | 7 | 35170201 | 35171300 | ID_367178 | 1100 | 1 | 4.38E-05 | 8 | 0.72727273 | DPY19L2P1 |
| DMR7:36250301 | 7 | 36250301 | 36252700 | ID_367509 | 2400 | 1 | 6.53E-05 | 23 | 0.95833333 | EEPD1 |
| DMR7:41890401 | 7 | 41890401 | 41893000 | ID_369282 | 2600 | 1 | 2.55E-05 | 28 | 1.07692308 | |
| DMR7:43658201 | 7 | 43658201 | 43658500 | ID_369809 | 300 | 1 | 7.7E-06 | 10 | 3.33333333 | COA1 |
| DMR7:43768301 | 7 | 43768301 | 43769200 | ID_369840 | 900 | 1 | 4.77E-05 | 9 | 1 | BLVRA |
| DMR7:43979501 | 7 | 43979501 | 43980500 | ID_369903 | 1000 | 1 | 3.18E-05 | 19 | 1.9 | POLR2J4;RP5-1165K10.2 |
| DMR7:45188701 | 7 | 45188701 | 45190500 | ID_370285 | 1800 | 1 | 4.71E-05 | 41 | 2.27777778 | |
| DMR7:45199701 | 7 | 45199701 | 45200000 | ID_370290 | 300 | 1 | 9.85E-05 | 4 | 1.33333333 | |
| DMR7:47497401 | 7 | 47497401 | 47498200 | ID_370986 | 800 | 1 | 0.000049 | 13 | 1.625 | TNS3 |
| DMR7:48137101 | 7 | 48137101 | 48137300 | ID_371182 | 200 | 1 | 4.76E-05 | 2 | 1 | |
| DMR7:48350601 | 7 | 48350601 | 48350900 | ID_371236 | 300 | 1 | 4.28E-05 | 7 | 2.33333333 | ABCA13 |
| DMR7:49018601 | 7 | 49018601 | 49019300 | ID_371433 | 700 | 3 | 9.21E-07 | 14 | 2 | |
| DMR7:50125501 | 7 | 50125501 | 50127200 | ID_371737 | 1700 | 1 | 3.59E-05 | 3 | 0.17647059 | C7orf72 |
| DMR7:52113501 | 7 | 52113501 | 52113700 | ID_372358 | 200 | 1 | 4.72E-05 | 8 | 4 | |
| DMR7:55998401 | 7 | 55998401 | 55998500 | ID_373538 | 100 | 1 | 7.12E-05 | 3 | 3 | GBAS |
| DMR7:57337201 | 7 | 57337201 | 57337400 | ID_373977 | 200 | 1 | 7.15E-06 | 0 | 0 | |
| DMR7:58879801 | 7 | 58879801 | 58881000 | ID_374353 | 1200 | 1 | 4.07E-05 | 19 | 1.58333333 | |
| DMR7:60233201 | 7 | 60233201 | 60233400 | ID_374696 | 200 | 1 | 0.000059 | 4 | 2 | |
| DMR7:63231501 | 7 | 63231501 | 63234300 | ID_375354 | 2800 | 1 | 3.63E-05 | 65 | 2.32142857 | PHKG1P1;RP5-905H7.3 |
| DMR7:63556001 | 7 | 63556001 | 63557200 | ID_375460 | 1200 | 1 | 0.000095 | 82 | 6.83333333 | SLC29A4P2 |
| DMR7:69482101 | 7 | 69482101 | 69483200 | ID_377321 | 1100 | 1 | 2.38E-06 | 33 | 3 | |
| DMR7:71269201 | 7 | 71269201 | 71269600 | ID_377900 | 400 | 1 | 2.85E-05 | 3 | 0.75 | WBSCR17 |
| DMR7:73173801 | 7 | 73173801 | 73179300 | ID_378500 | 5500 | 1 | 0.000099 | 80 | 1.45454546 | GTF2IP4 |
| DMR7:74747501 | 7 | 74747501 | 74750000 | ID_379014 | 2500 | 1 | 9.25E-06 | 55 | 2.2 | GTF2I |
| DMR7:75250501 | 7 | 75250501 | 75250800 | ID_379165 | 300 | 1 | 7.67E-06 | 6 | 2 | |
| DMR7:76629301 | 7 | 76629301 | 76629800 | ID_379609 | 500 | 1 | 8.17E-05 | 6 | 1.2 | |
| DMR7:77441801 | 7 | 77441801 | 77442200 | ID_379856 | 400 | 2 | 9.98E-07 | 6 | 1.5 | |
| DMR7:77481101 | 7 | 77481101 | 77481600 | ID_379869 | 500 | 1 | 8.77E-05 | 10 | 2 | |
| DMR7:81747801 | 7 | 81747801 | 81748700 | ID_381033 | 900 | 1 | 9.07E-05 | 5 | 0.55555556 | HGF |
| DMR7:83488601 | 7 | 83488601 | 83489400 | ID_381495 | 800 | 1 | 2.48E-05 | 2 | 0.25 | SEMA3E |
| DMR7:83708201 | 7 | 83708201 | 83708900 | ID_381557 | 700 | 1 | 0.000016 | 3 | 0.42857143 | |
| DMR7:84429501 | 7 | 84429501 | 84429900 | ID_381752 | 400 | 1 | 0.000013 | 5 | 1.25 | SEMA3A |
| DMR7:86726701 | 7 | 86726701 | 86727100 | ID_382351 | 400 | 1 | 5.25E-05 | 2 | 0.5 | GRM3 |
| DMR7:87205701 | 7 | 87205701 | 87208000 | ID_382485 | 2300 | 2 | 3.39E-05 | 37 | 1.60869565 | TMEM243 |
| DMR7:88302301 | 7 | 88302301 | 88302500 | ID_382796 | 200 | 1 | 0.000034 | 3 | 1.5 | STEAP4;AC003991.3 |
| DMR7:88683701 | 7 | 88683701 | 88684200 | ID_382898 | 500 | 1 | 4.59E-05 | 4 | 0.8 | |
| DMR7:90642601 | 7 | 90642601 | 90645400 | ID_383441 | 2800 | 1 | 2.14E-05 | 24 | 0.85714286 | CDK14 |
| DMR7:92794101 | 7 | 92794101 | 92794700 | ID_384096 | 600 | 1 | 8.31E-05 | 4 | 0.66666667 | CDK6 |
| DMR7:93119301 | 7 | 93119301 | 93120500 | ID_384181 | 1200 | 1 | 3.37E-05 | 6 | 0.5 | |
| DMR7:95339701 | 7 | 95339701 | 95341000 | ID_384795 | 1300 | 1 | 2.34E-05 | 3 | 0.23076923 | |
| DMR7:95616201 | 7 | 95616201 | 95617600 | ID_384881 | 1400 | 1 | 1.34E-05 | 12 | 0.85714286 | |
| DMR7:96343901 | 7 | 96343901 | 96344500 | ID_385083 | 600 | 1 | 1.91E-05 | 5 | 0.83333333 | |
| DMR7:96490501 | 7 | 96490501 | 96492300 | ID_385132 | 1800 | 1 | 7.73E-05 | 15 | 0.83333333 | SHFM1 |
| DMR7:97176701 | 7 | 97176701 | 97180200 | ID_385333 | 3500 | 1 | 9.72E-06 | 19 | 0.54285714 | SDHAF3 |
| DMR7:99384901 | 7 | 99384901 | 99386700 | ID_386035 | 1800 | 1 | 3.51E-05 | 36 | 2 | ARPC1A;ARPC1B |
| DMR7:99635901 | 7 | 99635901 | 99636200 | ID_386104 | 300 | 1 | 8.07E-05 | 9 | 3 | |
| DMR7:101239401 | 7 | 101239401 | 101241000 | ID_386620 | 1600 | 2 | 6.96E-06 | 66 | 4.125 | FIS1 |
| DMR7:101451901 | 7 | 101451901 | 101452900 | ID_386679 | 1000 | 1 | 0.00009 | 15 | 1.5 | COL26A1 |
| DMR7:101831901 | 7 | 101831901 | 101832900 | ID_386807 | 1000 | 1 | 0.00004 | 25 | 2.5 | CUX1 |
| DMR7:101933301 | 7 | 101933301 | 101935600 | ID_386834 | 2300 | 1 | 1.58E-05 | 37 | 1.60869565 | CUX1 |
| DMR7:103662301 | 7 | 103662301 | 103663800 | ID_387388 | 1500 | 1 | 8.66E-05 | 14 | 0.93333333 | RELN |
| DMR7:104257001 | 7 | 104257001 | 104257300 | ID_387554 | 300 | 1 | 6.86E-05 | 4 | 1.33333333 | |
| DMR7:104594401 | 7 | 104594401 | 104596100 | ID_387660 | 1700 | 1 | 9.25E-05 | 27 | 1.58823529 | LHFPL3 |
| DMR7:107283801 | 7 | 107283801 | 107284800 | ID_388488 | 1000 | 1 | 5.37E-05 | 15 | 1.5 | COG5 |
| DMR7:107446201 | 7 | 107446201 | 107447500 | ID_388533 | 1300 | 1 | 8.56E-05 | 7 | 0.53846154 | COG5 |
| DMR7:108102001 | 7 | 108102001 | 108103500 | ID_388731 | 1500 | 1 | 2.96E-06 | 26 | 1.73333333 | LAMB4 |
| DMR7:109351301 | 7 | 109351301 | 109351700 | ID_389093 | 400 | 2 | 1.94E-05 | 9 | 2.25 | |
| DMR7:109377201 | 7 | 109377201 | 109377400 | ID_389100 | 200 | 1 | 4.46E-05 | 2 | 1 | |
| DMR7:109772501 | 7 | 109772501 | 109773300 | ID_389195 | 800 | 1 | 2.87E-05 | 4 | 0.5 | |
| DMR7:109855801 | 7 | 109855801 | 109856000 | ID_389218 | 200 | 1 | 9.24E-05 | 1 | 0.5 | |
| DMR7:112502401 | 7 | 112502401 | 112504500 | ID_389985 | 2100 | 1 | 6.29E-06 | 18 | 0.85714286 | |
| DMR7:112585401 | 7 | 112585401 | 112589400 | ID_390008 | 4000 | 1 | 2.29E-05 | 34 | 0.85 | |
| DMR7:114054301 | 7 | 114054301 | 114055400 | ID_390409 | 1100 | 1 | 0.00009 | 16 | 1.45454546 | PPP1R3A |
| DMR7:115605501 | 7 | 115605501 | 115606000 | ID_390804 | 500 | 1 | 7.44E-07 | 2 | 0.4 | |
| DMR7:118922901 | 7 | 118922901 | 118923200 | ID_391691 | 300 | 1 | 0.000012 | 4 | 1.33333333 | |
| DMR7:119141201 | 7 | 119141201 | 119141400 | ID_391742 | 200 | 1 | 0.000068 | 0 | 0 | |
| DMR7:119407701 | 7 | 119407701 | 119407900 | ID_391803 | 200 | 1 | 5.13E-05 | 0 | 0 | |
| DMR7:120516201 | 7 | 120516201 | 120516500 | ID_392093 | 300 | 1 | 2.49E-05 | 4 | 1.33333333 | KCND2 |
| DMR7:121068901 | 7 | 121068901 | 121069700 | ID_392251 | 800 | 1 | 4.63E-05 | 4 | 0.5 | CPED1 |
| DMR7:121817201 | 7 | 121817201 | 121817300 | ID_392458 | 100 | 1 | 6.38E-06 | 0 | 0 | |
| DMR7:125009401 | 7 | 125009401 | 125011600 | ID_393344 | 2200 | 1 | 8.83E-05 | 22 | 1 | POT1-AS1 |
| DMR7:126289301 | 7 | 126289301 | 126289900 | ID_393701 | 600 | 1 | 2.71E-05 | 5 | 0.83333333 | |
| DMR7:128947001 | 7 | 128947001 | 128947900 | ID_394484 | 900 | 1 | 1.51E-05 | 24 | 2.66666667 | IRF5 |
| DMR7:129266001 | 7 | 129266001 | 129266600 | ID_394585 | 600 | 1 | 7.05E-05 | 7 | 1.16666667 | AHCYL2 |
| DMR7:129302901 | 7 | 129302901 | 129305400 | ID_394596 | 2500 | 1 | 0.000049 | 24 | 0.96 | AHCYL2 |
| DMR7:131020301 | 7 | 131020301 | 131021700 | ID_395118 | 1400 | 1 | 9.98E-05 | 16 | 1.14285714 | LINC-PINT |
| DMR7:131156001 | 7 | 131156001 | 131156200 | ID_395160 | 200 | 1 | 9.23E-05 | 1 | 0.5 | MKLN1 |
| DMR7:131338701 | 7 | 131338701 | 131339000 | ID_395219 | 300 | 1 | 1.21E-05 | 4 | 1.33333333 | MKLN1 |
| DMR7:132201401 | 7 | 132201401 | 132201800 | ID_395496 | 400 | 1 | 4.68E-05 | 3 | 0.75 | PLXNA4 |
| DMR7:136104701 | 7 | 136104701 | 136105000 | ID_396685 | 300 | 1 | 3.39E-05 | 10 | 3.33333333 | AC009784.3 |
| DMR7:138138401 | 7 | 138138401 | 138139300 | ID_397296 | 900 | 1 | 6.83E-05 | 6 | 0.66666667 | |
| DMR7:138259001 | 7 | 138259001 | 138260100 | ID_397338 | 1100 | 1 | 9.92E-05 | 8 | 0.72727273 | |
| DMR7:140446401 | 7 | 140446401 | 140446700 | ID_398019 | 300 | 1 | 1.11E-05 | 5 | 1.66666667 | |
| DMR7:141028701 | 7 | 141028701 | 141029900 | ID_398200 | 1200 | 1 | 3.93E-05 | 4 | 0.33333333 | |
| DMR7:141387901 | 7 | 141387901 | 141388400 | ID_398320 | 500 | 1 | 2.01E-05 | 12 | 2.4 | TMEM178B |
| DMR7:142326501 | 7 | 142326501 | 142329500 | ID_398617 | 3000 | 1 | 3.97E-05 | 33 | 1.1 | TRBV6-1 |
| DMR7:142685101 | 7 | 142685101 | 142690300 | ID_398730 | 5200 | 1 | 7.24E-06 | 30 | 0.57692308 | |
| DMR7:144022501 | 7 | 144022501 | 144022700 | ID_399122 | 200 | 1 | 6.07E-05 | 0 | 0 | |
| DMR7:144222301 | 7 | 144222301 | 144223300 | ID_399177 | 1000 | 1 | 2.2E-06 | 12 | 1.2 | RP4-545C24.1 |
| DMR7:144346001 | 7 | 144346001 | 144354100 | ID_399214 | 8100 | 1 | 6.36E-05 | 107 | 1.32098765 | OR2A1-AS1 |
| DMR7:144924601 | 7 | 144924601 | 144926700 | ID_399389 | 2100 | 1 | 6.35E-05 | 26 | 1.23809524 | |
| DMR7:147552101 | 7 | 147552101 | 147554500 | ID_400117 | 2400 | 1 | 5.87E-05 | 21 | 0.875 | CNTNAP2 |
| DMR7:147747801 | 7 | 147747801 | 147747900 | ID_400172 | 100 | 1 | 6.63E-05 | 0 | 0 | CNTNAP2 |
| DMR7:148527001 | 7 | 148527001 | 148528100 | ID_400417 | 1100 | 1 | 6.99E-05 | 21 | 1.90909091 | |
| DMR7:148615901 | 7 | 148615901 | 148619100 | ID_400444 | 3200 | 1 | 1.33E-05 | 53 | 1.65625 | |
| DMR7:148810901 | 7 | 148810901 | 148812000 | ID_400496 | 1100 | 1 | 2.32E-05 | 16 | 1.45454546 | EZH2 |
| DMR7:150450501 | 7 | 150450501 | 150452300 | ID_401005 | 1800 | 1 | 0.000068 | 49 | 2.72222222 | GIMAP8 |
| DMR7:151385901 | 7 | 151385901 | 151387200 | ID_401318 | 1300 | 1 | 1.82E-05 | 32 | 2.46153846 | WDR86 |
| DMR7:153320901 | 7 | 153320901 | 153323200 | ID_401946 | 2300 | 1 | 6.83E-05 | 40 | 1.73913044 | |
| DMR7:155340901 | 7 | 155340901 | 155343400 | ID_402545 | 2500 | 1 | 5.34E-05 | 35 | 1.4 | |
| DMR7:155677001 | 7 | 155677001 | 155679700 | ID_402655 | 2700 | 1 | 1.42E-05 | 30 | 1.11111111 | RBM33 |
| DMR7:155761401 | 7 | 155761401 | 155762400 | ID_402682 | 1000 | 1 | 1.24E-05 | 12 | 1.2 | RBM33 |
| DMR7:156451401 | 7 | 156451401 | 156452500 | ID_402907 | 1100 | 1 | 9.31E-05 | 8 | 0.72727273 | |
| DMR7:156976401 | 7 | 156976401 | 156977200 | ID_403083 | 800 | 1 | 7.66E-06 | 17 | 2.125 | |
| DMR7:158556901 | 7 | 158556901 | 158558000 | ID_403587 | 1100 | 2 | 5.39E-06 | 65 | 5.90909091 | PTPRN2 |
| DMR7:158866901 | 7 | 158866901 | 158867000 | ID_403688 | 100 | 1 | 0.000072 | 0 | 0 | WDR60 |
| DMR8:182001 | 8 | 182001 | 182300 | ID_403877 | 300 | 1 | 9.34E-05 | 0 | 0 | |
| DMR8:326501 | 8 | 326501 | 329800 | ID_403928 | 3300 | 1 | 0.00005 | 49 | 1.48484849 | RP11-63E5.6 |
| DMR8:1891301 | 8 | 1891301 | 1892500 | ID_404422 | 1200 | 1 | 6.37E-05 | 10 | 0.83333333 | ARHGEF10 |
| DMR8:2089201 | 8 | 2089201 | 2090500 | ID_404485 | 1300 | 1 | 2.38E-05 | 28 | 2.15384615 | MYOM2 |
| DMR8:2314001 | 8 | 2314001 | 2315400 | ID_404567 | 1400 | 1 | 6.17E-05 | 17 | 1.21428571 | |
| DMR8:2903401 | 8 | 2903401 | 2903900 | ID_404762 | 500 | 1 | 0.000065 | 5 | 1 | |
| DMR8:3442801 | 8 | 3442801 | 3443000 | ID_404944 | 200 | 1 | 2.28E-05 | 0 | 0 | CSMD1 |
| DMR8:5080301 | 8 | 5080301 | 5084000 | ID_405454 | 3700 | 1 | 9.18E-05 | 57 | 1.54054054 | |
| DMR8:5933101 | 8 | 5933101 | 5934100 | ID_405712 | 1000 | 1 | 9.53E-05 | 8 | 0.8 | |
| DMR8:6432601 | 8 | 6432601 | 6434600 | ID_405883 | 2000 | 1 | 4.32E-05 | 17 | 0.85 | MCPH1 |
| DMR8:6463301 | 8 | 6463301 | 6466800 | ID_405894 | 3500 | 1 | 2.96E-05 | 84 | 2.4 | MCPH1 |
| DMR8:7540401 | 8 | 7540401 | 7545300 | ID_406217 | 4900 | 1 | 0.000077 | 49 | 1 | PRR23D1 |
| DMR8:7556101 | 8 | 7556101 | 7556600 | ID_406222 | 500 | 2 | 8.3E-06 | 25 | 5 | |
| DMR8:7570901 | 8 | 7570901 | 7582900 | ID_406227 | 12000 | 1 | 4.27E-05 | 456 | 3.8 | FAM90A22P;FAM90A23P |
| DMR8:7748301 | 8 | 7748301 | 7749600 | ID_406266 | 1300 | 1 | 9.6E-06 | 68 | 5.23076923 | FAM90A17P |
| DMR8:7762401 | 8 | 7762401 | 7765200 | ID_406270 | 2800 | 1 | 6.48E-05 | 120 | 4.28571429 | FAM90A9P |
| DMR8:7799601 | 8 | 7799601 | 7801300 | ID_406280 | 1700 | 1 | 0.0001 | 11 | 0.64705882 | |
| DMR8:8064501 | 8 | 8064501 | 8066900 | ID_406361 | 2400 | 1 | 3.93E-05 | 117 | 4.875 | |
| DMR8:8243201 | 8 | 8243201 | 8245300 | ID_406413 | 2100 | 1 | 7.91E-05 | 33 | 1.57142857 | ALG1L13P;FAM86B3P |
| DMR8:9325701 | 8 | 9325701 | 9326700 | ID_406757 | 1000 | 1 | 2.86E-05 | 25 | 2.5 | RP11-115J16.1 |
| DMR8:11572801 | 8 | 11572801 | 11573400 | ID_407479 | 600 | 1 | 6.27E-05 | 5 | 0.83333333 | |
| DMR8:11887001 | 8 | 11887001 | 11888000 | ID_407580 | 1000 | 1 | 3.65E-05 | 31 | 3.1 | |
| DMR8:12196301 | 8 | 12196301 | 12197200 | ID_407681 | 900 | 1 | 9.25E-05 | 23 | 2.55555556 | |
| DMR8:12607801 | 8 | 12607801 | 12608800 | ID_407780 | 1000 | 1 | 2.35E-06 | 22 | 2.2 | |
| DMR8:13341101 | 8 | 13341101 | 13342000 | ID_408018 | 900 | 1 | 6.96E-05 | 13 | 1.44444444 | RP11-10C8.2;DLC1 |
| DMR8:14528201 | 8 | 14528201 | 14529000 | ID_408370 | 800 | 1 | 7.54E-05 | 7 | 0.875 | SGCZ |
| DMR8:15344801 | 8 | 15344801 | 15346500 | ID_408604 | 1700 | 1 | 8.79E-05 | 14 | 0.82352941 | |
| DMR8:16310801 | 8 | 16310801 | 16311500 | ID_408893 | 700 | 1 | 4.57E-05 | 7 | 1 | MSR1 |
| DMR8:17255301 | 8 | 17255301 | 17256600 | ID_409172 | 1300 | 1 | 4.44E-05 | 14 | 1.07692308 | VPS37A |
| DMR8:17401701 | 8 | 17401701 | 17402000 | ID_409213 | 300 | 1 | 9.66E-05 | 1 | 0.33333333 | MTMR7 |
| DMR8:17422701 | 8 | 17422701 | 17423700 | ID_409220 | 1000 | 1 | 8.61E-05 | 16 | 1.6 | |
| DMR8:18761401 | 8 | 18761401 | 18761700 | ID_409630 | 300 | 1 | 0.000054 | 4 | 1.33333333 | PSD3 |
| DMR8:19063501 | 8 | 19063501 | 19064800 | ID_409725 | 1300 | 1 | 1.87E-06 | 25 | 1.92307692 | PSD3 |
| DMR8:19202901 | 8 | 19202901 | 19203700 | ID_409767 | 800 | 1 | 8.1E-07 | 2 | 0.25 | RP11-1080G15.1 |
| DMR8:20145301 | 8 | 20145301 | 20145700 | ID_410055 | 400 | 1 | 9.69E-05 | 8 | 2 | SLC18A1 |
| DMR8:21777601 | 8 | 21777601 | 21779900 | ID_410558 | 2300 | 1 | 5.84E-06 | 45 | 1.95652174 | GFRA2 |
| DMR8:23031901 | 8 | 23031901 | 23033800 | ID_410986 | 1900 | 1 | 9.75E-05 | 38 | 2 | TNFRSF10B |
| DMR8:23203001 | 8 | 23203001 | 23203100 | ID_411041 | 100 | 1 | 7.01E-05 | 0 | 0 | TNFRSF10A |
| DMR8:24735901 | 8 | 24735901 | 24736900 | ID_411501 | 1000 | 1 | 1.93E-05 | 7 | 0.7 | RP11-624C23.1 |
| DMR8:25270401 | 8 | 25270401 | 25271500 | ID_411663 | 1100 | 1 | 4.17E-05 | 11 | 1 | DOCK5 |
| DMR8:25659001 | 8 | 25659001 | 25659700 | ID_411789 | 700 | 1 | 2.43E-05 | 5 | 0.71428571 | |
| DMR8:25933401 | 8 | 25933401 | 25936200 | ID_411873 | 2800 | 1 | 5.01E-05 | 49 | 1.75 | EBF2 |
| DMR8:26526901 | 8 | 26526901 | 26527100 | ID_412054 | 200 | 1 | 6.28E-05 | 0 | 0 | DPYSL2 |
| DMR8:27797501 | 8 | 27797501 | 27798000 | ID_412452 | 500 | 2 | 5.39E-05 | 3 | 0.6 | ESCO2 |
| DMR8:28033801 | 8 | 28033801 | 28034400 | ID_412524 | 600 | 1 | 1.79E-05 | 8 | 1.33333333 | NUGGC |
| DMR8:28444501 | 8 | 28444501 | 28446200 | ID_412659 | 1700 | 1 | 0.000058 | 38 | 2.23529412 | FBXO16 |
| DMR8:30585101 | 8 | 30585101 | 30587700 | ID_413331 | 2600 | 1 | 2.78E-05 | 27 | 1.03846154 | GTF2E2 |
| DMR8:31535701 | 8 | 31535701 | 31535900 | ID_413609 | 200 | 1 | 8.1E-06 | 3 | 1.5 | |
| DMR8:33083901 | 8 | 33083901 | 33084800 | ID_414061 | 900 | 1 | 7.48E-05 | 7 | 0.77777778 | |
| DMR8:37129201 | 8 | 37129201 | 37130700 | ID_415292 | 1500 | 1 | 6.86E-05 | 16 | 1.06666667 | |
| DMR8:37247501 | 8 | 37247501 | 37248600 | ID_415320 | 1100 | 1 | 0.000086 | 26 | 2.36363636 | |
| DMR8:37533701 | 8 | 37533701 | 37535400 | ID_415408 | 1700 | 1 | 0.000088 | 19 | 1.11764706 | LINC01605 |
| DMR8:37801301 | 8 | 37801301 | 37804100 | ID_415494 | 2800 | 1 | 1.87E-06 | 51 | 1.82142857 | ADGRA2 |
| DMR8:37996501 | 8 | 37996501 | 37996900 | ID_415551 | 400 | 1 | 1.94E-05 | 12 | 3 | |
| DMR8:39112301 | 8 | 39112301 | 39113200 | ID_415889 | 900 | 1 | 4.67E-05 | 5 | 0.55555556 | ADAM32 |
| DMR8:40433501 | 8 | 40433501 | 40433900 | ID_416283 | 400 | 1 | 6.28E-05 | 7 | 1.75 | |
| DMR8:42749401 | 8 | 42749401 | 42749800 | ID_417018 | 400 | 1 | 9.88E-05 | 2 | 0.5 | |
| DMR8:42814301 | 8 | 42814301 | 42815900 | ID_417040 | 1600 | 1 | 3.01E-05 | 30 | 1.875 | |
| DMR8:43413301 | 8 | 43413301 | 43413500 | ID_417215 | 200 | 1 | 9.27E-05 | 1 | 0.5 | |
| DMR8:44047001 | 8 | 44047001 | 44047800 | ID_417352 | 800 | 1 | 5.23E-05 | 9 | 1.125 | |
| DMR8:44360401 | 8 | 44360401 | 44360700 | ID_417449 | 300 | 2 | 3.67E-05 | 6 | 2 | |
| DMR8:45228001 | 8 | 45228001 | 45228400 | ID_417702 | 400 | 1 | 7.45E-06 | 7 | 1.75 | |
| DMR8:45252501 | 8 | 45252501 | 45253400 | ID_417712 | 900 | 1 | 9.13E-06 | 20 | 2.22222222 | |
| DMR8:45519101 | 8 | 45519101 | 45519400 | ID_417796 | 300 | 1 | 1.79E-05 | 5 | 1.66666667 | |
| DMR8:45532501 | 8 | 45532501 | 45532700 | ID_417801 | 200 | 1 | 0.000004 | 4 | 2 | |
| DMR8:45572801 | 8 | 45572801 | 45574300 | ID_417812 | 1500 | 1 | 1.42E-07 | 20 | 1.33333333 | |
| DMR8:45580601 | 8 | 45580601 | 45580800 | ID_417814 | 200 | 1 | 4.71E-05 | 5 | 2.5 | |
| DMR8:45815901 | 8 | 45815901 | 45816200 | ID_417877 | 300 | 2 | 9.64E-09 | 7 | 2.33333333 | |
| DMR8:45927501 | 8 | 45927501 | 45934300 | ID_417897 | 6800 | 2 | 3.41E-06 | 122 | 1.79411765 | |
| DMR8:46134001 | 8 | 46134001 | 46136400 | ID_417950 | 2400 | 1 | 0.000013 | 69 | 2.875 | |
| DMR8:46250301 | 8 | 46250301 | 46258500 | ID_417983 | 8200 | 1 | 2.59E-05 | 220 | 2.68292683 | |
| DMR8:47113201 | 8 | 47113201 | 47114400 | ID_418235 | 1200 | 1 | 6.79E-05 | 14 | 1.16666667 | RP11-1134I14.2 |
| DMR8:47118101 | 8 | 47118101 | 47118300 | ID_418237 | 200 | 1 | 4.06E-05 | 0 | 0 | RP11-1134I14.2 |
| DMR8:49612001 | 8 | 49612001 | 49614500 | ID_419006 | 2500 | 1 | 3.99E-05 | 16 | 0.64 | |
| DMR8:49615501 | 8 | 49615501 | 49615700 | ID_419007 | 200 | 1 | 8.63E-05 | 5 | 2.5 | |
| DMR8:51365501 | 8 | 51365501 | 51366000 | ID_419487 | 500 | 1 | 2.49E-05 | 3 | 0.6 | PXDNL |
| DMR8:52294901 | 8 | 52294901 | 52296200 | ID_419771 | 1300 | 1 | 1.37E-05 | 15 | 1.15384615 | RP11-1023P17.2;ST18 |
| DMR8:53945401 | 8 | 53945401 | 53945600 | ID_420272 | 200 | 1 | 8.71E-05 | 4 | 2 | RGS20 |
| DMR8:55112401 | 8 | 55112401 | 55112700 | ID_420622 | 300 | 1 | 8.09E-05 | 1 | 0.33333333 | XKR4 |
| DMR8:55935001 | 8 | 55935001 | 55935200 | ID_420873 | 200 | 1 | 8.07E-05 | 5 | 2.5 | LYN |
| DMR8:58879601 | 8 | 58879601 | 58880800 | ID_421764 | 1200 | 1 | 5.34E-05 | 7 | 0.58333333 | TOX |
| DMR8:60383901 | 8 | 60383901 | 60384800 | ID_422187 | 900 | 1 | 3.37E-05 | 16 | 1.77777778 | LINC01301 |
| DMR8:61450301 | 8 | 61450301 | 61450900 | ID_422524 | 600 | 1 | 2.75E-05 | 3 | 0.5 | CLVS1 |
| DMR8:62465401 | 8 | 62465401 | 62465600 | ID_422821 | 200 | 1 | 6.82E-06 | 2 | 1 | NKAIN3 |
| DMR8:62674201 | 8 | 62674201 | 62675200 | ID_422877 | 1000 | 1 | 4.86E-05 | 10 | 1 | NKAIN3 |
| DMR8:65165401 | 8 | 65165401 | 65166900 | ID_423569 | 1500 | 1 | 4.93E-05 | 30 | 2 | LINC00251 |
| DMR8:67317101 | 8 | 67317101 | 67320200 | ID_424211 | 3100 | 1 | 9.61E-05 | 41 | 1.32258065 | ARFGEF1 |
| DMR8:68742901 | 8 | 68742901 | 68743900 | ID_424620 | 1000 | 1 | 1.31E-05 | 25 | 2.5 | C8orf34 |
| DMR8:70468301 | 8 | 70468301 | 70468500 | ID_425143 | 200 | 1 | 5.87E-05 | 8 | 4 | |
| DMR8:70508901 | 8 | 70508901 | 70509000 | ID_425154 | 100 | 1 | 6.02E-05 | 0 | 0 | |
| DMR8:72451001 | 8 | 72451001 | 72452100 | ID_425707 | 1100 | 1 | 3.23E-05 | 6 | 0.54545455 | |
| DMR8:74566901 | 8 | 74566901 | 74568100 | ID_426360 | 1200 | 1 | 2.11E-05 | 13 | 1.08333333 | |
| DMR8:75579601 | 8 | 75579601 | 75580600 | ID_426632 | 1000 | 1 | 4.63E-06 | 5 | 0.5 | |
| DMR8:75890201 | 8 | 75890201 | 75890700 | ID_426700 | 500 | 1 | 0.000062 | 1 | 0.2 | |
| DMR8:78757301 | 8 | 78757301 | 78757400 | ID_427461 | 100 | 1 | 1.71E-05 | 2 | 2 | IL7 |
| DMR8:79850401 | 8 | 79850401 | 79850700 | ID_427798 | 300 | 1 | 0.000091 | 1 | 0.33333333 | RP11-26J3.1 |
| DMR8:81337201 | 8 | 81337201 | 81337400 | ID_428247 | 200 | 1 | 4.86E-05 | 7 | 3.5 | |
| DMR8:81444501 | 8 | 81444501 | 81447700 | ID_428275 | 3200 | 1 | 8.49E-05 | 33 | 1.03125 | PMP2;RP11-157I4.4 |
| DMR8:81911301 | 8 | 81911301 | 81911600 | ID_428419 | 300 | 1 | 4.97E-05 | 3 | 1 | RP11-354A14.1 |
| DMR8:82569201 | 8 | 82569201 | 82569800 | ID_428605 | 600 | 1 | 3.21E-05 | 2 | 0.33333333 | RP11-653B10.1 |
| DMR8:83484801 | 8 | 83484801 | 83485100 | ID_428827 | 300 | 1 | 0.000029 | 7 | 2.33333333 | |
| DMR8:84366401 | 8 | 84366401 | 84366600 | ID_429065 | 200 | 1 | 9.06E-05 | 4 | 2 | RALYL |
| DMR8:85554801 | 8 | 85554801 | 85555200 | ID_429382 | 400 | 1 | 6.63E-05 | 2 | 0.5 | |
| DMR8:85719601 | 8 | 85719601 | 85721300 | ID_429414 | 1700 | 1 | 9.73E-05 | 32 | 1.88235294 | |
| DMR8:89819101 | 8 | 89819101 | 89820800 | ID_430518 | 1700 | 1 | 7.38E-06 | 11 | 0.64705882 | |
| DMR8:91479401 | 8 | 91479401 | 91479700 | ID_430988 | 300 | 1 | 7.23E-05 | 6 | 2 | |
| DMR8:92459801 | 8 | 92459801 | 92460000 | ID_431276 | 200 | 1 | 9.05E-05 | 2 | 1 | |
| DMR8:92881401 | 8 | 92881401 | 92881900 | ID_431391 | 500 | 1 | 0.000088 | 3 | 0.6 | |
| DMR8:93555901 | 8 | 93555901 | 93558300 | ID_431593 | 2400 | 1 | 6.34E-05 | 33 | 1.375 | LINC00535 |
| DMR8:94448501 | 8 | 94448501 | 94449100 | ID_431848 | 600 | 1 | 9.93E-05 | 7 | 1.16666667 | RAD54B |
| DMR8:94884301 | 8 | 94884301 | 94884400 | ID_431977 | 100 | 1 | 5.79E-05 | 1 | 1 | CCNE2 |
| DMR8:94998601 | 8 | 94998601 | 95001400 | ID_432009 | 2800 | 1 | 5.41E-05 | 30 | 1.07142857 | NDUFAF6 |
| DMR8:95563101 | 8 | 95563101 | 95564700 | ID_432178 | 1600 | 1 | 8.04E-06 | 8 | 0.5 | C8orf37-AS1 |
| DMR8:97005801 | 8 | 97005801 | 97006500 | ID_432604 | 700 | 1 | 2.19E-05 | 7 | 1 | CPQ |
| DMR8:99694501 | 8 | 99694501 | 99697600 | ID_433414 | 3100 | 3 | 5.63E-06 | 68 | 2.19354839 | VPS13B;AC018442.1 |
| DMR8:100851201 | 8 | 100851201 | 100854100 | ID_433766 | 2900 | 1 | 9.63E-05 | 43 | 1.48275862 | |
| DMR8:101886901 | 8 | 101886901 | 101887100 | ID_434061 | 200 | 1 | 6.28E-05 | 1 | 0.5 | NCALD |
| DMR8:101929501 | 8 | 101929501 | 101929700 | ID_434077 | 200 | 1 | 9.07E-05 | 0 | 0 | NCALD |
| DMR8:103074501 | 8 | 103074501 | 103079700 | ID_434431 | 5200 | 1 | 1.59E-06 | 59 | 1.13461539 | |
| DMR8:105705301 | 8 | 105705301 | 105705700 | ID_435175 | 400 | 1 | 0.000048 | 1 | 0.25 | ZFPM2 |
| DMR8:107855801 | 8 | 107855801 | 107857700 | ID_435744 | 1900 | 1 | 9.85E-05 | 10 | 0.52631579 | |
| DMR8:109431301 | 8 | 109431301 | 109432200 | ID_436187 | 900 | 1 | 0.000032 | 7 | 0.77777778 | PKHD1L1 |
| DMR8:109804801 | 8 | 109804801 | 109804900 | ID_436277 | 100 | 1 | 5.41E-05 | 0 | 0 | |
| DMR8:110355401 | 8 | 110355401 | 110357300 | ID_436425 | 1900 | 1 | 8.11E-05 | 9 | 0.47368421 | |
| DMR8:111170401 | 8 | 111170401 | 111172000 | ID_436626 | 1600 | 1 | 6.33E-05 | 12 | 0.75 | LINC01609 |
| DMR8:113738801 | 8 | 113738801 | 113739200 | ID_437284 | 400 | 1 | 2.04E-05 | 4 | 1 | |
| DMR8:114901001 | 8 | 114901001 | 114901800 | ID_437584 | 800 | 1 | 1.26E-06 | 5 | 0.625 | |
| DMR8:115229501 | 8 | 115229501 | 115230700 | ID_437672 | 1200 | 1 | 3.71E-05 | 11 | 0.91666667 | |
| DMR8:115808201 | 8 | 115808201 | 115808400 | ID_437837 | 200 | 1 | 2.05E-05 | 2 | 1 | TRPS1 |
| DMR8:115874401 | 8 | 115874401 | 115875900 | ID_437854 | 1500 | 1 | 3.37E-05 | 11 | 0.73333333 | |
| DMR8:116487201 | 8 | 116487201 | 116488600 | ID_438029 | 1400 | 1 | 1.18E-06 | 6 | 0.42857143 | |
| DMR8:119880201 | 8 | 119880201 | 119880400 | ID_438994 | 200 | 1 | 0.000019 | 0 | 0 | DEPTOR |
| DMR8:120926601 | 8 | 120926601 | 120927800 | ID_439279 | 1200 | 1 | 9.82E-05 | 6 | 0.5 | RP11-369K17.1 |
| DMR8:123557601 | 8 | 123557601 | 123558800 | ID_440061 | 1200 | 1 | 0.000049 | 15 | 1.25 | |
| DMR8:126066401 | 8 | 126066401 | 126066900 | ID_440825 | 500 | 1 | 4.99E-05 | 6 | 1.2 | |
| DMR8:126213701 | 8 | 126213701 | 126214000 | ID_440870 | 300 | 2 | 1.09E-05 | 2 | 0.66666667 | |
| DMR8:127018401 | 8 | 127018401 | 127020900 | ID_441124 | 2500 | 1 | 8.16E-05 | 45 | 1.8 | PCAT1 |
| DMR8:127283601 | 8 | 127283601 | 127284600 | ID_441204 | 1000 | 1 | 3.65E-05 | 9 | 0.9 | |
| DMR8:128373201 | 8 | 128373201 | 128374900 | ID_441563 | 1700 | 1 | 8.33E-05 | 14 | 0.82352941 | |
| DMR8:128869601 | 8 | 128869601 | 128870400 | ID_441707 | 800 | 1 | 7.59E-05 | 12 | 1.5 | |
| DMR8:129064401 | 8 | 129064401 | 129065700 | ID_441770 | 1300 | 1 | 6.31E-05 | 14 | 1.07692308 | |
| DMR8:131069701 | 8 | 131069701 | 131071700 | ID_442394 | 2000 | 1 | 4.47E-05 | 12 | 0.6 | |
| DMR8:131389501 | 8 | 131389501 | 131392400 | ID_442477 | 2900 | 1 | 4.04E-05 | 28 | 0.96551724 | |
| DMR8:133947401 | 8 | 133947401 | 133947800 | ID_443290 | 400 | 1 | 6.99E-05 | 3 | 0.75 | |
| DMR8:135204501 | 8 | 135204501 | 135206600 | ID_443658 | 2100 | 1 | 7.22E-05 | 5 | 0.23809524 | |
| DMR8:135233801 | 8 | 135233801 | 135235500 | ID_443666 | 1700 | 1 | 1.35E-05 | 20 | 1.17647059 | LINC01591 |
| DMR8:136222001 | 8 | 136222001 | 136222200 | ID_443971 | 200 | 1 | 8.56E-05 | 2 | 1 | |
| DMR8:136730801 | 8 | 136730801 | 136733400 | ID_444111 | 2600 | 1 | 9.58E-05 | 17 | 0.65384615 | RP11-30J20.1 |
| DMR8:139107101 | 8 | 139107101 | 139107400 | ID_444834 | 300 | 1 | 0.000029 | 2 | 0.66666667 | |
| DMR8:140107301 | 8 | 140107301 | 140109600 | ID_445156 | 2300 | 1 | 3.92E-05 | 31 | 1.34782609 | TRAPPC9 |
| DMR8:141054801 | 8 | 141054801 | 141055100 | ID_445453 | 300 | 1 | 7.86E-06 | 8 | 2.66666667 | |
| DMR8:142459401 | 8 | 142459401 | 142462500 | ID_445911 | 3100 | 1 | 7.99E-05 | 74 | 2.38709677 | ADGRB1 |
| DMR8:142662201 | 8 | 142662201 | 142669700 | ID_445974 | 7500 | 1 | 2.07E-05 | 270 | 3.6 | JRK |
| DMR8:142938801 | 8 | 142938801 | 142940200 | ID_446060 | 1400 | 2 | 3.03E-05 | 55 | 3.92857143 | |
| DMR8:142968301 | 8 | 142968301 | 142969400 | ID_446068 | 1100 | 1 | 9.22E-05 | 24 | 2.18181818 | |
| DMR8:143468501 | 8 | 143468501 | 143469800 | ID_446223 | 1300 | 1 | 9.81E-05 | 34 | 2.61538462 | ZC3H3 |
| DMR8:144064301 | 8 | 144064301 | 144064700 | ID_446413 | 400 | 1 | 4.07E-06 | 6 | 1.5 | |
| DMR8:144307701 | 8 | 144307701 | 144308000 | ID_446490 | 300 | 1 | 8.45E-05 | 9 | 3 | HSF1 |
| DMR8:144492101 | 8 | 144492101 | 144492300 | ID_446541 | 200 | 1 | 7.11E-05 | 8 | 4 | PPP1R16A |
| DMR9:58401 | 9 | 58401 | 58800 | ID_446751 | 400 | 1 | 3.87E-05 | 4 | 1 | |
| DMR9:96501 | 9 | 96501 | 99200 | ID_446763 | 2700 | 1 | 6.86E-05 | 32 | 1.18518519 | |
| DMR9:1682001 | 9 | 1682001 | 1682900 | ID_447220 | 900 | 1 | 3.68E-05 | 6 | 0.66666667 | |
| DMR9:3786601 | 9 | 3786601 | 3786900 | ID_447862 | 300 | 1 | 4.49E-05 | 2 | 0.66666667 | |
| DMR9:4945101 | 9 | 4945101 | 4946100 | ID_448220 | 1000 | 1 | 6.44E-05 | 17 | 1.7 | HNRNPA1P41 |
| DMR9:6153401 | 9 | 6153401 | 6154000 | ID_448574 | 600 | 1 | 2.74E-05 | 5 | 0.83333333 | |
| DMR9:7260501 | 9 | 7260501 | 7261000 | ID_448923 | 500 | 1 | 5.34E-06 | 7 | 1.4 | |
| DMR9:8119901 | 9 | 8119901 | 8123200 | ID_449169 | 3300 | 1 | 6.54E-05 | 12 | 0.36363636 | |
| DMR9:8643701 | 9 | 8643701 | 8644900 | ID_449311 | 1200 | 1 | 1.81E-05 | 18 | 1.5 | PTPRD |
| DMR9:8740201 | 9 | 8740201 | 8741300 | ID_449335 | 1100 | 1 | 7.72E-05 | 8 | 0.72727273 | PTPRD |
| DMR9:10097701 | 9 | 10097701 | 10098700 | ID_449703 | 1000 | 1 | 3.68E-05 | 14 | 1.4 | PTPRD |
| DMR9:11076201 | 9 | 11076201 | 11076500 | ID_449966 | 300 | 1 | 3.63E-06 | 2 | 0.66666667 | |
| DMR9:13033401 | 9 | 13033401 | 13033600 | ID_450504 | 200 | 1 | 8.01E-05 | 1 | 0.5 | |
| DMR9:14463501 | 9 | 14463501 | 14463800 | ID_450937 | 300 | 1 | 5.03E-05 | 10 | 3.33333333 | |
| DMR9:14466901 | 9 | 14466901 | 14467000 | ID_450938 | 100 | 1 | 3.58E-05 | 0 | 0 | |
| DMR9:14588401 | 9 | 14588401 | 14588700 | ID_450972 | 300 | 1 | 5.72E-05 | 5 | 1.66666667 | |
| DMR9:15527601 | 9 | 15527601 | 15527800 | ID_451257 | 200 | 1 | 8.98E-05 | 20 | 10 | FTH1P12 |
| DMR9:16344101 | 9 | 16344101 | 16344300 | ID_451508 | 200 | 1 | 4.14E-05 | 1 | 0.5 | |
| DMR9:17116801 | 9 | 17116801 | 17116900 | ID_451747 | 100 | 1 | 7.62E-05 | 1 | 1 | |
| DMR9:18830301 | 9 | 18830301 | 18830600 | ID_452248 | 300 | 1 | 9.23E-05 | 1 | 0.33333333 | ADAMTSL1 |
| DMR9:19226101 | 9 | 19226101 | 19226200 | ID_452369 | 100 | 1 | 4.65E-05 | 4 | 4 | |
| DMR9:28333101 | 9 | 28333101 | 28334200 | ID_454986 | 1100 | 2 | 3.09E-06 | 8 | 0.72727273 | LINGO2 |
| DMR9:29449901 | 9 | 29449901 | 29453300 | ID_455270 | 3400 | 1 | 1.09E-05 | 63 | 1.85294118 | |
| DMR9:29578001 | 9 | 29578001 | 29578200 | ID_455306 | 200 | 1 | 9.53E-05 | 1 | 0.5 | |
| DMR9:30984701 | 9 | 30984701 | 30985600 | ID_455686 | 900 | 1 | 6.91E-05 | 5 | 0.55555556 | |
| DMR9:32269601 | 9 | 32269601 | 32269800 | ID_456037 | 200 | 1 | 2.72E-05 | 5 | 2.5 | |
| DMR9:32447801 | 9 | 32447801 | 32448800 | ID_456089 | 1000 | 1 | 7.13E-06 | 13 | 1.3 | ACO1 |
| DMR9:33322201 | 9 | 33322201 | 33325300 | ID_456346 | 3100 | 1 | 6.58E-05 | 38 | 1.22580645 | NFX1 |
| DMR9:33755101 | 9 | 33755101 | 33756000 | ID_456475 | 900 | 1 | 5.38E-05 | 13 | 1.44444444 | PRSS3 |
| DMR9:33759001 | 9 | 33759001 | 33759100 | ID_456477 | 100 | 1 | 1.72E-05 | 0 | 0 | PRSS3 |
| DMR9:33875801 | 9 | 33875801 | 33877200 | ID_456515 | 1400 | 1 | 5.64E-05 | 25 | 1.78571429 | UBE2R2 |
| DMR9:34987301 | 9 | 34987301 | 34988700 | ID_456876 | 1400 | 1 | 1.01E-05 | 21 | 1.5 | DNAJB5-AS1 |
| DMR9:37637601 | 9 | 37637601 | 37638700 | ID_457694 | 1100 | 1 | 6.77E-05 | 18 | 1.63636364 | RP11-613M10.9 |
| DMR9:38815301 | 9 | 38815301 | 38816900 | ID_458076 | 1600 | 1 | 0.000078 | 12 | 0.75 | RP11-402N8.1 |
| DMR9:38818301 | 9 | 38818301 | 38819700 | ID_458077 | 1400 | 1 | 5.35E-05 | 12 | 0.85714286 | RP11-402N8.1 |
| DMR9:39453001 | 9 | 39453001 | 39454500 | ID_458269 | 1500 | 1 | 7.6E-07 | 11 | 0.73333333 | ZNF658B |
| DMR9:40570001 | 9 | 40570001 | 40570800 | ID_458582 | 800 | 1 | 4.96E-05 | 7 | 0.875 | |
| DMR9:40951901 | 9 | 40951901 | 40952400 | ID_458681 | 500 | 2 | 4.31E-05 | 16 | 3.2 | |
| DMR9:41024201 | 9 | 41024201 | 41026900 | ID_458701 | 2700 | 1 | 9.99E-05 | 19 | 0.7037037 | FRG1HP;PGM5P2 |
| DMR9:41424201 | 9 | 41424201 | 41424800 | ID_458821 | 600 | 2 | 7.72E-07 | 5 | 0.83333333 | |
| DMR9:65194301 | 9 | 65194301 | 65194600 | ID_461019 | 300 | 1 | 1.77E-05 | 1 | 0.33333333 | |
| DMR9:65503501 | 9 | 65503501 | 65506500 | ID_461100 | 3000 | 1 | 4.41E-05 | 52 | 1.73333333 | |
| DMR9:67083501 | 9 | 67083501 | 67084000 | ID_461509 | 500 | 1 | 7.53E-05 | 8 | 1.6 | CNTNAP3P2 |
| DMR9:67209501 | 9 | 67209501 | 67209900 | ID_461548 | 400 | 1 | 7.24E-05 | 9 | 2.25 | CNTNAP3P2 |
| DMR9:67555301 | 9 | 67555301 | 67556600 | ID_461657 | 1300 | 1 | 3.02E-05 | 15 | 1.15384615 | |
| DMR9:67651701 | 9 | 67651701 | 67652000 | ID_461686 | 300 | 1 | 4.53E-05 | 3 | 1 | |
| DMR9:68564601 | 9 | 68564601 | 68566000 | ID_461863 | 1400 | 1 | 4.71E-06 | 21 | 1.5 | RP11-274B18.4 |
| DMR9:68608901 | 9 | 68608901 | 68611000 | ID_461877 | 2100 | 1 | 8.58E-06 | 40 | 1.90476191 | RP11-274B18.3;RP11- |
| | | | | | | | | | | 274B18.4 |
| DMR9:69832501 | 9 | 69832501 | 69832700 | ID_462253 | 200 | 1 | 9.29E-06 | 1 | 0.5 | C9orf135 |
| DMR9:71471501 | 9 | 71471501 | 71473000 | ID_462726 | 1500 | 1 | 9.36E-05 | 6 | 0.4 | |
| DMR9:71878701 | 9 | 71878701 | 71878800 | ID_462846 | 100 | 1 | 3.65E-05 | 0 | 0 | ABHD17B |
| DMR9:71943301 | 9 | 71943301 | 71944100 | ID_462865 | 800 | 1 | 4.62E-06 | 16 | 2 | C9orf85 |
| DMR9:72157301 | 9 | 72157301 | 72157800 | ID_462925 | 500 | 1 | 3.65E-05 | 2 | 0.4 | GDA |
| DMR9:76527101 | 9 | 76527101 | 76530000 | ID_464170 | 2900 | 1 | 3.99E-05 | 53 | 1.82758621 | |
| DMR9:77343501 | 9 | 77343501 | 77345200 | ID_464423 | 1700 | 1 | 2.88E-06 | 25 | 1.47058824 | VPS13A |
| DMR9:78142101 | 9 | 78142101 | 78142700 | ID_464668 | 600 | 1 | 8.74E-05 | 6 | 1 | |
| DMR9:81815201 | 9 | 81815201 | 81816800 | ID_465780 | 1600 | 1 | 4.02E-05 | 23 | 1.4375 | |
| DMR9:81851801 | 9 | 81851801 | 81852000 | ID_465792 | 200 | 1 | 8.66E-05 | 1 | 0.5 | |
| DMR9:82922801 | 9 | 82922801 | 82923800 | ID_466120 | 1000 | 1 | 9.29E-05 | 18 | 1.8 | |
| DMR9:83603501 | 9 | 83603501 | 83603700 | ID_466339 | 200 | 1 | 3.06E-05 | 2 | 1 | |
| DMR9:85456501 | 9 | 85456501 | 85457300 | ID_466920 | 800 | 1 | 8.05E-05 | 7 | 0.875 | |
| DMR9:86004001 | 9 | 86004001 | 86004500 | ID_467098 | 500 | 1 | 9.01E-06 | 9 | 1.8 | NAA35 |
| DMR9:86337701 | 9 | 86337701 | 86339800 | ID_467201 | 2100 | 1 | 9.71E-05 | 29 | 1.38095238 | ZCCHC6 |
| DMR9:88487501 | 9 | 88487501 | 88487700 | ID_467885 | 200 | 1 | 3.07E-05 | 2 | 1 | |
| DMR9:90299301 | 9 | 90299301 | 90300500 | ID_468439 | 1200 | 1 | 5.45E-05 | 11 | 0.91666667 | |
| DMR9:90928601 | 9 | 90928601 | 90929700 | ID_468645 | 1100 | 1 | 5.93E-05 | 14 | 1.27272727 | |
| DMR9:91036701 | 9 | 91036701 | 91038600 | ID_468683 | 1900 | 1 | 3.52E-05 | 58 | 3.05263158 | |
| DMR9:91531501 | 9 | 91531501 | 91531700 | ID_468832 | 200 | 1 | 8.09E-05 | 1 | 0.5 | |
| DMR9:91533501 | 9 | 91533501 | 91535100 | ID_468833 | 1600 | 1 | 8.71E-05 | 19 | 1.1875 | |
| DMR9:93033601 | 9 | 93033601 | 93038900 | ID_469307 | 5300 | 1 | 7.4E-06 | 106 | 2 | FGD3 |
| DMR9:94385601 | 9 | 94385601 | 94386400 | ID_469734 | 800 | 1 | 5.85E-05 | 5 | 0.625 | HIATL1 |
| DMR9:95044801 | 9 | 95044801 | 95045900 | ID_469958 | 1100 | 2 | 5.16E-07 | 50 | 4.54545455 | C9orf3 |
| DMR9:95329501 | 9 | 95329501 | 95329800 | ID_470052 | 300 | 1 | 5.98E-05 | 3 | 1 | |
| DMR9:97318301 | 9 | 97318301 | 97318900 | ID_470677 | 600 | 1 | 4.37E-05 | 7 | 1.16666667 | CCDC180;RP11-23J9.4 |
| DMR9:97415701 | 9 | 97415701 | 97416200 | ID_470707 | 500 | 1 | 1.75E-05 | 8 | 1.6 | TDRD7 |
| DMR9:98644001 | 9 | 98644001 | 98645100 | ID_471080 | 1100 | 2 | 1.78E-05 | 12 | 1.09090909 | GABBR2 |
| DMR9:100342901 | 9 | 100342901 | 100345400 | ID_471601 | 2500 | 1 | 5.42E-05 | 25 | 1 | TEX10 |
| DMR9:101392201 | 9 | 101392201 | 101392400 | ID_471909 | 200 | 1 | 0.000077 | 0 | 0 | MRPL50 |
| DMR9:101701301 | 9 | 101701301 | 101705500 | ID_472002 | 4200 | 1 | 8.08E-05 | 41 | 0.97619048 | GRIN3A |
| DMR9:102114401 | 9 | 102114401 | 102114600 | ID_472114 | 200 | 1 | 9.24E-05 | 2 | 1 | |
| DMR9:103293901 | 9 | 103293901 | 103294700 | ID_472438 | 800 | 1 | 7.97E-05 | 26 | 3.25 | LINC01492 |
| DMR9:103388501 | 9 | 103388501 | 103389400 | ID_472460 | 900 | 1 | 2.17E-05 | 5 | 0.55555556 | RP11-436F21.1 |
| DMR9:104478301 | 9 | 104478301 | 104481200 | ID_472771 | 2900 | 1 | 4.54E-05 | 20 | 0.68965517 | |
| DMR9:106089101 | 9 | 106089101 | 106089600 | ID_473235 | 500 | 1 | 7.85E-05 | 1 | 0.2 | |
| DMR9:108269101 | 9 | 108269101 | 108269300 | ID_473889 | 200 | 1 | 6.71E-05 | 0 | 0 | |
| DMR9:109932001 | 9 | 109932001 | 109932100 | ID_474405 | 100 | 1 | 3.92E-05 | 3 | 3 | PALM2;PALM2-AKAP2 |
| DMR9:110429601 | 9 | 110429601 | 110430200 | ID_474556 | 600 | 1 | 1.42E-05 | 3 | 0.5 | SVEP1 |
| DMR9:110884701 | 9 | 110884701 | 110885100 | ID_474697 | 400 | 1 | 1.11E-05 | 3 | 0.75 | LPAR1 |
| DMR9:112669701 | 9 | 112669701 | 112669900 | ID_475256 | 200 | 1 | 9.86E-05 | 1 | 0.5 | |
| DMR9:113072301 | 9 | 113072301 | 113072400 | ID_475375 | 100 | 1 | 8.67E-05 | 4 | 4 | |
| DMR9:119111301 | 9 | 119111301 | 119112100 | ID_477178 | 800 | 1 | 1.97E-07 | 8 | 1 | |
| DMR9:120046501 | 9 | 120046501 | 120046900 | ID_477456 | 400 | 1 | 7.98E-07 | 2 | 0.5 | |
| DMR9:120804701 | 9 | 120804701 | 120804900 | ID_477687 | 200 | 1 | 4.17E-05 | 3 | 1.5 | |
| DMR9:121293401 | 9 | 121293401 | 121297900 | ID_477829 | 4500 | 1 | 7.12E-06 | 54 | 1.2 | GSN |
| DMR9:124183301 | 9 | 124183301 | 124184300 | ID_478749 | 1000 | 1 | 0.000055 | 6 | 0.6 | |
| DMR9:124196801 | 9 | 124196801 | 124197200 | ID_478753 | 400 | 1 | 2.44E-05 | 2 | 0.5 | |
| DMR9:124629901 | 9 | 124629901 | 124630800 | ID_478893 | 900 | 1 | 5.33E-05 | 13 | 1.44444444 | NR6A1 |
| DMR9:125043701 | 9 | 125043701 | 125043800 | ID_479026 | 100 | 1 | 2.55E-05 | 2 | 2 | SCAI |
| DMR9:125269301 | 9 | 125269301 | 125271300 | ID_479094 | 2000 | 1 | 1.72E-06 | 26 | 1.3 | GAPVD1 |
| DMR9:125423801 | 9 | 125423801 | 125428100 | ID_479142 | 4300 | 1 | 2.42E-05 | 118 | 2.74418605 | |
| DMR9:125888501 | 9 | 125888501 | 125889000 | ID_479291 | 500 | 1 | 9.41E-05 | 2 | 0.4 | PBX3 |
| DMR9:126711601 | 9 | 126711601 | 126712700 | ID_479550 | 1100 | 1 | 2.11E-06 | 18 | 1.63636364 | |
| DMR9:127618501 | 9 | 127618501 | 127619700 | ID_479833 | 1200 | 1 | 4.83E-05 | 23 | 1.91666667 | STXBP1 |
| DMR9:128977801 | 9 | 128977801 | 128980100 | ID_480267 | 2300 | 1 | 3.27E-05 | 37 | 1.60869565 | NUP188 |
| DMR9:129774101 | 9 | 129774101 | 129775500 | ID_480525 | 1400 | 1 | 3.18E-05 | 24 | 1.71428571 | |
| DMR9:130049201 | 9 | 130049201 | 130050900 | ID_480614 | 1700 | 1 | 1.11E-05 | 21 | 1.23529412 | |
| DMR9:130390401 | 9 | 130390401 | 130391900 | ID_480720 | 1500 | 1 | 6.55E-05 | 55 | 3.66666667 | HMCN2 |
| DMR9:132527801 | 9 | 132527801 | 132528400 | ID_481426 | 600 | 1 | 1.65E-05 | 5 | 0.83333333 | CFAP77 |
| DMR9:133108901 | 9 | 133108901 | 133110300 | ID_481622 | 1400 | 1 | 1.17E-05 | 37 | 2.64285714 | RALGDS |
| DMR9:134891601 | 9 | 134891601 | 134891800 | ID_482186 | 200 | 1 | 9.37E-06 | 4 | 2 | |
| DMR9:135537701 | 9 | 135537701 | 135538400 | ID_482400 | 700 | 1 | 5.96E-05 | 8 | 1.14285714 | |
| DMR9:135592601 | 9 | 135592601 | 135593400 | ID_482421 | 800 | 1 | 9.44E-05 | 16 | 2 | |
| DMR9:138025801 | 9 | 138025801 | 138026000 | ID_483191 | 200 | 1 | 4.76E-05 | 3 | 1.5 | CACNA1B |
| DMR10:43901 | 10 | 43901 | 44200 | ID_483295 | 300 | 1 | 3.64E-05 | 0 | 0 | |
| DMR10:850801 | 10 | 850801 | 852600 | ID_483544 | 1800 | 1 | 8.32E-05 | 24 | 1.33333333 | LARP4B |
| DMR10:1197701 | 10 | 1197701 | 1200800 | ID_483651 | 3100 | 8 | 1.51E-09 | 70 | 2.25806452 | ADARB2 |
| DMR10:1207501 | 10 | 1207501 | 1208700 | ID_483653 | 1200 | 1 | 7.41E-05 | 20 | 1.66666667 | ADARB2 |
| DMR10:2176901 | 10 | 2176901 | 2178900 | ID_483962 | 2000 | 1 | 1.36E-05 | 36 | 1.8 | RP11-69C17.4 |
| DMR10:2317901 | 10 | 2317901 | 2319100 | ID_484008 | 1200 | 1 | 5.06E-05 | 26 | 2.16666667 | |
| DMR10:2391601 | 10 | 2391601 | 2392700 | ID_484028 | 1100 | 1 | 1.06E-05 | 9 | 0.81818182 | |
| DMR10:2755901 | 10 | 2755901 | 2756100 | ID_484135 | 200 | 1 | 2.48E-05 | 2 | 1 | |
| DMR10:5670001 | 10 | 5670001 | 5671100 | ID_485058 | 1100 | 1 | 8.19E-05 | 10 | 0.90909091 | |
| DMR10:8779901 | 10 | 8779901 | 8780100 | ID_486053 | 200 | 1 | 3.86E-06 | 0 | 0 | |
| DMR10:8902801 | 10 | 8902801 | 8903000 | ID_486086 | 200 | 1 | 2.63E-05 | 0 | 0 | RP11-428L9.1 |
| DMR10:9131501 | 10 | 9131501 | 9131800 | ID_486142 | 300 | 1 | 5.71E-05 | 2 | 0.66666667 | |
| DMR10:9502901 | 10 | 9502901 | 9504500 | ID_486249 | 1600 | 1 | 0.000013 | 15 | 0.9375 | |
| DMR10:10636601 | 10 | 10636601 | 10637800 | ID_486559 | 1200 | 1 | 0.000092 | 12 | 1 | |
| DMR10:10870201 | 10 | 10870201 | 10871900 | ID_486642 | 1700 | 1 | 2.43E-05 | 32 | 1.88235294 | |
| DMR10:11289801 | 10 | 11289801 | 11290000 | ID_486771 | 200 | 1 | 0.000079 | 1 | 0.5 | CELF2 |
| DMR10:11367201 | 10 | 11367201 | 11369300 | ID_486795 | 2100 | 1 | 8.86E-07 | 31 | 1.47619048 | |
| DMR10:11684401 | 10 | 11684401 | 11685800 | ID_486901 | 1400 | 1 | 1.23E-05 | 29 | 2.07142857 | |
| DMR10:13047601 | 10 | 13047601 | 13047700 | ID_487362 | 100 | 1 | 8.17E-05 | 2 | 2 | CCDC3 |
| DMR10:13678901 | 10 | 13678901 | 13680800 | ID_487564 | 1900 | 1 | 4.94E-05 | 35 | 1.84210526 | FRMD4A |
| DMR10:14980401 | 10 | 14980401 | 14982300 | ID_488002 | 1900 | 1 | 0.000068 | 55 | 2.89473684 | MEIG1 |
| DMR10:15012201 | 10 | 15012201 | 15013900 | ID_488011 | 1700 | 2 | 8.22E-05 | 42 | 2.47058824 | |
| DMR10:17110301 | 10 | 17110301 | 17110500 | ID_488665 | 200 | 1 | 5.97E-05 | 1 | 0.5 | CUBN |
| DMR10:20298201 | 10 | 20298201 | 20299900 | ID_489606 | 1700 | 1 | 8.03E-05 | 11 | 0.64705882 | |
| DMR10:20668501 | 10 | 20668501 | 20670300 | ID_489714 | 1800 | 1 | 4.99E-05 | 16 | 0.88888889 | |
| DMR10:20799701 | 10 | 20799701 | 20800000 | ID_489748 | 300 | 1 | 9.85E-05 | 8 | 2.66666667 | NEBL |
| DMR10:21315901 | 10 | 21315901 | 21316400 | ID_489917 | 500 | 1 | 1.22E-06 | 4 | 0.8 | |
| DMR10:22585201 | 10 | 22585201 | 22585500 | ID_490310 | 300 | 1 | 0.000016 | 4 | 1.33333333 | PIP4K2A |
| DMR10:23917301 | 10 | 23917301 | 23917900 | ID_490707 | 600 | 1 | 7.09E-05 | 4 | 0.66666667 | KIAA1217 |
| DMR10:24331001 | 10 | 24331001 | 24331500 | ID_490835 | 500 | 1 | 6.63E-05 | 4 | 0.8 | KIAA1217 |
| DMR10:24953001 | 10 | 24953001 | 24953200 | ID_491043 | 200 | 1 | 0.00005 | 8 | 4 | |
| DMR10:27066801 | 10 | 27066801 | 27067700 | ID_491693 | 900 | 1 | 7.75E-05 | 7 | 0.77777778 | ANKRD26 |
| DMR10:27408201 | 10 | 27408201 | 27409400 | ID_491805 | 1200 | 1 | 6.11E-05 | 5 | 0.41666667 | PTCHD3 |
| DMR10:28433001 | 10 | 28433001 | 28433600 | ID_492116 | 600 | 1 | 1.19E-05 | 4 | 0.66666667 | RP11-351M16.3 |
| DMR10:28748301 | 10 | 28748301 | 28749100 | ID_492213 | 800 | 1 | 5.15E-05 | 3 | 0.375 | |
| DMR10:30019301 | 10 | 30019301 | 30021000 | ID_492623 | 1700 | 1 | 1.5E-06 | 22 | 1.29411765 | KIAA1462 |
| DMR10:30370401 | 10 | 30370401 | 30371600 | ID_492728 | 1200 | 1 | 7.52E-05 | 5 | 0.41666667 | MTPAP;GOLGA2P6 |
| DMR10:30846501 | 10 | 30846501 | 30849400 | ID_492874 | 2900 | 2 | 6.76E-05 | 40 | 1.37931035 | ZNF438 |
| DMR10:31625801 | 10 | 31625801 | 31627500 | ID_493110 | 1700 | 1 | 6.66E-05 | 18 | 1.05882353 | |
| DMR10:32208801 | 10 | 32208801 | 32210900 | ID_493289 | 2100 | 1 | 5.53E-05 | 32 | 1.52380952 | |
| DMR10:32731701 | 10 | 32731701 | 32732100 | ID_493448 | 400 | 2 | 0.00003 | 14 | 3.5 | CCDC7 |
| DMR10:32769301 | 10 | 32769301 | 32769800 | ID_493459 | 500 | 1 | 3.09E-05 | 3 | 0.6 | CCDC7 |
| DMR10:33162801 | 10 | 33162801 | 33165500 | ID_493573 | 2700 | 1 | 2.37E-05 | 26 | 0.96296296 | |
| DMR10:34250301 | 10 | 34250301 | 34252300 | ID_493906 | 2000 | 1 | 8.83E-05 | 15 | 0.75 | PARD3 |
| DMR10:34937901 | 10 | 34937901 | 34938100 | ID_494102 | 200 | 1 | 6.65E-05 | 2 | 1 | |
| DMR10:35605401 | 10 | 35605401 | 35608300 | ID_494324 | 2900 | 1 | 5.82E-07 | 103 | 3.55172414 | GJD4;RP11-425A6.5 |
| DMR10:38492801 | 10 | 38492801 | 38499100 | ID_495213 | 6300 | 1 | 1.26E-05 | 139 | 2.20634921 | |
| DMR10:38799501 | 10 | 38799501 | 38812600 | ID_495281 | 13100 | 1 | 7.71E-05 | 329 | 2.51145038 | |
| DMR10:41431301 | 10 | 41431301 | 41431600 | ID_495811 | 300 | 1 | 8.23E-05 | 7 | 2.33333333 | |
| DMR10:41845001 | 10 | 41845001 | 41881500 | ID_495885 | 36500 | 1 | 3.66E-05 | 905 | 2.47945206 | |
| DMR10:41901201 | 10 | 41901201 | 41915700 | ID_495890 | 14500 | 1 | 4.53E-05 | 231 | 1.59310345 | |
| DMR10:44392901 | 10 | 44392901 | 44393900 | ID_496606 | 1000 | 1 | 8.89E-05 | 10 | 1 | |
| DMR10:45082301 | 10 | 45082301 | 45083600 | ID_496826 | 1300 | 1 | 1.55E-05 | 5 | 0.38461539 | RP11-285G1.15 |
| DMR10:45865301 | 10 | 45865301 | 45865900 | ID_497059 | 600 | 1 | 6.38E-06 | 46 | 7.66666667 | PARGP1 |
| DMR10:46310801 | 10 | 46310801 | 46311900 | ID_497204 | 1100 | 1 | 0.000065 | 19 | 1.72727273 | ANTXRL |
| DMR10:46519601 | 10 | 46519601 | 46521200 | ID_497266 | 1600 | 1 | 1.48E-05 | 18 | 1.125 | ANXA8L1 |
| DMR10:47681401 | 10 | 47681401 | 47682800 | ID_497624 | 1400 | 1 | 2.91E-05 | 18 | 1.28571429 | |
| DMR10:48516501 | 10 | 48516501 | 48517400 | ID_497849 | 900 | 1 | 9.78E-05 | 6 | 0.66666667 | ARHGAP22 |
| DMR10:49334301 | 10 | 49334301 | 49335800 | ID_498106 | 1500 | 1 | 1.79E-06 | 10 | 0.66666667 | |
| DMR10:50523401 | 10 | 50523401 | 50527800 | ID_498466 | 4400 | 1 | 0.000017 | 35 | 0.79545455 | SGMS1 |
| DMR10:50818801 | 10 | 50818801 | 50819900 | ID_498556 | 1100 | 1 | 2.69E-05 | 11 | 1 | A1CF |
| DMR10:51470301 | 10 | 51470301 | 51470600 | ID_498728 | 300 | 1 | 5.21E-05 | 2 | 0.66666667 | PRKG1 |
| DMR10:52359801 | 10 | 52359801 | 52360000 | ID_498964 | 200 | 1 | 0.000055 | 1 | 0.5 | |
| DMR10:55205701 | 10 | 55205701 | 55206100 | ID_499739 | 400 | 1 | 6.18E-05 | 9 | 2.25 | PCDH15 |
| DMR10:55563801 | 10 | 55563801 | 55563900 | ID_499823 | 100 | 1 | 5.44E-05 | 0 | 0 | RP11-168O22.1;PCDH15 |
| DMR10:56763001 | 10 | 56763001 | 56763500 | ID_500129 | 500 | 1 | 2.21E-05 | 4 | 0.8 | |
| DMR10:64560401 | 10 | 64560401 | 64560700 | ID_502405 | 300 | 1 | 9.81E-05 | 4 | 1.33333333 | |
| DMR10:64679401 | 10 | 64679401 | 64682300 | ID_502439 | 2900 | 1 | 1.62E-05 | 19 | 0.65517241 | |
| DMR10:65414201 | 10 | 65414201 | 65414400 | ID_502625 | 200 | 1 | 1.34E-05 | 1 | 0.5 | |
| DMR10:66031501 | 10 | 66031501 | 66031600 | ID_502792 | 100 | 1 | 2.95E-05 | 0 | 0 | CTNNA3 |
| DMR10:69565101 | 10 | 69565101 | 69566400 | ID_503842 | 1300 | 1 | 0.000092 | 5 | 0.38461539 | |
| DMR10:70066001 | 10 | 70066001 | 70066400 | ID_504019 | 400 | 1 | 1.66E-05 | 2 | 0.5 | H2AFY2 |
| DMR10:70907301 | 10 | 70907301 | 70908200 | ID_504284 | 900 | 1 | 6.73E-05 | 19 | 2.11111111 | |
| DMR10:73117601 | 10 | 73117601 | 73117900 | ID_504982 | 300 | 2 | 1.77E-05 | 1 | 0.33333333 | NUDT13 |
| DMR10:73473601 | 10 | 73473601 | 73473800 | ID_505087 | 200 | 1 | 3.61E-05 | 2 | 1 | PPP3CB |
| DMR10:74470801 | 10 | 74470801 | 74471000 | ID_505405 | 200 | 1 | 4.45E-05 | 0 | 0 | ADK |
| DMR10:75529401 | 10 | 75529401 | 75532100 | ID_505734 | 2700 | 1 | 0.000066 | 14 | 0.51851852 | C10orf11 |
| DMR10:76378001 | 10 | 76378001 | 76378900 | ID_506000 | 900 | 1 | 5.33E-05 | 3 | 0.33333333 | C10orf11 |
| DMR10:76974901 | 10 | 76974901 | 76975700 | ID_506181 | 800 | 1 | 5.45E-05 | 19 | 2.375 | KCNMA1-AS1;KCNMA1 |
| DMR10:78324101 | 10 | 78324101 | 78324900 | ID_506620 | 800 | 1 | 3.03E-05 | 1 | 0.125 | LINC00856;RP11-90J7.3 |
| DMR10:79143401 | 10 | 79143401 | 79146900 | ID_506873 | 3500 | 1 | 2.61E-06 | 57 | 1.62857143 | ZMIZ1 |
| DMR10:80723401 | 10 | 80723401 | 80723800 | ID_507374 | 400 | 1 | 1.64E-05 | 2 | 0.5 | |
| DMR10:82366501 | 10 | 82366501 | 82371800 | ID_507860 | 5300 | 1 | 1.38E-05 | 43 | 0.81132076 | NRG3 |
| DMR10:83964101 | 10 | 83964101 | 83964400 | ID_508311 | 300 | 1 | 0.00004 | 1 | 0.33333333 | |
| DMR10:84345901 | 10 | 84345901 | 84346200 | ID_508432 | 300 | 1 | 5.75E-05 | 7 | 2.33333333 | CCSER2 |
| DMR10:84777701 | 10 | 84777701 | 84778000 | ID_508569 | 300 | 1 | 5.71E-05 | 4 | 1.33333333 | |
| DMR10:86691601 | 10 | 86691601 | 86692700 | ID_509145 | 1100 | 1 | 1.41E-05 | 23 | 2.09090909 | LDB3 |
| DMR10:87482301 | 10 | 87482301 | 87484300 | ID_509411 | 2000 | 1 | 6.34E-05 | 39 | 1.95 | |
| DMR10:87825101 | 10 | 87825101 | 87825400 | ID_509506 | 300 | 1 | 4.86E-05 | 5 | 1.66666667 | CFL1P1;ATAD1 |
| DMR10:88089501 | 10 | 88089501 | 88090300 | ID_509577 | 800 | 1 | 1.62E-05 | 0 | 0 | |
| DMR10:90412601 | 10 | 90412601 | 90412800 | ID_510227 | 200 | 1 | 1.24E-05 | 0 | 0 | RP11-15K3.1 |
| DMR10:90990401 | 10 | 90990401 | 90990800 | ID_510423 | 400 | 2 | 8.86E-05 | 4 | 1 | |
| DMR10:91567801 | 10 | 91567801 | 91567900 | ID_510590 | 100 | 1 | 7.59E-05 | 1 | 1 | |
| DMR10:92218701 | 10 | 92218701 | 92218900 | ID_510797 | 200 | 1 | 1.76E-05 | 3 | 1.5 | CPEB3 |
| DMR10:93619501 | 10 | 93619501 | 93620500 | ID_511212 | 1000 | 1 | 7.28E-06 | 11 | 1.1 | PDE6C |
| DMR10:94091501 | 10 | 94091501 | 94092300 | ID_511361 | 800 | 1 | 7.35E-05 | 4 | 0.5 | PLCE1;PLCE1-AS2 |
| DMR10:95171001 | 10 | 95171001 | 95171700 | ID_511689 | 700 | 1 | 0.000057 | 4 | 0.57142857 | |
| DMR10:95770501 | 10 | 95770501 | 95772000 | ID_511874 | 1500 | 1 | 3.84E-06 | 5 | 0.33333333 | ENTPD1-AS1;ENTPD1 |
| DMR10:96629601 | 10 | 96629601 | 96630500 | ID_512138 | 900 | 1 | 0.00002 | 12 | 1.33333333 | PIK3AP1 |
| DMR10:96690901 | 10 | 96690901 | 96691600 | ID_512161 | 700 | 1 | 1.88E-06 | 7 | 1 | PIK3AP1 |
| DMR10:96753601 | 10 | 96753601 | 96753800 | ID_512182 | 200 | 1 | 2.55E-05 | 0 | 0 | |
| DMR10:97027901 | 10 | 97027901 | 97029300 | ID_512267 | 1400 | 1 | 2.04E-05 | 8 | 0.57142857 | SLIT1 |
| DMR10:97058801 | 10 | 97058801 | 97061800 | ID_512278 | 3000 | 1 | 0.000094 | 45 | 1.5 | SLIT1 |
| DMR10:97311601 | 10 | 97311601 | 97314000 | ID_512357 | 2400 | 1 | 8.5E-06 | 31 | 1.29166667 | |
| DMR10:98543401 | 10 | 98543401 | 98544800 | ID_512724 | 1400 | 1 | 7.46E-05 | 28 | 2 | HPSE2 |
| DMR10:100530701 | 10 | 100530701 | 100531500 | ID_513312 | 800 | 1 | 5.36E-05 | 7 | 0.875 | HIF1AN |
| DMR10:100659101 | 10 | 100659101 | 100659400 | ID_513348 | 300 | 1 | 2.16E-05 | 8 | 2.66666667 | |
| DMR10:100722901 | 10 | 100722901 | 100723100 | ID_513372 | 200 | 1 | 1.96E-05 | 0 | 0 | |
| DMR10:101009601 | 10 | 101009601 | 101009900 | ID_513464 | 300 | 1 | 1.53E-05 | 10 | 3.33333333 | PDZD7 |
| DMR10:101470201 | 10 | 101470201 | 101474200 | ID_513605 | 4000 | 1 | 4.07E-05 | 49 | 1.225 | BTRC |
| DMR10:101641701 | 10 | 101641701 | 101643900 | ID_513660 | 2200 | 1 | 6.07E-05 | 21 | 0.95454546 | FBXW4 |
| DMR10:101652901 | 10 | 101652901 | 101655800 | ID_513665 | 2900 | 1 | 8.35E-05 | 26 | 0.89655172 | FBXW4 |
| DMR10:102227201 | 10 | 102227201 | 102227500 | ID_513851 | 300 | 1 | 9.54E-06 | 7 | 2.33333333 | ELOVL3 |
| DMR10:103799501 | 10 | 103799501 | 103801800 | ID_514354 | 2300 | 1 | 4.04E-06 | 19 | 0.82608696 | SH3PXD2A |
| DMR10:104181501 | 10 | 104181501 | 104182900 | ID_514471 | 1400 | 1 | 4.95E-05 | 10 | 0.71428571 | CFAP43 |
| DMR10:104536501 | 10 | 104536501 | 104539500 | ID_514587 | 3000 | 1 | 8.57E-05 | 22 | 0.73333333 | |
| DMR10:106738101 | 10 | 106738101 | 106739000 | ID_515252 | 900 | 1 | 2.53E-06 | 8 | 0.88888889 | SORCS1 |
| DMR10:106830101 | 10 | 106830101 | 106832200 | ID_515285 | 2100 | 1 | 2.31E-05 | 23 | 1.0952381 | SORCS1 |
| DMR10:107123001 | 10 | 107123001 | 107124200 | ID_515377 | 1200 | 1 | 6.82E-05 | 13 | 1.08333333 | SORCS1 |
| DMR10:107919501 | 10 | 107919501 | 107921000 | ID_515608 | 1500 | 1 | 5.56E-06 | 18 | 1.2 | LINC01435 |
| DMR10:108783201 | 10 | 108783201 | 108785800 | ID_515852 | 2600 | 1 | 4.83E-06 | 18 | 0.69230769 | RP11-655H13.2 |
| DMR10:111441401 | 10 | 111441401 | 111443000 | ID_516663 | 1600 | 1 | 1.73E-05 | 7 | 0.4375 | |
| DMR10:111549501 | 10 | 111549501 | 111549700 | ID_516694 | 200 | 1 | 4.72E-05 | 2 | 1 | |
| DMR10:112485201 | 10 | 112485201 | 112485600 | ID_516975 | 400 | 1 | 1.45E-05 | 7 | 1.75 | VTI1A |
| DMR10:114685501 | 10 | 114685501 | 114685700 | ID_517667 | 200 | 1 | 3.68E-05 | 4 | 2 | |
| DMR10:117511001 | 10 | 117511001 | 117512200 | ID_518504 | 1200 | 1 | 9.35E-05 | 17 | 1.41666667 | EMX2OS |
| DMR10:118483601 | 10 | 118483601 | 118483800 | ID_518798 | 200 | 1 | 2.28E-05 | 5 | 2.5 | |
| DMR10:118656701 | 10 | 118656701 | 118658700 | ID_518852 | 2000 | 1 | 8.08E-05 | 14 | 0.7 | |
| DMR10:118903901 | 10 | 118903901 | 118905000 | ID_518933 | 1100 | 1 | 2.45E-05 | 16 | 1.45454546 | |
| DMR10:118996201 | 10 | 118996201 | 118998000 | ID_518963 | 1800 | 1 | 1.36E-05 | 17 | 0.94444444 | |
| DMR10:120591001 | 10 | 120591001 | 120592100 | ID_519442 | 1100 | 1 | 6.96E-05 | 6 | 0.54545455 | |
| DMR10:120790201 | 10 | 120790201 | 120791600 | ID_519510 | 1400 | 1 | 9.44E-05 | 10 | 0.71428571 | WDR11-AS1 |
| DMR10:122535701 | 10 | 122535701 | 122536100 | ID_520052 | 400 | 1 | 6.09E-05 | 7 | 1.75 | |
| DMR10:122643201 | 10 | 122643201 | 122646400 | ID_520087 | 3200 | 1 | 0.000066 | 57 | 1.78125 | DMBT1 |
| DMR10:123635801 | 10 | 123635801 | 123636900 | ID_520406 | 1100 | 1 | 1.66E-05 | 4 | 0.36363636 | |
| DMR10:123691901 | 10 | 123691901 | 123692700 | ID_520424 | 800 | 2 | 1.57E-05 | 4 | 0.5 | GPR26 |
| DMR10:125554501 | 10 | 125554501 | 125556600 | ID_521025 | 2100 | 1 | 3.96E-05 | 42 | 2 | |
| DMR10:127261501 | 10 | 127261501 | 127262800 | ID_521573 | 1300 | 1 | 3.81E-05 | 19 | 1.46153846 | DOCK1 |
| DMR10:127538001 | 10 | 127538001 | 127539800 | ID_521659 | 1800 | 2 | 2.69E-05 | 28 | 1.55555556 | |
| DMR10:128384101 | 10 | 128384101 | 128385900 | ID_521920 | 1800 | 1 | 9.03E-05 | 51 | 2.83333333 | |
| DMR10:128632101 | 10 | 128632101 | 128633600 | ID_521994 | 1500 | 1 | 3.27E-05 | 23 | 1.53333333 | |
| DMR10:128800001 | 10 | 128800001 | 128800700 | ID_522047 | 700 | 1 | 4.37E-05 | 4 | 0.57142857 | |
| DMR10:129343401 | 10 | 129343401 | 129345500 | ID_522222 | 2100 | 3 | 6.38E-06 | 49 | 2.33333333 | |
| DMR10:129801001 | 10 | 129801001 | 129802900 | ID_522372 | 1900 | 1 | 0.000076 | 33 | 1.73684211 | |
| DMR10:130440901 | 10 | 130440901 | 130442000 | ID_522586 | 1100 | 2 | 0.000021 | 29 | 2.63636364 | RP11-540N6.1 |
| DMR10:130671501 | 10 | 130671501 | 130671800 | ID_522671 | 300 | 1 | 4.69E-05 | 3 | 1 | |
| DMR10:131339001 | 10 | 131339001 | 131340000 | ID_522900 | 1000 | 1 | 9.32E-05 | 6 | 0.6 | |
| DMR10:131406801 | 10 | 131406801 | 131408200 | ID_522920 | 1400 | 1 | 2.17E-05 | 28 | 2 | |
| DMR10:132849101 | 10 | 132849101 | 132850600 | ID_523369 | 1500 | 1 | 1.55E-06 | 54 | 3.6 | CFAP46 |
| DMR10:133029701 | 10 | 133029701 | 133033700 | ID_523426 | 4000 | 1 | 3.78E-05 | 165 | 4.125 | |
| DMR10:133111701 | 10 | 133111701 | 133111900 | ID_523444 | 200 | 1 | 9.39E-05 | 4 | 2 | ADGRA1 |
| DMR11:484301 | 11 | 484301 | 488600 | ID_523761 | 4300 | 2 | 2.1E-06 | 312 | 7.25581395 | PTDSS2 |
| DMR11:549601 | 11 | 549601 | 554100 | ID_523778 | 4500 | 1 | 0.000081 | 124 | 2.75555556 | LRRC56 |
| DMR11:672601 | 11 | 672601 | 677600 | ID_523813 | 5000 | 1 | 9.71E-05 | 131 | 2.62 | RP11-754B17.1;DEAF1 |
| DMR11:5467601 | 11 | 5467601 | 5467900 | ID_525319 | 300 | 1 | 1.96E-05 | 2 | 0.66666667 | AC104389.28;HBG2;HBE1 |
| DMR11:5491301 | 11 | 5491301 | 5491700 | ID_525327 | 400 | 1 | 5.56E-06 | 2 | 0.5 | AC104389.28;HBG2;HBE1 |
| DMR11:5859201 | 11 | 5859201 | 5859400 | ID_525434 | 200 | 1 | 8.77E-06 | 2 | 1 | TRIM5 |
| DMR11:7666401 | 11 | 7666401 | 7666600 | ID_525982 | 200 | 1 | 7.21E-05 | 1 | 0.5 | CYB5R2 |
| DMR11:9284901 | 11 | 9284901 | 9286500 | ID_526462 | 1600 | 1 | 8.92E-05 | 27 | 1.6875 | TMEM41B |
| DMR11:9925701 | 11 | 9925701 | 9927100 | ID_526663 | 1400 | 1 | 5.24E-05 | 8 | 0.57142857 | SBF2;RP11-1H15.2 |
| DMR11:10555801 | 11 | 10555801 | 10556000 | ID_526839 | 200 | 1 | 6.94E-05 | 1 | 0.5 | MRVI1-AS1 |
| DMR11:11425301 | 11 | 11425301 | 11425500 | ID_527138 | 200 | 1 | 6.17E-05 | 0 | 0 | GALNT18 |
| DMR11:11639401 | 11 | 11639401 | 11640700 | ID_527210 | 1300 | 1 | 8.08E-05 | 5 | 0.38461539 | |
| DMR11:12792001 | 11 | 12792001 | 12792600 | ID_527567 | 600 | 1 | 4.37E-05 | 2 | 0.33333333 | TEAD1 |
| DMR11:14857001 | 11 | 14857001 | 14858500 | ID_528206 | 1500 | 1 | 3.46E-05 | 5 | 0.33333333 | PDE3B |
| DMR11:15339601 | 11 | 15339601 | 15339900 | ID_528344 | 300 | 1 | 7.3E-06 | 14 | 4.66666667 | |
| DMR11:16894101 | 11 | 16894101 | 16895500 | ID_528781 | 1400 | 1 | 2.16E-05 | 12 | 0.85714286 | PLEKHA7 |
| DMR11:17140601 | 11 | 17140601 | 17144000 | ID_528859 | 3400 | 1 | 3.74E-06 | 20 | 0.58823529 | PIK3C2A |
| DMR11:17608001 | 11 | 17608001 | 17608800 | ID_529010 | 800 | 1 | 4.38E-05 | 16 | 2 | OTOG |
| DMR11:17728901 | 11 | 17728901 | 17729100 | ID_529055 | 200 | 1 | 5.03E-05 | 2 | 1 | |
| DMR11:18914801 | 11 | 18914801 | 18915200 | ID_529425 | 400 | 1 | 6.11E-05 | 6 | 1.5 | |
| DMR11:19546901 | 11 | 19546901 | 19549100 | ID_529617 | 2200 | 1 | 6.68E-05 | 25 | 1.13636364 | NAV2 |
| DMR11:20031101 | 11 | 20031101 | 20031300 | ID_529762 | 200 | 1 | 6.63E-05 | 3 | 1.5 | NAV2 |
| DMR11:20358601 | 11 | 20358601 | 20359100 | ID_529864 | 500 | 1 | 7.68E-05 | 2 | 0.4 | |
| DMR11:21067701 | 11 | 21067701 | 21068800 | ID_530070 | 1100 | 1 | 5.36E-06 | 13 | 1.18181818 | NELL1 |
| DMR11:24396701 | 11 | 24396701 | 24399200 | ID_530949 | 2500 | 1 | 5.12E-06 | 14 | 0.56 | |
| DMR11:24547501 | 11 | 24547501 | 24548500 | ID_530988 | 1000 | 1 | 1.02E-05 | 3 | 0.3 | LUZP2 |
| DMR11:24597001 | 11 | 24597001 | 24597200 | ID_531000 | 200 | 1 | 5.74E-05 | 1 | 0.5 | LUZP2 |
| DMR11:25712201 | 11 | 25712201 | 25712600 | ID_531303 | 400 | 1 | 9.26E-05 | 8 | 2 | |
| DMR11:28320301 | 11 | 28320301 | 28322000 | ID_532041 | 1700 | 1 | 7.26E-05 | 10 | 0.58823529 | METTL15 |
| DMR11:34511801 | 11 | 34511801 | 34513900 | ID_533858 | 2100 | 1 | 0.00003 | 49 | 2.33333333 | ELF5 |
| DMR11:34543101 | 11 | 34543101 | 34543400 | ID_533868 | 300 | 1 | 2.48E-06 | 3 | 1 | RP4-594L9.2 |
| DMR11:36349201 | 11 | 36349201 | 36350200 | ID_534421 | 1000 | 1 | 2.14E-05 | 11 | 1.1 | PRR5L |
| DMR11:40158001 | 11 | 40158001 | 40159200 | ID_535456 | 1200 | 1 | 2.97E-05 | 5 | 0.41666667 | LRRC4C |
| DMR11:41300401 | 11 | 41300401 | 41300600 | ID_535784 | 200 | 1 | 5.27E-05 | 2 | 1 | LRRC4C |
| DMR11:44438501 | 11 | 44438501 | 44439600 | ID_536721 | 1100 | 1 | 4.77E-05 | 10 | 0.90909091 | |
| DMR11:45872101 | 11 | 45872101 | 45872400 | ID_537200 | 300 | 1 | 6.38E-06 | 6 | 2 | CRY2 |
| DMR11:47036401 | 11 | 47036401 | 47038100 | ID_537569 | 1700 | 2 | 8.45E-06 | 33 | 1.94117647 | C11orf49 |
| DMR11:58138001 | 11 | 58138001 | 58138300 | ID_540070 | 300 | 1 | 4.55E-06 | 4 | 1.33333333 | OR9Q1 |
| DMR11:59340401 | 11 | 59340401 | 59342300 | ID_540434 | 1900 | 1 | 5.86E-06 | 7 | 0.36842105 | |
| DMR11:59599901 | 11 | 59599901 | 59604000 | ID_540513 | 4100 | 1 | 4.25E-05 | 34 | 0.82926829 | OSBP |
| DMR11:60060401 | 11 | 60060401 | 60060700 | ID_540637 | 300 | 1 | 1.06E-05 | 3 | 1 | MS4A3 |
| DMR11:60537901 | 11 | 60537901 | 60538200 | ID_540770 | 300 | 1 | 5.06E-05 | 6 | 2 | MS4A13 |
| DMR11:63744201 | 11 | 63744201 | 63749200 | ID_541807 | 5000 | 1 | 3.51E-05 | 71 | 1.42 | RTN3 |
| DMR11:64183601 | 11 | 64183601 | 64183900 | ID_541949 | 300 | 1 | 1.37E-07 | 2 | 0.66666667 | |
| DMR11:64260101 | 11 | 64260101 | 64261200 | ID_541973 | 1100 | 1 | 7.95E-05 | 14 | 1.27272727 | PLCB3 |
| DMR11:64619901 | 11 | 64619901 | 64624500 | ID_542095 | 4600 | 1 | 3.74E-05 | 66 | 1.43478261 | NRXN2 |
| DMR11:65078701 | 11 | 65078701 | 65079600 | ID_542253 | 900 | 1 | 6.54E-05 | 18 | 2 | CDCA5 |
| DMR11:65634501 | 11 | 65634501 | 65636500 | ID_542430 | 2000 | 1 | 9.52E-06 | 82 | 4.1 | SIPA1;MIR4690;PCNXL3 |
| DMR11:68373101 | 11 | 68373101 | 68374900 | ID_543291 | 1800 | 1 | 5.24E-05 | 68 | 3.77777778 | LRP5 |
| DMR11:70208901 | 11 | 70208901 | 70209100 | ID_543877 | 200 | 1 | 9.05E-05 | 2 | 1 | |
| DMR11:70342801 | 11 | 70342801 | 70343600 | ID_543922 | 800 | 1 | 1.11E-05 | 13 | 1.625 | PPFIA1;AP000487.6 |
| DMR11:70855301 | 11 | 70855301 | 70855700 | ID_544102 | 400 | 1 | 1.96E-06 | 1 | 0.25 | SHANK2 |
| DMR11:73287801 | 11 | 73287801 | 73288100 | ID_544879 | 300 | 1 | 2.43E-05 | 6 | 2 | P2RY6 |
| DMR11:73328001 | 11 | 73328001 | 73329300 | ID_544894 | 1300 | 1 | 0.000066 | 11 | 0.84615385 | ARHGEF17 |
| DMR11:73773301 | 11 | 73773301 | 73773800 | ID_545042 | 500 | 1 | 9.94E-05 | 4 | 0.8 | |
| DMR11:74559301 | 11 | 74559301 | 74560100 | ID_545291 | 800 | 1 | 6.98E-05 | 6 | 0.75 | POLD3 |
| DMR11:75717601 | 11 | 75717601 | 75719500 | ID_545654 | 1900 | 1 | 8.27E-06 | 21 | 1.10526316 | MOGAT2 |
| DMR11:76106801 | 11 | 76106801 | 76108000 | ID_545777 | 1200 | 1 | 7.93E-05 | 8 | 0.66666667 | UVRAG |
| DMR11:76141601 | 11 | 76141601 | 76142700 | ID_545789 | 1100 | 1 | 9.07E-05 | 18 | 1.63636364 | UVRAG |
| DMR11:77774701 | 11 | 77774701 | 77775800 | ID_546288 | 1100 | 1 | 5.71E-05 | 19 | 1.72727273 | RSF1 |
| DMR11:78411001 | 11 | 78411001 | 78412600 | ID_546491 | 1600 | 1 | 9.53E-05 | 18 | 1.125 | RP11-452H21.1;GAB2 |
| DMR11:80189701 | 11 | 80189701 | 80190100 | ID_547028 | 400 | 1 | 3.47E-06 | 3 | 0.75 | |
| DMR11:80439801 | 11 | 80439801 | 80441100 | ID_547104 | 1300 | 1 | 4.28E-05 | 8 | 0.61538462 | |
| DMR11:82230901 | 11 | 82230901 | 82231200 | ID_547611 | 300 | 1 | 6.88E-05 | 0 | 0 | MIR4300HG |
| DMR11:82978801 | 11 | 82978801 | 82980500 | ID_547842 | 1700 | 1 | 0.000051 | 5 | 0.29411765 | RP11-659G9.3;RAB30 |
| DMR11:83213501 | 11 | 83213501 | 83214700 | ID_547922 | 1200 | 1 | 6.07E-06 | 17 | 1.41666667 | ANKRD42 |
| DMR11:83850301 | 11 | 83850301 | 83850900 | ID_548115 | 600 | 1 | 8.52E-05 | 7 | 1.16666667 | DLG2 |
| DMR11:84393101 | 11 | 84393101 | 84393900 | ID_548278 | 800 | 1 | 6.85E-05 | 3 | 0.375 | DLG2 |
| DMR11:85194301 | 11 | 85194301 | 85195700 | ID_548496 | 1400 | 1 | 3.86E-05 | 16 | 1.14285714 | DLG2 |
| DMR11:85622001 | 11 | 85622001 | 85623200 | ID_548613 | 1200 | 1 | 4.06E-05 | 16 | 1.33333333 | DLG2 |
| DMR11:85992901 | 11 | 85992901 | 85993100 | ID_548724 | 200 | 1 | 1.01E-06 | 2 | 1 | PICALM |
| DMR11:86317801 | 11 | 86317801 | 86318600 | ID_548829 | 800 | 1 | 7.17E-05 | 18 | 2.25 | C11orf73 |
| DMR11:86739801 | 11 | 86739801 | 86740100 | ID_548963 | 300 | 1 | 3.41E-05 | 0 | 0 | CTD-2005H7.2 |
| DMR11:87847301 | 11 | 87847301 | 87847800 | ID_549284 | 500 | 1 | 1.75E-05 | 3 | 0.6 | |
| DMR11:89965801 | 11 | 89965801 | 89968100 | ID_549881 | 2300 | 1 | 5.12E-07 | 34 | 1.47826087 | |
| DMR11:91603401 | 11 | 91603401 | 91603700 | ID_550310 | 300 | 1 | 5.05E-05 | 0 | 0 | |
| DMR11:93484701 | 11 | 93484701 | 93485600 | ID_550832 | 900 | 1 | 9.64E-06 | 5 | 0.55555556 | SMCO4 |
| DMR11:93653001 | 11 | 93653001 | 93654600 | ID_550890 | 1600 | 1 | 0.000088 | 13 | 0.8125 | |
| DMR11:93813901 | 11 | 93813901 | 93815200 | ID_550936 | 1300 | 1 | 2.67E-06 | 10 | 0.76923077 | MED17 |
| DMR11:94020901 | 11 | 94020901 | 94021400 | ID_550998 | 500 | 1 | 1.48E-06 | 9 | 1.8 | HEPHL1 |
| DMR11:94380201 | 11 | 94380201 | 94382500 | ID_551118 | 2300 | 1 | 7.87E-06 | 23 | 1 | GPR83 |
| DMR11:94732301 | 11 | 94732301 | 94733000 | ID_551226 | 700 | 1 | 8.16E-06 | 7 | 1 | AMOTL1;RP11-867G2.8 |
| DMR11:95437501 | 11 | 95437501 | 95437900 | ID_551444 | 400 | 2 | 1.72E-05 | 8 | 2 | |
| DMR11:95758701 | 11 | 95758701 | 95760400 | ID_551542 | 1700 | 1 | 8.46E-05 | 19 | 1.11764706 | |
| DMR11:95923201 | 11 | 95923201 | 95924500 | ID_551595 | 1300 | 1 | 1.12E-06 | 58 | 4.46153846 | MTMR2 |
| DMR11:96240601 | 11 | 96240601 | 96244100 | ID_551693 | 3500 | 1 | 5.57E-05 | 51 | 1.45714286 | MAML2 |
| DMR11:97586801 | 11 | 97586801 | 97589200 | ID_552063 | 2400 | 1 | 0.000055 | 17 | 0.70833333 | |
| DMR11:97891401 | 11 | 97891401 | 97891600 | ID_552143 | 200 | 1 | 9.73E-05 | 0 | 0 | RP11-379J13.2 |
| DMR11:98212801 | 11 | 98212801 | 98213000 | ID_552244 | 200 | 1 | 9.87E-05 | 2 | 1 | |
| DMR11:99012801 | 11 | 99012801 | 99013500 | ID_552467 | 700 | 1 | 0.000095 | 15 | 2.14285714 | |
| DMR11:100435201 | 11 | 100435201 | 100435300 | ID_552867 | 100 | 1 | 8.96E-05 | 3 | 3 | |
| DMR11:100874201 | 11 | 100874201 | 100875500 | ID_552995 | 1300 | 1 | 5.26E-06 | 11 | 0.84615385 | ARHGAP42 |
| DMR11:101912601 | 11 | 101912601 | 101913500 | ID_553314 | 900 | 1 | 0.000068 | 4 | 0.44444444 | ANGPTL5 |
| DMR11:103967301 | 11 | 103967301 | 103967800 | ID_553947 | 500 | 1 | 1.16E-05 | 2 | 0.4 | PDGFD |
| DMR11:104217601 | 11 | 104217601 | 104219200 | ID_554017 | 1600 | 1 | 5.33E-05 | 9 | 0.5625 | |
| DMR11:104945201 | 11 | 104945201 | 104945900 | ID_554199 | 700 | 1 | 7.43E-05 | 6 | 0.85714286 | CASP4 |
| DMR11:105000501 | 11 | 105000501 | 105000800 | ID_554217 | 300 | 1 | 9.69E-05 | 4 | 1.33333333 | CASP5 |
| DMR11:105219101 | 11 | 105219101 | 105220000 | ID_554284 | 900 | 1 | 7.16E-05 | 17 | 1.88888889 | RP11-94P11.4 |
| DMR11:106611401 | 11 | 106611401 | 106612700 | ID_554667 | 1300 | 1 | 3.37E-06 | 3 | 0.23076923 | |
| DMR11:107177601 | 11 | 107177601 | 107177800 | ID_554831 | 200 | 1 | 3.36E-05 | 6 | 3 | |
| DMR11:108248801 | 11 | 108248801 | 108249000 | ID_555165 | 200 | 1 | 8.25E-07 | 3 | 1.5 | ATM |
| DMR11:109294401 | 11 | 109294401 | 109294800 | ID_555469 | 400 | 1 | 7.59E-06 | 2 | 0.5 | |
| DMR11:110835201 | 11 | 110835201 | 110836600 | ID_555928 | 1400 | 1 | 1.39E-05 | 9 | 0.64285714 | |
| DMR11:111622001 | 11 | 111622001 | 111622200 | ID_556164 | 200 | 1 | 9.66E-05 | 0 | 0 | SIK2 |
| DMR11:111888401 | 11 | 111888401 | 111888600 | ID_556253 | 200 | 1 | 4.98E-05 | 1 | 0.5 | |
| DMR11:112729201 | 11 | 112729201 | 112729500 | ID_556524 | 300 | 1 | 3.44E-05 | 1 | 0.33333333 | |
| DMR11:113687701 | 11 | 113687701 | 113688100 | ID_556809 | 400 | 1 | 2.77E-06 | 1 | 0.25 | TMPRSS5 |
| DMR11:114469001 | 11 | 114469001 | 114469600 | ID_557058 | 600 | 1 | 7.92E-05 | 17 | 2.83333333 | |
| DMR11:115581301 | 11 | 115581301 | 115582200 | ID_557421 | 900 | 1 | 1.36E-05 | 15 | 1.66666667 | |
| DMR11:116719701 | 11 | 116719701 | 116721300 | ID_557774 | 1600 | 1 | 4.87E-05 | 25 | 1.5625 | |
| DMR11:118775501 | 11 | 118775501 | 118779000 | ID_558415 | 3500 | 1 | 4.68E-05 | 29 | 0.82857143 | DDX6 |
| DMR11:119147701 | 11 | 119147701 | 119149000 | ID_558536 | 1300 | 1 | 3.33E-05 | 25 | 1.92307692 | |
| DMR11:119711001 | 11 | 119711001 | 119711300 | ID_558705 | 300 | 1 | 0.000037 | 4 | 1.33333333 | PVRL1;CTD-2523D13.1 |
| DMR11:120393001 | 11 | 120393001 | 120393600 | ID_558927 | 600 | 1 | 8.28E-05 | 4 | 0.66666667 | ARHGEF12 |
| DMR11:122497301 | 11 | 122497301 | 122497500 | ID_559587 | 200 | 1 | 5.41E-05 | 2 | 1 | |
| DMR11:122501601 | 11 | 122501601 | 122502600 | ID_559588 | 1000 | 1 | 4.82E-05 | 21 | 2.1 | |
| DMR11:123946701 | 11 | 123946701 | 123946900 | ID_560043 | 200 | 1 | 4.12E-05 | 4 | 2 | |
| DMR11:125660201 | 11 | 125660201 | 125661300 | ID_560562 | 1100 | 1 | 3.39E-07 | 11 | 1 | CHEK1 |
| DMR11:125870401 | 11 | 125870401 | 125872100 | ID_560627 | 1700 | 1 | 4.01E-05 | 36 | 2.11764706 | |
| DMR11:126050401 | 11 | 126050401 | 126050600 | ID_560678 | 200 | 1 | 2.01E-05 | 1 | 0.5 | CDON |
| DMR11:127916301 | 11 | 127916301 | 127916600 | ID_561260 | 300 | 1 | 0.000055 | 4 | 1.33333333 | |
| DMR11:129145601 | 11 | 129145601 | 129145900 | ID_561636 | 300 | 1 | 3.66E-05 | 4 | 1.33333333 | ARHGAP32 |
| DMR11:130080901 | 11 | 130080901 | 130084400 | ID_561943 | 3500 | 1 | 1.97E-05 | 47 | 1.34285714 | APLP2;RPL34P21 |
| DMR11:130785501 | 11 | 130785501 | 130785700 | ID_562168 | 200 | 1 | 2.66E-05 | 1 | 0.5 | |
| DMR11:131145401 | 11 | 131145401 | 131148300 | ID_562289 | 2900 | 1 | 0.000068 | 24 | 0.82758621 | |
| DMR11:131592801 | 11 | 131592801 | 131594100 | ID_562446 | 1300 | 1 | 2.43E-05 | 10 | 0.76923077 | NTM |
| DMR11:132694201 | 11 | 132694201 | 132696800 | ID_562794 | 2600 | 1 | 1.91E-05 | 28 | 1.07692308 | OPCML |
| DMR11:133271301 | 11 | 133271301 | 133272600 | ID_562991 | 1300 | 1 | 2.76E-05 | 8 | 0.61538462 | OPCML |
| DMR11:133591201 | 11 | 133591201 | 133591500 | ID_563086 | 300 | 1 | 1.14E-05 | 3 | 1 | |
| DMR11:134048001 | 11 | 134048001 | 134049400 | ID_563231 | 1400 | 1 | 5.88E-06 | 25 | 1.78571429 | |
| DMR11:134905901 | 11 | 134905901 | 134907000 | ID_563508 | 1100 | 1 | 7.95E-06 | 34 | 3.09090909 | |
| DMR12:58301 | 12 | 58301 | 61800 | ID_563583 | 3500 | 1 | 2.08E-06 | 12 | 0.34285714 | |
| DMR12:1184301 | 12 | 1184301 | 1184700 | ID_563955 | 400 | 1 | 3.72E-05 | 1 | 0.25 | ERC1 |
| DMR12:1307101 | 12 | 1307101 | 1308400 | ID_563988 | 1300 | 1 | 7.08E-05 | 6 | 0.46153846 | ERC1 |
| DMR12:4264101 | 12 | 4264101 | 4264900 | ID_564934 | 800 | 1 | 6.63E-05 | 9 | 1.125 | CCND2-AS1;CCND2-AS2 |
| DMR12:4789201 | 12 | 4789201 | 4789500 | ID_565106 | 300 | 1 | 6.71E-05 | 2 | 0.66666667 | GALNT8 |
| DMR12:4834401 | 12 | 4834401 | 4835700 | ID_565119 | 1300 | 1 | 9.91E-05 | 20 | 1.53846154 | GALNT8 |
| DMR12:5120901 | 12 | 5120901 | 5121400 | ID_565207 | 500 | 1 | 6.49E-05 | 8 | 1.6 | |
| DMR12:7120501 | 12 | 7120501 | 7122900 | ID_565849 | 2400 | 1 | 2.23E-05 | 33 | 1.375 | C1RL-AS1 |
| DMR12:7859001 | 12 | 7859001 | 7861200 | ID_566074 | 2200 | 1 | 2.07E-05 | 29 | 1.31818182 | RP11-277J24.1;SLC2A14 |
| DMR12:10160301 | 12 | 10160301 | 10160400 | ID_566775 | 100 | 1 | 3.1E-06 | 2 | 2 | OLR1 |
| DMR12:16465301 | 12 | 16465301 | 16467000 | ID_568638 | 1700 | 1 | 3.93E-05 | 21 | 1.23529412 | MGST1 |
| DMR12:16855201 | 12 | 16855201 | 16857800 | ID_568752 | 2600 | 1 | 3.08E-05 | 21 | 0.80769231 | |
| DMR12:20139601 | 12 | 20139601 | 20141700 | ID_569685 | 2100 | 1 | 6.98E-05 | 22 | 1.04761905 | |
| DMR12:20593101 | 12 | 20593101 | 20594500 | ID_569824 | 1400 | 1 | 1.97E-05 | 12 | 0.85714286 | PDE3A |
| DMR12:25033301 | 12 | 25033301 | 25033500 | ID_571101 | 200 | 1 | 5.44E-05 | 2 | 1 | LRMP |
| DMR12:25463201 | 12 | 25463201 | 25463400 | ID_571229 | 200 | 1 | 9.85E-05 | 2 | 1 | LMNTD1 |
| DMR12:26203701 | 12 | 26203701 | 26204000 | ID_571450 | 300 | 1 | 5.87E-05 | 3 | 1 | SSPN |
| DMR12:28283101 | 12 | 28283101 | 28283400 | ID_572084 | 300 | 1 | 3.21E-05 | 0 | 0 | CCDC91 |
| DMR12:31068601 | 12 | 31068601 | 31068900 | ID_572945 | 300 | 1 | 9.65E-05 | 3 | 1 | DDX11-AS1 |
| DMR12:31070001 | 12 | 31070001 | 31070400 | ID_572946 | 400 | 1 | 1.53E-05 | 13 | 3.25 | DDX11-AS1 |
| DMR12:31139801 | 12 | 31139801 | 31140000 | ID_572966 | 200 | 1 | 5.64E-05 | 1 | 0.5 | OVOS2 |
| DMR12:31225001 | 12 | 31225001 | 31229200 | ID_572990 | 4200 | 1 | 2.7E-06 | 73 | 1.73809524 | |
| DMR12:31870401 | 12 | 31870401 | 31873500 | ID_573194 | 3100 | 1 | 1.16E-06 | 68 | 2.19354839 | |
| DMR12:33520901 | 12 | 33520901 | 33521300 | ID_573712 | 400 | 1 | 4.69E-05 | 9 | 2.25 | |
| DMR12:35799001 | 12 | 35799001 | 35799700 | ID_574354 | 700 | 1 | 0.000047 | 9 | 1.28571429 | |
| DMR12:37051401 | 12 | 37051401 | 37052900 | ID_574729 | 1500 | 1 | 0.000073 | 23 | 1.53333333 | |
| DMR12:39280701 | 12 | 39280701 | 39281000 | ID_575303 | 300 | 1 | 2.31E-05 | 1 | 0.33333333 | |
| DMR12:39698301 | 12 | 39698301 | 39698500 | ID_575426 | 200 | 1 | 6.86E-05 | 1 | 0.5 | C12orf40 |
| DMR12:40633401 | 12 | 40633401 | 40634200 | ID_575692 | 800 | 1 | 0.000045 | 3 | 0.375 | |
| DMR12:42888001 | 12 | 42888001 | 42890200 | ID_576335 | 2200 | 1 | 2.82E-05 | 4 | 0.18181818 | |
| DMR12:43629701 | 12 | 43629701 | 43630600 | ID_576550 | 900 | 1 | 8.25E-05 | 4 | 0.44444444 | |
| DMR12:45149201 | 12 | 45149201 | 45150700 | ID_576953 | 1500 | 1 | 2.87E-05 | 6 | 0.4 | |
| DMR12:45279101 | 12 | 45279101 | 45280100 | ID_576996 | 1000 | 1 | 7.21E-05 | 8 | 0.8 | ANO6 |
| DMR12:46884801 | 12 | 46884801 | 46884900 | ID_577487 | 100 | 1 | 3.77E-05 | 2 | 2 | |
| DMR12:47591501 | 12 | 47591501 | 47591900 | ID_577710 | 400 | 1 | 2.25E-05 | 2 | 0.5 | |
| DMR12:48813401 | 12 | 48813401 | 48813900 | ID_578079 | 500 | 1 | 2.37E-05 | 9 | 1.8 | CACNB3 |
| DMR12:50019501 | 12 | 50019501 | 50020200 | ID_578476 | 700 | 1 | 5.02E-05 | 5 | 0.71428571 | RACGAP1 |
| DMR12:52256301 | 12 | 52256301 | 52256700 | ID_579192 | 400 | 1 | 2.17E-06 | 3 | 0.75 | KRT87P;KRT86 |
| DMR12:53285001 | 12 | 53285001 | 53285900 | ID_579525 | 900 | 1 | 4.38E-05 | 17 | 1.88888889 | ESPL1 |
| DMR12:53574901 | 12 | 53574901 | 53575600 | ID_579619 | 700 | 1 | 4.26E-05 | 13 | 1.85714286 | RP11-793H13.12;RP11- |
| | | | | | | | | | | 793H13.10;ATF7 |
| DMR12:57665701 | 12 | 57665701 | 57667200 | ID_580894 | 1500 | 1 | 7.56E-05 | 16 | 1.06666667 | |
| DMR12:61326901 | 12 | 61326901 | 61327600 | ID_581935 | 700 | 1 | 1.59E-05 | 6 | 0.85714286 | |
| DMR12:61462501 | 12 | 61462501 | 61465100 | ID_581974 | 2600 | 1 | 1.43E-05 | 16 | 0.61538462 | |
| DMR12:63079801 | 12 | 63079801 | 63080400 | ID_582455 | 600 | 1 | 0.000099 | 2 | 0.33333333 | |
| DMR12:63525501 | 12 | 63525501 | 63527000 | ID_582588 | 1500 | 1 | 7.43E-05 | 12 | 0.8 | |
| DMR12:68153301 | 12 | 68153301 | 68154100 | ID_583995 | 800 | 1 | 6.31E-05 | 5 | 0.625 | IFNG-AS1 |
| DMR12:68299301 | 12 | 68299301 | 68299500 | ID_584040 | 200 | 1 | 4.32E-05 | 1 | 0.5 | MDM1 |
| DMR12:68559001 | 12 | 68559001 | 68560500 | ID_584125 | 1500 | 1 | 2.55E-05 | 13 | 0.86666667 | |
| DMR12:70226901 | 12 | 70226901 | 70228000 | ID_584638 | 1100 | 1 | 1.63E-05 | 8 | 0.72727273 | LINC01481 |
| DMR12:71380701 | 12 | 71380701 | 71381200 | ID_584962 | 500 | 1 | 1.26E-05 | 6 | 1.2 | TSPAN8 |
| DMR12:71721301 | 12 | 71721301 | 71723300 | ID_585061 | 2000 | 1 | 9.46E-06 | 19 | 0.95 | |
| DMR12:71912901 | 12 | 71912901 | 71913000 | ID_585113 | 100 | 1 | 8.51E-05 | 0 | 0 | TBC1D15 |
| DMR12:73822301 | 12 | 73822301 | 73823300 | ID_585628 | 1000 | 1 | 7.22E-05 | 12 | 1.2 | |
| DMR12:76057001 | 12 | 76057001 | 76057300 | ID_586252 | 300 | 1 | 3.04E-05 | 1 | 0.33333333 | NAP1L1 |
| DMR12:77516701 | 12 | 77516701 | 77516900 | ID_586670 | 200 | 1 | 9.95E-06 | 0 | 0 | RP1-34H18.1 |
| DMR12:77808901 | 12 | 77808901 | 77809200 | ID_586747 | 300 | 1 | 5.56E-05 | 8 | 2.66666667 | |
| DMR12:78516901 | 12 | 78516901 | 78519400 | ID_586952 | 2500 | 1 | 3.79E-05 | 21 | 0.84 | RP11-171L9.1 |
| DMR12:78804201 | 12 | 78804201 | 78804700 | ID_587037 | 500 | 1 | 5.64E-05 | 42 | 8.4 | RP11-123M21.1 |
| DMR12:79322201 | 12 | 79322201 | 79323200 | ID_587178 | 1000 | 1 | 8.79E-05 | 10 | 1 | SYT1 |
| DMR12:81062701 | 12 | 81062701 | 81063100 | ID_587655 | 400 | 2 | 4.28E-07 | 2 | 0.5 | ACSS3 |
| DMR12:82934301 | 12 | 82934301 | 82934600 | ID_588181 | 300 | 1 | 3.77E-05 | 3 | 1 | TMTC2 |
| DMR12:83699301 | 12 | 83699301 | 83700400 | ID_588404 | 1100 | 1 | 1.12E-05 | 9 | 0.81818182 | |
| DMR12:84800601 | 12 | 84800601 | 84800800 | ID_588671 | 200 | 1 | 4.09E-05 | 2 | 1 | |
| DMR12:85137801 | 12 | 85137801 | 85138200 | ID_588751 | 400 | 1 | 4.94E-05 | 4 | 1 | LRRIQ1 |
| DMR12:86421901 | 12 | 86421901 | 86422200 | ID_589067 | 300 | 1 | 7.97E-05 | 0 | 0 | MGAT4C |
| DMR12:92100301 | 12 | 92100301 | 92102500 | ID_590576 | 2200 | 1 | 1.87E-06 | 15 | 0.68181818 | LINC01619 |
| DMR12:92215201 | 12 | 92215201 | 92217100 | ID_590605 | 1900 | 1 | 1.19E-05 | 12 | 0.63157895 | |
| DMR12:93339601 | 12 | 93339601 | 93340100 | ID_590949 | 500 | 1 | 7.85E-05 | 8 | 1.6 | RP11-486A14.2 |
| DMR12:93923301 | 12 | 93923301 | 93923400 | ID_591127 | 100 | 1 | 6.07E-05 | 1 | 1 | RP11-1060G2.1 |
| DMR12:95446401 | 12 | 95446401 | 95448500 | ID_591606 | 2100 | 1 | 9.21E-05 | 65 | 3.0952381 | |
| DMR12:95948901 | 12 | 95948901 | 95949200 | ID_591760 | 300 | 2 | 1.85E-05 | 3 | 1 | AMDHD1 |
| DMR12:96317101 | 12 | 96317101 | 96317500 | ID_591882 | 400 | 1 | 1.85E-05 | 9 | 2.25 | CDK17 |
| DMR12:97261001 | 12 | 97261001 | 97262700 | ID_592151 | 1700 | 1 | 5.74E-05 | 28 | 1.64705882 | |
| DMR12:98263801 | 12 | 98263801 | 98264800 | ID_592437 | 1000 | 1 | 1.46E-05 | 4 | 0.4 | RP11-690J15.1 |
| DMR12:99384801 | 12 | 99384801 | 99386400 | ID_592760 | 1600 | 1 | 1.14E-05 | 17 | 1.0625 | ANKS1B |
| DMR12:99699301 | 12 | 99699301 | 99699600 | ID_592853 | 300 | 1 | 5.98E-06 | 1 | 0.33333333 | ANKS1B |
| DMR12:100061001 | 12 | 100061001 | 100062300 | ID_592957 | 1300 | 1 | 7.02E-05 | 27 | 2.07692308 | UHRF1BP1L |
| DMR12:100879901 | 12 | 100879901 | 100881700 | ID_593204 | 1800 | 1 | 2.37E-05 | 13 | 0.72222222 | ANO4 |
| DMR12:101622201 | 12 | 101622201 | 101622500 | ID_593440 | 300 | 1 | 8.32E-05 | 2 | 0.66666667 | MYBPC1 |
| DMR12:103547801 | 12 | 103547801 | 103549200 | ID_594028 | 1400 | 1 | 7.45E-05 | 15 | 1.07142857 | RP11-626I20.3 |
| DMR12:103686601 | 12 | 103686601 | 103687000 | ID_594073 | 400 | 1 | 5.31E-05 | 4 | 1 | STAB2 |
| DMR12:103723801 | 12 | 103723801 | 103726000 | ID_594085 | 2200 | 1 | 8.62E-05 | 27 | 1.22727273 | STAB2 |
| DMR12:106345001 | 12 | 106345001 | 106345300 | ID_594885 | 300 | 1 | 0.000015 | 3 | 1 | TCP11L2 |
| DMR12:106901001 | 12 | 106901001 | 106902100 | ID_595058 | 1100 | 1 | 2.86E-05 | 10 | 0.90909091 | EEF1B2P4 |
| DMR12:107915801 | 12 | 107915801 | 107917300 | ID_595358 | 1500 | 1 | 6.88E-05 | 22 | 1.46666667 | |
| DMR12:109046001 | 12 | 109046001 | 109046200 | ID_595717 | 200 | 1 | 0.000088 | 4 | 2 | USP30 |
| DMR12:109681201 | 12 | 109681201 | 109681800 | ID_595934 | 600 | 1 | 7.44E-05 | 10 | 1.66666667 | |
| DMR12:110020801 | 12 | 110020801 | 110022900 | ID_596046 | 2100 | 1 | 1.77E-05 | 38 | 1.80952381 | ANKRD13A |
| DMR12:111225401 | 12 | 111225401 | 111226700 | ID_596432 | 1300 | 1 | 5.68E-07 | 27 | 2.07692308 | CUX2 |
| DMR12:111421301 | 12 | 111421301 | 111421500 | ID_596499 | 200 | 1 | 2.86E-05 | 3 | 1.5 | SH2B3 |
| DMR12:112319801 | 12 | 112319801 | 112321200 | ID_596795 | 1400 | 1 | 0.000093 | 25 | 1.78571429 | HECTD4 |
| DMR12:113905801 | 12 | 113905801 | 113907500 | ID_597313 | 1700 | 1 | 1.43E-05 | 32 | 1.88235294 | RBM19 |
| DMR12:114234501 | 12 | 114234501 | 114236600 | ID_597416 | 2100 | 1 | 9.37E-05 | 12 | 0.57142857 | |
| DMR12:118006601 | 12 | 118006601 | 118008900 | ID_598621 | 2300 | 1 | 1.94E-05 | 28 | 1.2173913 | |
| DMR12:118191801 | 12 | 118191801 | 118193200 | ID_598678 | 1400 | 1 | 2.34E-05 | 8 | 0.57142857 | TAOK3 |
| DMR12:120977601 | 12 | 120977601 | 120979100 | ID_599535 | 1500 | 1 | 1.44E-07 | 49 | 3.26666667 | HNF1A-AS1;HNF1A |
| DMR12:122243901 | 12 | 122243901 | 122244400 | ID_599938 | 500 | 1 | 7.99E-05 | 10 | 2 | VPS33A;RP11-512M8.5 |
| DMR12:124223401 | 12 | 124223401 | 124223600 | ID_600577 | 200 | 1 | 8.53E-05 | 5 | 2.5 | FAM101A |
| DMR12:125512101 | 12 | 125512101 | 125514900 | ID_600958 | 2800 | 1 | 8.14E-05 | 42 | 1.5 | TMEM132B |
| DMR12:125635701 | 12 | 125635701 | 125636400 | ID_600990 | 700 | 1 | 9.19E-05 | 9 | 1.28571429 | TMEM132B |
| DMR12:125690601 | 12 | 125690601 | 125691000 | ID_601010 | 400 | 1 | 0.000068 | 5 | 1.25 | |
| DMR12:127209201 | 12 | 127209201 | 127210700 | ID_601473 | 1500 | 1 | 5.67E-05 | 12 | 0.8 | |
| DMR12:127405201 | 12 | 127405201 | 127405600 | ID_601538 | 400 | 1 | 8.77E-05 | 4 | 1 | |
| DMR12:128198401 | 12 | 128198401 | 128198700 | ID_601801 | 300 | 1 | 1.35E-05 | 2 | 0.66666667 | |
| DMR12:128237801 | 12 | 128237801 | 128239800 | ID_601809 | 2000 | 1 | 9.69E-05 | 16 | 0.8 | |
| DMR12:128475501 | 12 | 128475501 | 128477400 | ID_601882 | 1900 | 1 | 4.75E-05 | 22 | 1.15789474 | TMEM132C |
| DMR12:129092101 | 12 | 129092101 | 129092300 | ID_602079 | 200 | 1 | 8.95E-05 | 2 | 1 | TMEM132D |
| DMR12:129751101 | 12 | 129751101 | 129752200 | ID_602296 | 1100 | 1 | 4.63E-05 | 7 | 0.63636364 | TMEM132D |
| DMR12:130167301 | 12 | 130167301 | 130167500 | ID_602433 | 200 | 1 | 5.73E-05 | 1 | 0.5 | |
| DMR12:130365301 | 12 | 130365301 | 130365700 | ID_602494 | 400 | 1 | 1.95E-05 | 5 | 1.25 | PIWIL1 |
| DMR12:130657401 | 12 | 130657401 | 130660000 | ID_602588 | 2600 | 2 | 1.48E-05 | 80 | 3.07692308 | RIMBP2;RP11-662M24.1; |
| | | | | | | | | | | RP11-662M24.2 |
| DMR12:131254201 | 12 | 131254201 | 131254400 | ID_602786 | 200 | 1 | 2.71E-05 | 2 | 1 | |
| DMR12:132244001 | 12 | 132244001 | 132244200 | ID_603102 | 200 | 1 | 9.69E-05 | 12 | 6 | GALNT9 |
| DMR12:132301401 | 12 | 132301401 | 132306900 | ID_603119 | 5500 | 1 | 6.92E-05 | 276 | 5.01818182 | GALNT9 |
| DMR13:18570801 | 13 | 18570801 | 18571200 | ID_604054 | 400 | 1 | 8.32E-05 | 2 | 0.5 | |
| DMR13:19108201 | 13 | 19108201 | 19108400 | ID_604226 | 200 | 1 | 1.35E-05 | 3 | 1.5 | |
| DMR13:20239501 | 13 | 20239501 | 20240400 | ID_604584 | 900 | 1 | 6.91E-05 | 15 | 1.66666667 | |
| DMR13:20556101 | 13 | 20556101 | 20556400 | ID_604686 | 300 | 1 | 1.35E-05 | 5 | 1.66666667 | |
| DMR13:22669301 | 13 | 22669301 | 22671400 | ID_605337 | 2100 | 1 | 8.64E-05 | 53 | 2.52380952 | AL354828.1;AL354828.2 |
| DMR13:23142101 | 13 | 23142101 | 23144300 | ID_605474 | 2200 | 1 | 1.39E-05 | 43 | 1.95454546 | |
| DMR13:23402301 | 13 | 23402301 | 23402400 | ID_605552 | 100 | 1 | 5.98E-06 | 0 | 0 | SACS |
| DMR13:25359101 | 13 | 25359101 | 25359400 | ID_606181 | 300 | 1 | 5.48E-05 | 3 | 1 | |
| DMR13:26355701 | 13 | 26355701 | 26356100 | ID_606487 | 400 | 1 | 5.43E-05 | 2 | 0.5 | CDK8 |
| DMR13:26818201 | 13 | 26818201 | 26818700 | ID_606640 | 500 | 1 | 2.16E-05 | 3 | 0.6 | |
| DMR13:27437801 | 13 | 27437801 | 27438300 | ID_606835 | 500 | 1 | 5.41E-05 | 6 | 1.2 | MTIF3 |
| DMR13:27664501 | 13 | 27664501 | 27667100 | ID_606905 | 2600 | 1 | 3.34E-05 | 26 | 1 | POLR1D |
| DMR13:32532301 | 13 | 32532301 | 32533100 | ID_608437 | 800 | 1 | 3.46E-05 | 7 | 0.875 | N4BP2L2 |
| DMR13:33368101 | 13 | 33368101 | 33368400 | ID_608709 | 300 | 1 | 2.96E-05 | 4 | 1.33333333 | RP11-141M1.3 |
| DMR13:34732501 | 13 | 34732501 | 34734400 | ID_609111 | 1900 | 1 | 3.15E-05 | 14 | 0.73684211 | |
| DMR13:35441401 | 13 | 35441401 | 35442900 | ID_609299 | 1500 | 1 | 3.77E-05 | 13 | 0.86666667 | NBEA |
| DMR13:35661401 | 13 | 35661401 | 35662800 | ID_609362 | 1400 | 1 | 3.19E-05 | 15 | 1.07142857 | NBEA |
| DMR13:36814801 | 13 | 36814801 | 36815400 | ID_609704 | 600 | 1 | 5.41E-05 | 3 | 0.5 | |
| DMR13:37251301 | 13 | 37251301 | 37251900 | ID_609829 | 600 | 1 | 4.75E-06 | 12 | 2 | |
| DMR13:37915401 | 13 | 37915401 | 37916100 | ID_610019 | 700 | 1 | 0.00008 | 2 | 0.28571429 | |
| DMR13:38852701 | 13 | 38852701 | 38855100 | ID_610280 | 2400 | 1 | 7.64E-05 | 24 | 1 | FREM2 |
| DMR13:39369501 | 13 | 39369501 | 39369700 | ID_610431 | 200 | 1 | 0.000026 | 0 | 0 | LHFP |
| DMR13:41342601 | 13 | 41342601 | 41343500 | ID_611022 | 900 | 1 | 9.79E-05 | 10 | 1.11111111 | NAA16 |
| DMR13:42704501 | 13 | 42704501 | 42704800 | ID_611405 | 300 | 1 | 7.71E-05 | 0 | 0 | |
| DMR13:47810001 | 13 | 47810001 | 47811200 | ID_612956 | 1200 | 1 | 2.02E-05 | 10 | 0.83333333 | |
| DMR13:49175801 | 13 | 49175801 | 49177000 | ID_613375 | 1200 | 1 | 6.16E-05 | 5 | 0.41666667 | FNDC3A |
| DMR13:52418301 | 13 | 52418301 | 52419400 | ID_614380 | 1100 | 1 | 2.32E-05 | 15 | 1.36363636 | VPS36 |
| DMR13:53969801 | 13 | 53969801 | 53971000 | ID_614823 | 1200 | 1 | 2.44E-05 | 2 | 0.16666667 | |
| DMR13:54163501 | 13 | 54163501 | 54163800 | ID_614868 | 300 | 1 | 5.35E-05 | 8 | 2.66666667 | |
| DMR13:54736501 | 13 | 54736501 | 54738100 | ID_615025 | 1600 | 1 | 1.46E-05 | 55 | 3.4375 | |
| DMR13:54902201 | 13 | 54902201 | 54902400 | ID_615074 | 200 | 1 | 4.46E-05 | 0 | 0 | |
| DMR13:57600401 | 13 | 57600401 | 57600600 | ID_615766 | 200 | 1 | 8.59E-05 | 2 | 1 | |
| DMR13:57932701 | 13 | 57932701 | 57933000 | ID_615841 | 300 | 1 | 0.000074 | 2 | 0.66666667 | |
| DMR13:59257601 | 13 | 59257601 | 59260800 | ID_616186 | 3200 | 1 | 3.12E-05 | 21 | 0.65625 | |
| DMR13:60136801 | 13 | 60136801 | 60140200 | ID_616441 | 3400 | 1 | 7.58E-05 | 33 | 0.97058824 | DIAPH3 |
| DMR13:61720901 | 13 | 61720901 | 61721100 | ID_616863 | 200 | 1 | 4.81E-05 | 1 | 0.5 | |
| DMR13:63935201 | 13 | 63935201 | 63935500 | ID_617414 | 300 | 2 | 8.12E-05 | 3 | 1 | |
| DMR13:65973301 | 13 | 65973301 | 65974500 | ID_617938 | 1200 | 1 | 7.53E-06 | 3 | 0.25 | |
| DMR13:67248001 | 13 | 67248001 | 67248200 | ID_618270 | 200 | 1 | 2.84E-05 | 0 | 0 | |
| DMR13:68307101 | 13 | 68307101 | 68307300 | ID_618557 | 200 | 1 | 0.000047 | 2 | 1 | |
| DMR13:68772601 | 13 | 68772601 | 68772800 | ID_618669 | 200 | 1 | 7.03E-05 | 3 | 1.5 | |
| DMR13:69149501 | 13 | 69149501 | 69150000 | ID_618767 | 500 | 1 | 1.13E-05 | 8 | 1.6 | |
| DMR13:69901201 | 13 | 69901201 | 69902800 | ID_618938 | 1600 | 1 | 5.52E-05 | 12 | 0.75 | KLHL1 |
| DMR13:71508601 | 13 | 71508601 | 71509300 | ID_619347 | 700 | 1 | 1.08E-05 | 3 | 0.42857143 | DACH1 |
| DMR13:71644901 | 13 | 71644901 | 71645700 | ID_619384 | 800 | 1 | 8.45E-05 | 9 | 1.125 | DACH1 |
| DMR13:72268801 | 13 | 72268801 | 72271600 | ID_619566 | 2800 | 1 | 5.62E-05 | 41 | 1.46428571 | |
| DMR13:73660201 | 13 | 73660201 | 73661100 | ID_619978 | 900 | 1 | 3.24E-06 | 5 | 0.55555556 | |
| DMR13:76117201 | 13 | 76117201 | 76120000 | ID_620693 | 2800 | 1 | 3.94E-05 | 14 | 0.5 | |
| DMR13:79396401 | 13 | 79396401 | 79396700 | ID_621626 | 300 | 1 | 6.51E-05 | 1 | 0.33333333 | RBM26 |
| DMR13:80033901 | 13 | 80033901 | 80034800 | ID_621805 | 900 | 1 | 6.87E-05 | 8 | 0.88888889 | |
| DMR13:81261301 | 13 | 81261301 | 81261600 | ID_622147 | 300 | 1 | 2.38E-05 | 3 | 1 | RP11-452B18.2 |
| DMR13:81274401 | 13 | 81274401 | 81276300 | ID_622152 | 1900 | 1 | 1.62E-06 | 19 | 1 | RP11-452B18.2 |
| DMR13:84848501 | 13 | 84848501 | 84848800 | ID_623054 | 300 | 1 | 1.82E-05 | 1 | 0.33333333 | |
| DMR13:90277301 | 13 | 90277301 | 90277600 | ID_624439 | 300 | 1 | 1.63E-05 | 2 | 0.66666667 | |
| DMR13:92230401 | 13 | 92230401 | 92230600 | ID_624957 | 200 | 1 | 7.05E-05 | 1 | 0.5 | GPC5 |
| DMR13:93206501 | 13 | 93206501 | 93207200 | ID_625226 | 700 | 1 | 3.31E-05 | 24 | 3.42857143 | |
| DMR13:94493601 | 13 | 94493601 | 94493900 | ID_625589 | 300 | 1 | 5.73E-05 | 2 | 0.66666667 | |
| DMR13:94546801 | 13 | 94546801 | 94550900 | ID_625604 | 4100 | 1 | 3.39E-05 | 134 | 3.26829268 | |
| DMR13:95858301 | 13 | 95858301 | 95858700 | ID_626010 | 400 | 1 | 9.78E-05 | 6 | 1.5 | UGGT2 |
| DMR13:96126801 | 13 | 96126801 | 96128900 | ID_626084 | 2100 | 1 | 8.84E-05 | 16 | 0.76190476 | HS6ST3 |
| DMR13:97877501 | 13 | 97877501 | 97877800 | ID_626599 | 300 | 1 | 6.82E-05 | 5 | 1.66666667 | |
| DMR13:98518201 | 13 | 98518201 | 98519800 | ID_626822 | 1600 | 1 | 6.11E-05 | 13 | 0.8125 | STK24 |
| DMR13:98815001 | 13 | 98815001 | 98818000 | ID_626921 | 3000 | 2 | 6.61E-05 | 41 | 1.36666667 | DOCK9 |
| DMR13:98833501 | 13 | 98833501 | 98837200 | ID_626925 | 3700 | 1 | 8.22E-05 | 35 | 0.94594595 | DOCK9-AS1;DOCK9 |
| DMR13:100935201 | 13 | 100935201 | 100936400 | ID_627595 | 1200 | 1 | 3.35E-05 | 12 | 1 | NALCN-AS1 |
| DMR13:101795401 | 13 | 101795401 | 101795900 | ID_627844 | 500 | 1 | 0.000028 | 3 | 0.6 | FGF14 |
| DMR13:101912201 | 13 | 101912201 | 101913800 | ID_627883 | 1600 | 1 | 6.62E-05 | 3 | 0.1875 | FGF14 |
| DMR13:102087001 | 13 | 102087001 | 102088300 | ID_627933 | 1300 | 1 | 0.00009 | 14 | 1.07692308 | FGF14 |
| DMR13:102925701 | 13 | 102925701 | 102926300 | ID_628186 | 600 | 1 | 9.89E-05 | 4 | 0.66666667 | |
| DMR13:104088001 | 13 | 104088001 | 104088500 | ID_628526 | 500 | 2 | 2.27E-07 | 7 | 1.4 | |
| DMR13:104758501 | 13 | 104758501 | 104758800 | ID_628714 | 300 | 1 | 7.58E-05 | 4 | 1.33333333 | |
| DMR13:106215401 | 13 | 106215401 | 106215600 | ID_629133 | 200 | 1 | 3.85E-05 | 3 | 1.5 | |
| DMR13:106996901 | 13 | 106996901 | 107001300 | ID_629367 | 4400 | 1 | 7.78E-06 | 53 | 1.20454546 | |
| DMR13:108706101 | 13 | 108706101 | 108709800 | ID_629867 | 3700 | 1 | 0.000092 | 31 | 0.83783784 | MYO16 |
| DMR13:109068001 | 13 | 109068001 | 109068700 | ID_629972 | 700 | 1 | 6.41E-05 | 7 | 1 | MYO16 |
| DMR13:111296101 | 13 | 111296101 | 111297200 | ID_630678 | 1100 | 1 | 4.41E-05 | 18 | 1.63636364 | ARHGEF7 |
| DMR13:111855901 | 13 | 111855901 | 111859100 | ID_630833 | 3200 | 1 | 5.15E-05 | 98 | 3.0625 | |
| DMR13:112775301 | 13 | 112775301 | 112776500 | ID_631095 | 1200 | 1 | 2.66E-05 | 43 | 3.58333333 | ATP11A |
| DMR13:113628701 | 13 | 113628701 | 113629100 | ID_631371 | 400 | 1 | 5.77E-05 | 14 | 3.5 | TFDP1 |
| DMR14:17600101 | 14 | 17600101 | 17600400 | ID_631980 | 300 | 1 | 1.69E-05 | 8 | 2.66666667 | |
| DMR14:18644401 | 14 | 18644401 | 18646700 | ID_632263 | 2300 | 1 | 1.82E-05 | 81 | 3.52173913 | RP11-536C10.14;RP11- |
| | | | | | | | | | | 536C10.13; RP11-536C10.11 |
| DMR14:18920401 | 14 | 18920401 | 18921800 | ID_632303 | 1400 | 1 | 1.96E-05 | 23 | 1.64285714 | CTD-2311B13.1 |
| DMR14:18980501 | 14 | 18980501 | 18980700 | ID_632322 | 200 | 1 | 2.32E-05 | 3 | 1.5 | CTD-2311B13.5;POTEM |
| DMR14:19387101 | 14 | 19387101 | 19393900 | ID_632446 | 6800 | 1 | 6.72E-05 | 127 | 1.86764706 | |
| DMR14:19433401 | 14 | 19433401 | 19437000 | ID_632459 | 3600 | 3 | 2.54E-06 | 137 | 3.80555556 | POTEG |
| DMR14:20576301 | 14 | 20576301 | 20576500 | ID_632773 | 200 | 1 | 6.29E-06 | 5 | 2.5 | |
| DMR14:20735201 | 14 | 20735201 | 20737100 | ID_632822 | 1900 | 1 | 6.24E-05 | 14 | 0.73684211 | EDDM3A |
| DMR14:24059101 | 14 | 24059101 | 24060400 | ID_633878 | 1300 | 1 | 3.04E-05 | 27 | 2.07692308 | LRRC16B |
| DMR14:24109601 | 14 | 24109601 | 24109800 | ID_633894 | 200 | 1 | 4.8E-06 | 5 | 2.5 | NRL;PCK2 |
| DMR14:24763501 | 14 | 24763501 | 24765100 | ID_634097 | 1600 | 1 | 0.000045 | 11 | 0.6875 | |
| DMR14:26523601 | 14 | 26523601 | 26523800 | ID_634604 | 200 | 1 | 6.33E-06 | 3 | 1.5 | NOVA1 |
| DMR14:26674701 | 14 | 26674701 | 26676800 | ID_634645 | 2100 | 1 | 9.8E-06 | 17 | 0.80952381 | NOVA1-AS1 |
| DMR14:28067901 | 14 | 28067901 | 28068100 | ID_635006 | 200 | 1 | 0.000052 | 0 | 0 | |
| DMR14:28090201 | 14 | 28090201 | 28092600 | ID_635010 | 2400 | 1 | 0.000093 | 16 | 0.66666667 | |
| DMR14:28697501 | 14 | 28697501 | 28697700 | ID_635165 | 200 | 1 | 0.000015 | 1 | 0.5 | |
| DMR14:29649501 | 14 | 29649501 | 29649800 | ID_635432 | 300 | 1 | 6.66E-06 | 3 | 1 | PRKD1 |
| DMR14:32271701 | 14 | 32271701 | 32272100 | ID_636200 | 400 | 1 | 4.45E-06 | 5 | 1.25 | RP11-134E15.2 |
| DMR14:32968101 | 14 | 32968101 | 32969500 | ID_636406 | 1400 | 1 | 8.04E-05 | 6 | 0.42857143 | NPAS3 |
| DMR14:33754201 | 14 | 33754201 | 33758500 | ID_636651 | 4300 | 1 | 0.000048 | 31 | 0.72093023 | NPAS3 |
| DMR14:35205601 | 14 | 35205601 | 35205700 | ID_637091 | 100 | 1 | 7.29E-05 | 0 | 0 | KIAA0391;RP11-561B11.2 |
| DMR14:38737701 | 14 | 38737701 | 38738000 | ID_638145 | 300 | 2 | 1.02E-06 | 5 | 1.66666667 | |
| DMR14:39601001 | 14 | 39601001 | 39602100 | ID_638395 | 1100 | 1 | 5.43E-05 | 5 | 0.45454546 | |
| DMR14:40587301 | 14 | 40587301 | 40587600 | ID_638666 | 300 | 1 | 3.87E-05 | 3 | 1 | |
| DMR14:41349401 | 14 | 41349401 | 41351700 | ID_638862 | 2300 | 1 | 3.94E-05 | 28 | 1.2173913 | |
| DMR14:44709001 | 14 | 44709001 | 44709900 | ID_639732 | 900 | 1 | 2.84E-05 | 14 | 1.55555556 | |
| DMR14:44940901 | 14 | 44940901 | 44942200 | ID_639797 | 1300 | 1 | 1.82E-05 | 17 | 1.30769231 | KLHL28 |
| DMR14:45732701 | 14 | 45732701 | 45733900 | ID_640028 | 1200 | 1 | 0.000089 | 4 | 0.33333333 | |
| DMR14:46935601 | 14 | 46935601 | 46935900 | ID_640328 | 300 | 2 | 5.76E-06 | 2 | 0.66666667 | MDGA2 |
| DMR14:50765901 | 14 | 50765901 | 50766200 | ID_641476 | 300 | 1 | 2.61E-06 | 4 | 1.33333333 | NIN |
| DMR14:51570701 | 14 | 51570701 | 51570900 | ID_641714 | 200 | 1 | 4.74E-05 | 2 | 1 | FRMD6;FRMD6-AS2 |
| DMR14:51762301 | 14 | 51762301 | 51763200 | ID_641768 | 900 | 1 | 3.38E-05 | 20 | 2.22222222 | OR7E106P;RP11-280K24.1 |
| DMR14:52698201 | 14 | 52698201 | 52698700 | ID_642057 | 500 | 1 | 1.43E-05 | 3 | 0.6 | |
| DMR14:53021001 | 14 | 53021001 | 53021500 | ID_642153 | 500 | 1 | 2.32E-06 | 5 | 1 | |
| DMR14:53359001 | 14 | 53359001 | 53360500 | ID_642243 | 1500 | 1 | 7.16E-05 | 9 | 0.6 | AL163953.3 |
| DMR14:53894401 | 14 | 53894401 | 53895300 | ID_642404 | 900 | 1 | 4.61E-05 | 3 | 0.33333333 | |
| DMR14:54701401 | 14 | 54701401 | 54702700 | ID_642648 | 1300 | 1 | 0.000098 | 18 | 1.38461539 | SAMD4A |
| DMR14:55071001 | 14 | 55071001 | 55074600 | ID_642763 | 3600 | 1 | 6.39E-05 | 40 | 1.11111111 | |
| DMR14:55953901 | 14 | 55953901 | 55954000 | ID_643024 | 100 | 1 | 9.24E-05 | 1 | 1 | RP11-1012E15.2 |
| DMR14:56280301 | 14 | 56280301 | 56280600 | ID_643124 | 300 | 1 | 9.71E-05 | 2 | 0.66666667 | PELI2 |
| DMR14:57544801 | 14 | 57544801 | 57545100 | ID_643489 | 300 | 1 | 4.19E-05 | 4 | 1.33333333 | |
| DMR14:62802301 | 14 | 62802301 | 62802800 | ID_645076 | 500 | 2 | 1.46E-07 | 8 | 1.6 | KCNH5 |
| DMR14:63745501 | 14 | 63745501 | 63746400 | ID_645361 | 900 | 1 | 7.04E-05 | 5 | 0.55555556 | |
| DMR14:65432301 | 14 | 65432301 | 65432500 | ID_645883 | 200 | 1 | 2.71E-05 | 2 | 1 | FUT8 |
| DMR14:65553501 | 14 | 65553501 | 65554000 | ID_645917 | 500 | 1 | 2.42E-05 | 2 | 0.4 | FUT8 |
| DMR14:66023501 | 14 | 66023501 | 66025300 | ID_646058 | 1800 | 1 | 8.49E-06 | 10 | 0.55555556 | |
| DMR14:66673901 | 14 | 66673901 | 66675200 | ID_646252 | 1300 | 1 | 4.01E-05 | 20 | 1.53846154 | GPHN |
| DMR14:67130501 | 14 | 67130501 | 67134600 | ID_646379 | 4100 | 1 | 4.3E-06 | 14 | 0.34146342 | GPHN |
| DMR14:67576201 | 14 | 67576201 | 67581000 | ID_646525 | 4800 | 1 | 8.72E-05 | 74 | 1.54166667 | PLEKHH1 |
| DMR14:68286601 | 14 | 68286601 | 68288600 | ID_646743 | 2000 | 1 | 2.29E-05 | 8 | 0.4 | RAD51B |
| DMR14:70150301 | 14 | 70150301 | 70151500 | ID_647337 | 1200 | 1 | 8.11E-05 | 14 | 1.16666667 | SLC8A3 |
| DMR14:71594701 | 14 | 71594701 | 71596300 | ID_647761 | 1600 | 1 | 5.65E-05 | 11 | 0.6875 | SIPA1L1 |
| DMR14:71793801 | 14 | 71793801 | 71795600 | ID_647818 | 1800 | 1 | 6.87E-05 | 7 | 0.38888889 | |
| DMR14:72735901 | 14 | 72735901 | 72736800 | ID_648099 | 900 | 1 | 2.12E-05 | 8 | 0.88888889 | DPF3 |
| DMR14:73095401 | 14 | 73095401 | 73098300 | ID_648206 | 2900 | 1 | 1.53E-06 | 50 | 1.72413793 | RBM25 |
| DMR14:73134901 | 14 | 73134901 | 73135500 | ID_648220 | 600 | 1 | 2.51E-05 | 6 | 1 | |
| DMR14:74972001 | 14 | 74972001 | 74974000 | ID_648779 | 2000 | 1 | 8.14E-05 | 29 | 1.45 | |
| DMR14:75004301 | 14 | 75004301 | 75004500 | ID_648790 | 200 | 1 | 5.13E-05 | 0 | 0 | EIF2B2 |
| DMR14:75344501 | 14 | 75344501 | 75347300 | ID_648905 | 2800 | 1 | 9.42E-05 | 18 | 0.64285714 | |
| DMR14:76154301 | 14 | 76154301 | 76154600 | ID_649160 | 300 | 1 | 3.73E-05 | 12 | 4 | GPATCH2L |
| DMR14:77995301 | 14 | 77995301 | 77997100 | ID_649751 | 1800 | 1 | 2.99E-05 | 20 | 1.11111111 | |
| DMR14:78119601 | 14 | 78119601 | 78119800 | ID_649797 | 200 | 1 | 6.56E-05 | 2 | 1 | |
| DMR14:79279101 | 14 | 79279101 | 79280000 | ID_650143 | 900 | 1 | 4.59E-05 | 62 | 6.88888889 | NRXN3 |
| DMR14:81679101 | 14 | 81679101 | 81679700 | ID_650850 | 600 | 1 | 6.53E-05 | 27 | 4.5 | |
| DMR14:82643901 | 14 | 82643901 | 82645500 | ID_651110 | 1600 | 1 | 4.43E-05 | 4 | 0.25 | RP11-406A9.2 |
| DMR14:82792701 | 14 | 82792701 | 82793100 | ID_651156 | 400 | 1 | 7.25E-05 | 2 | 0.5 | RP11-11K13.1 |
| DMR14:84833301 | 14 | 84833301 | 84834100 | ID_651725 | 800 | 1 | 7.04E-05 | 11 | 1.375 | |
| DMR14:86173401 | 14 | 86173401 | 86173600 | ID_652108 | 200 | 1 | 0.000034 | 3 | 1.5 | |
| DMR14:86965601 | 14 | 86965601 | 86965800 | ID_652336 | 200 | 1 | 9.87E-05 | 4 | 2 | RP11-736P16.1 |
| DMR14:90039601 | 14 | 90039601 | 90039800 | ID_653240 | 200 | 1 | 0.000039 | 1 | 0.5 | TDP1 |
| DMR14:90491801 | 14 | 90491801 | 90492500 | ID_653386 | 700 | 1 | 1.48E-06 | 13 | 1.85714286 | |
| DMR14:91333101 | 14 | 91333101 | 91333400 | ID_653671 | 300 | 1 | 8.17E-05 | 5 | 1.66666667 | CCDC88C |
| DMR14:91888901 | 14 | 91888901 | 91890000 | ID_653833 | 1100 | 1 | 6.99E-05 | 18 | 1.63636364 | FBLN5 |
| DMR14:92367901 | 14 | 92367901 | 92369300 | ID_653993 | 1400 | 1 | 9.59E-05 | 15 | 1.07142857 | SLC24A4 |
| DMR14:93346101 | 14 | 93346101 | 93347700 | ID_654312 | 1600 | 1 | 1.16E-05 | 63 | 3.9375 | COX8C;UNC79 |
| DMR14:93379001 | 14 | 93379001 | 93379200 | ID_654323 | 200 | 1 | 0.000068 | 0 | 0 | UNC79 |
| DMR14:93668801 | 14 | 93668801 | 93669200 | ID_654414 | 400 | 1 | 4.78E-05 | 1 | 0.25 | UNC79 |
| DMR14:94610001 | 14 | 94610001 | 94610400 | ID_654711 | 400 | 1 | 9.29E-06 | 7 | 1.75 | SERPINA3 |
| DMR14:95175001 | 14 | 95175001 | 95175800 | ID_654886 | 800 | 1 | 1.73E-05 | 7 | 0.875 | DICER1-AS1 |
| DMR14:95653401 | 14 | 95653401 | 95653600 | ID_655043 | 200 | 1 | 4.61E-05 | 2 | 1 | TCL6 |
| DMR14:98556001 | 14 | 98556001 | 98556600 | ID_655951 | 600 | 1 | 4.09E-06 | 4 | 0.66666667 | |
| DMR14:100595501 | 14 | 100595501 | 100597200 | ID_656617 | 1700 | 1 | 4.1E-06 | 30 | 1.76470588 | |
| DMR14:101546201 | 14 | 101546201 | 101546400 | ID_656922 | 200 | 1 | 8.53E-05 | 5 | 2.5 | |
| DMR14:102691101 | 14 | 102691101 | 102691700 | ID_657280 | 600 | 1 | 3.97E-05 | 11 | 1.83333333 | RCOR1 |
| DMR14:103482601 | 14 | 103482601 | 103483000 | ID_657526 | 400 | 1 | 9.55E-06 | 5 | 1.25 | MARK3 |
| DMR14:104364101 | 14 | 104364101 | 104365600 | ID_657800 | 1500 | 1 | 1.07E-05 | 27 | 1.8 | |
| DMR14:104727801 | 14 | 104727801 | 104728300 | ID_657914 | 500 | 1 | 3.09E-05 | 10 | 2 | ADSSL1 |
| DMR14:104965601 | 14 | 104965601 | 104967500 | ID_657989 | 1900 | 1 | 6.32E-05 | 35 | 1.84210526 | AHNAK2 |
| DMR14:105158001 | 14 | 105158001 | 105158500 | ID_658048 | 500 | 1 | 8.75E-05 | 17 | 3.4 | JAG2;RP11-44N21.4 |
| DMR14:105197401 | 14 | 105197401 | 105202600 | ID_658060 | 5200 | 1 | 2.25E-05 | 140 | 2.69230769 | |
| DMR14:105593501 | 14 | 105593501 | 105594700 | ID_658182 | 1200 | 1 | 9.08E-05 | 47 | 3.91666667 | |
| DMR14:105676301 | 14 | 105676301 | 105677300 | ID_658204 | 1000 | 1 | 1.37E-05 | 20 | 2 | |
| DMR14:106732901 | 14 | 106732901 | 106737200 | ID_658522 | 4300 | 1 | 2.22E-05 | 48 | 1.11627907 | CH17-212P11.5 |
| DMR15:17575501 | 15 | 17575501 | 17577100 | ID_658654 | 1600 | 1 | 2.73E-05 | 16 | 1 | |
| DMR15:20520601 | 15 | 20520601 | 20524200 | ID_659395 | 3600 | 1 | 5.92E-05 | 54 | 1.5 | RP11-467L19.8 |
| DMR15:20615601 | 15 | 20615601 | 20616300 | ID_659426 | 700 | 1 | 0.00005 | 13 | 1.85714286 | |
| DMR15:20756701 | 15 | 20756701 | 20759200 | ID_659455 | 2500 | 2 | 4.04E-05 | 46 | 1.84 | |
| DMR15:20837301 | 15 | 20837301 | 20839700 | ID_659482 | 2400 | 1 | 0.000012 | 5 | 0.20833333 | POTEB2 |
| DMR15:20906201 | 15 | 20906201 | 20906900 | ID_659505 | 700 | 1 | 4.76E-05 | 10 | 1.42857143 | |
| DMR15:20936301 | 15 | 20936301 | 20936600 | ID_659512 | 300 | 1 | 9.03E-06 | 7 | 2.33333333 | |
| DMR15:21152701 | 15 | 21152701 | 21153500 | ID_659573 | 800 | 1 | 1.31E-05 | 4 | 0.5 | RP11-854K16.4 |
| DMR15:21156501 | 15 | 21156501 | 21157000 | ID_659574 | 500 | 1 | 4.85E-06 | 1 | 0.2 | |
| DMR15:21172601 | 15 | 21172601 | 21176400 | ID_659581 | 3800 | 4 | 4E-07 | 119 | 3.13157895 | |
| DMR15:21325001 | 15 | 21325001 | 21330800 | ID_659609 | 5800 | 2 | 1.57E-06 | 135 | 2.32758621 | RP11-32B5.7;RP11- |
| | | | | | | | | | | 275E15.2 |
| DMR15:21471201 | 15 | 21471201 | 21471700 | ID_659652 | 500 | 1 | 3.37E-05 | 4 | 0.8 | |
| DMR15:21613101 | 15 | 21613101 | 21615300 | ID_659695 | 2200 | 1 | 1.36E-05 | 13 | 0.59090909 | RP11-983G14.1 |
| DMR15:21650901 | 15 | 21650901 | 21651100 | ID_659708 | 200 | 1 | 1.39E-05 | 2 | 1 | RP11-983G14.1 |
| DMR15:21776801 | 15 | 21776801 | 21778500 | ID_659742 | 1700 | 1 | 2.73E-06 | 39 | 2.29411765 | |
| DMR15:22085401 | 15 | 22085401 | 22086000 | ID_659824 | 600 | 1 | 1.24E-05 | 10 | 1.66666667 | RP11-69H14.6 |
| DMR15:22241801 | 15 | 22241801 | 22242400 | ID_659868 | 600 | 1 | 6.86E-05 | 6 | 1 | |
| DMR15:22416301 | 15 | 22416301 | 22416700 | ID_659905 | 400 | 1 | 8.35E-05 | 2 | 0.5 | |
| DMR15:22569901 | 15 | 22569901 | 22570600 | ID_659953 | 700 | 1 | 4.33E-06 | 13 | 1.85714286 | HERC2P2 |
| DMR15:22573801 | 15 | 22573801 | 22574800 | ID_659954 | 1000 | 1 | 4.95E-06 | 11 | 1.1 | HERC2P2 |
| DMR15:23433701 | 15 | 23433701 | 23435300 | ID_660229 | 1600 | 1 | 4.38E-05 | 14 | 0.875 | RP11-529J17.3 |
| DMR15:25171501 | 15 | 25171501 | 25174200 | ID_660748 | 2700 | 1 | 5.58E-06 | 37 | 1.37037037 | SNHG14;SNORD115-2 |
| DMR15:25240601 | 15 | 25240601 | 25246500 | ID_660763 | 5900 | 1 | 4.57E-05 | 104 | 1.76271186 | SNHG14;SNORD115-39; |
| | | | | | | | | | | SNORD115-41; |
| | | | | | | | | | | SNORD115-40 |
| DMR15:25308701 | 15 | 25308701 | 25310800 | ID_660782 | 2100 | 1 | 0.000077 | 8 | 0.38095238 | SNHG14 |
| DMR15:26487201 | 15 | 26487201 | 26488900 | ID_661175 | 1700 | 1 | 0.000061 | 18 | 1.05882353 | |
| DMR15:27018901 | 15 | 27018901 | 27020800 | ID_661342 | 1900 | 1 | 1.84E-06 | 50 | 2.63157895 | GABRG3 |
| DMR15:28510201 | 15 | 28510201 | 28511500 | ID_661817 | 1300 | 1 | 8.31E-05 | 22 | 1.69230769 | |
| DMR15:28542301 | 15 | 28542301 | 28544300 | ID_661832 | 2000 | 1 | 1.14E-05 | 64 | 3.2 | |
| DMR15:28645201 | 15 | 28645201 | 28645400 | ID_661867 | 200 | 1 | 2.04E-05 | 0 | 0 | HERC2P9 |
| DMR15:28784501 | 15 | 28784501 | 28785700 | ID_661916 | 1200 | 1 | 9.56E-05 | 37 | 3.08333333 | |
| DMR15:29662101 | 15 | 29662101 | 29662300 | ID_662198 | 200 | 1 | 4.65E-05 | 3 | 1.5 | |
| DMR15:30830801 | 15 | 30830801 | 30832500 | ID_662571 | 1700 | 1 | 2.49E-05 | 25 | 1.47058824 | HERC2P10 |
| DMR15:31663601 | 15 | 31663601 | 31665200 | ID_662838 | 1600 | 1 | 7.64E-05 | 11 | 0.6875 | OTUD7A |
| DMR15:34097301 | 15 | 34097301 | 34098800 | ID_663614 | 1500 | 1 | 6.93E-07 | 19 | 1.26666667 | EMC7 |
| DMR15:35244801 | 15 | 35244801 | 35245300 | ID_663982 | 500 | 1 | 5.29E-05 | 5 | 1 | DPH6 |
| DMR15:35328101 | 15 | 35328101 | 35328800 | ID_664009 | 700 | 1 | 1.94E-05 | 3 | 0.42857143 | DPH6 |
| DMR15:36824701 | 15 | 36824701 | 36826400 | ID_664454 | 1700 | 1 | 4.36E-05 | 7 | 0.41176471 | |
| DMR15:36973701 | 15 | 36973701 | 36974500 | ID_664511 | 800 | 1 | 0.000092 | 8 | 1 | MEIS2 |
| DMR15:39012201 | 15 | 39012201 | 39015000 | ID_665143 | 2800 | 1 | 1.41E-05 | 36 | 1.28571429 | RP11-624L4.1 |
| DMR15:39172601 | 15 | 39172601 | 39173200 | ID_665189 | 600 | 1 | 4.38E-05 | 11 | 1.83333333 | RP11-265N7.2;RP11- |
| | | | | | | | | | | 624L4.1 |
| DMR15:41203901 | 15 | 41203901 | 41204400 | ID_665834 | 500 | 1 | 0.000027 | 7 | 1.4 | EXD1 |
| DMR15:41286701 | 15 | 41286701 | 41288100 | ID_665860 | 1400 | 1 | 1.88E-05 | 22 | 1.57142857 | OIP5-AS1 |
| DMR15:42802201 | 15 | 42802201 | 42804300 | ID_666342 | 2100 | 1 | 3.36E-05 | 26 | 1.23809524 | TTBK2;KRT8P50 |
| DMR15:42883301 | 15 | 42883301 | 42883500 | ID_666371 | 200 | 1 | 8.09E-06 | 5 | 2.5 | TTBK2 |
| DMR15:43270301 | 15 | 43270301 | 43273300 | ID_666495 | 3000 | 1 | 9.65E-05 | 21 | 0.7 | |
| DMR15:43833101 | 15 | 43833101 | 43835100 | ID_666681 | 2000 | 1 | 6.06E-05 | 32 | 1.6 | WDR76 |
| DMR15:44103501 | 15 | 44103501 | 44104000 | ID_666764 | 500 | 1 | 2.74E-05 | 2 | 0.4 | FRMD5 |
| DMR15:44270401 | 15 | 44270401 | 44271500 | ID_666819 | 1100 | 1 | 6.63E-05 | 6 | 0.54545455 | |
| DMR15:44363401 | 15 | 44363401 | 44365400 | ID_666850 | 2000 | 1 | 6.66E-05 | 25 | 1.25 | CASC4 |
| DMR15:44793901 | 15 | 44793901 | 44794100 | ID_666992 | 200 | 1 | 5.35E-05 | 0 | 0 | |
| DMR15:45563901 | 15 | 45563901 | 45566700 | ID_667217 | 2800 | 1 | 4.57E-05 | 29 | 1.03571429 | HMGN2P46 |
| DMR15:45651001 | 15 | 45651001 | 45652600 | ID_667241 | 1600 | 1 | 2.87E-05 | 47 | 2.9375 | RP11-96O20.4;SQRDL |
| DMR15:45884701 | 15 | 45884701 | 45886200 | ID_667316 | 1500 | 1 | 5.56E-05 | 31 | 2.06666667 | RP11-718O11.1 |
| DMR15:46767801 | 15 | 46767801 | 46768100 | ID_667567 | 300 | 1 | 5.67E-05 | 3 | 1 | RP11-627D16.1 |
| DMR15:46780701 | 15 | 46780701 | 46785500 | ID_667571 | 4800 | 1 | 4.33E-05 | 20 | 0.41666667 | RP11-627D16.1 |
| DMR15:46999801 | 15 | 46999801 | 47000000 | ID_667633 | 200 | 1 | 1.15E-05 | 3 | 1.5 | |
| DMR15:47638501 | 15 | 47638501 | 47638700 | ID_667825 | 200 | 1 | 0.000051 | 0 | 0 | SEMA6D |
| DMR15:53604201 | 15 | 53604201 | 53605700 | ID_669637 | 1500 | 1 | 6.18E-05 | 12 | 0.8 | WDR72 |
| DMR15:53805501 | 15 | 53805501 | 53807700 | ID_669695 | 2200 | 1 | 5.21E-05 | 9 | 0.40909091 | |
| DMR15:57007601 | 15 | 57007601 | 57008000 | ID_670668 | 400 | 1 | 9.87E-05 | 2 | 0.5 | TCF12 |
| DMR15:57090801 | 15 | 57090801 | 57091000 | ID_670691 | 200 | 1 | 2.24E-05 | 2 | 1 | TCF12 |
| DMR15:57722401 | 15 | 57722401 | 57726200 | ID_670896 | 3800 | 1 | 0.000057 | 45 | 1.18421053 | POLR2M |
| DMR15:58729901 | 15 | 58729901 | 58730200 | ID_671204 | 300 | 1 | 1.94E-05 | 7 | 2.33333333 | ADAM10 |
| DMR15:59135801 | 15 | 59135801 | 59136900 | ID_671326 | 1100 | 1 | 7.87E-05 | 13 | 1.18181818 | MYO1E |
| DMR15:59208601 | 15 | 59208601 | 59209500 | ID_671346 | 900 | 1 | 2.87E-05 | 10 | 1.11111111 | MYO1E |
| DMR15:59877501 | 15 | 59877501 | 59877700 | ID_671549 | 200 | 1 | 1.35E-05 | 1 | 0.5 | |
| DMR15:60203301 | 15 | 60203301 | 60204800 | ID_671640 | 1500 | 1 | 2.54E-06 | 21 | 1.4 | |
| DMR15:60696601 | 15 | 60696601 | 60697700 | ID_671801 | 1100 | 1 | 2.69E-06 | 12 | 1.09090909 | RORA |
| DMR15:60859501 | 15 | 60859501 | 60860700 | ID_671850 | 1200 | 1 | 0.000071 | 18 | 1.5 | RORA |
| DMR15:60874901 | 15 | 60874901 | 60875100 | ID_671856 | 200 | 1 | 9.24E-05 | 0 | 0 | RORA |
| DMR15:62556201 | 15 | 62556201 | 62558100 | ID_672367 | 1900 | 1 | 5.25E-05 | 21 | 1.10526316 | TLN2 |
| DMR15:62693701 | 15 | 62693701 | 62695100 | ID_672416 | 1400 | 1 | 5.29E-05 | 29 | 2.07142857 | TLN2 |
| DMR15:62893401 | 15 | 62893401 | 62893600 | ID_672480 | 200 | 1 | 4.55E-05 | 1 | 0.5 | |
| DMR15:62910401 | 15 | 62910401 | 62913400 | ID_672484 | 3000 | 1 | 6.82E-05 | 31 | 1.03333333 | |
| DMR15:63356301 | 15 | 63356301 | 63356500 | ID_672619 | 200 | 1 | 2.02E-05 | 6 | 3 | CA12 |
| DMR15:64494901 | 15 | 64494901 | 64495800 | ID_672988 | 900 | 1 | 9.25E-05 | 8 | 0.88888889 | ZNF609 |
| DMR15:66808501 | 15 | 66808501 | 66809400 | ID_673728 | 900 | 1 | 1.55E-06 | 23 | 2.55555556 | RP11-622C24.1 |
| DMR15:67337601 | 15 | 67337601 | 67337800 | ID_673899 | 200 | 1 | 1.73E-05 | 1 | 0.5 | IQCH |
| DMR15:68030801 | 15 | 68030801 | 68032200 | ID_674102 | 1400 | 1 | 9.84E-06 | 10 | 0.71428571 | |
| DMR15:68059101 | 15 | 68059101 | 68061100 | ID_674110 | 2000 | 1 | 1.08E-06 | 47 | 2.35 | PIAS1 |
| DMR15:69387601 | 15 | 69387601 | 69388200 | ID_674527 | 600 | 1 | 0.000079 | 7 | 1.16666667 | PAQR5 |
| DMR15:71416701 | 15 | 71416701 | 71420700 | ID_675141 | 4000 | 1 | 2.26E-05 | 16 | 0.4 | THSD4 |
| DMR15:71797501 | 15 | 71797501 | 71797900 | ID_675250 | 400 | 1 | 7.66E-05 | 8 | 2 | NR2E3 |
| DMR15:72893201 | 15 | 72893201 | 72893400 | ID_675599 | 200 | 1 | 2.12E-05 | 1 | 0.5 | |
| DMR15:73771801 | 15 | 73771801 | 73772100 | ID_675866 | 300 | 1 | 6.62E-05 | 5 | 1.66666667 | |
| DMR15:73775201 | 15 | 73775201 | 73775500 | ID_675867 | 300 | 2 | 3.11E-06 | 6 | 2 | |
| DMR15:74048001 | 15 | 74048001 | 74049300 | ID_675959 | 1300 | 1 | 5.59E-05 | 27 | 2.07692308 | |
| DMR15:76270601 | 15 | 76270601 | 76273200 | ID_676658 | 2600 | 1 | 5.63E-06 | 21 | 0.80769231 | ETFA |
| DMR15:76687501 | 15 | 76687501 | 76687900 | ID_676774 | 400 | 1 | 4.17E-05 | 5 | 1.25 | SCAPER |
| DMR15:78334201 | 15 | 78334201 | 78335700 | ID_677304 | 1500 | 1 | 7.63E-05 | 14 | 0.93333333 | |
| DMR15:78886901 | 15 | 78886901 | 78887100 | ID_677477 | 200 | 1 | 2.02E-06 | 3 | 1.5 | MORF4L1 |
| DMR15:79845301 | 15 | 79845301 | 79847000 | ID_677766 | 1700 | 1 | 4.34E-05 | 12 | 0.70588235 | ST20-MTHFS;MTHFS |
| DMR15:80635401 | 15 | 80635401 | 80636700 | ID_678016 | 1300 | 1 | 8.87E-05 | 9 | 0.69230769 | |
| DMR15:84016301 | 15 | 84016301 | 84016500 | ID_679043 | 200 | 1 | 4.59E-05 | 3 | 1.5 | ADAMTSL3 |
| DMR15:84226301 | 15 | 84226301 | 84227500 | ID_679114 | 1200 | 1 | 3.42E-05 | 7 | 0.58333333 | GOLGA2P7 |
| DMR15:85210001 | 15 | 85210001 | 85210100 | ID_679408 | 100 | 1 | 9.12E-05 | 0 | 0 | CSPG4P12;RP11-561C5.4; |
| | | | | | | | | | | RN7SL428P |
| DMR15:87676801 | 15 | 87676801 | 87677600 | ID_680136 | 800 | 1 | 5.44E-05 | 7 | 0.875 | RP11-648K4.2 |
| DMR15:88060601 | 15 | 88060601 | 88062700 | ID_680263 | 2100 | 1 | 5.65E-05 | 29 | 1.38095238 | NTRK3 |
| DMR15:88274701 | 15 | 88274701 | 88275000 | ID_680331 | 300 | 2 | 7.18E-05 | 4 | 1.33333333 | |
| DMR15:88362901 | 15 | 88362901 | 88366600 | ID_680362 | 3700 | 1 | 6.21E-05 | 40 | 1.08108108 | |
| DMR15:88930701 | 15 | 88930701 | 88931100 | ID_680548 | 400 | 3 | 9.67E-09 | 1 | 0.25 | |
| DMR15:91198101 | 15 | 91198101 | 91198800 | ID_681273 | 700 | 1 | 4.45E-05 | 10 | 1.42857143 | SV2B |
| DMR15:91503601 | 15 | 91503601 | 91505900 | ID_681370 | 2300 | 1 | 7.23E-06 | 18 | 0.7826087 | CRAT37 |
| DMR15:92862501 | 15 | 92862501 | 92863500 | ID_681816 | 1000 | 1 | 3.12E-05 | 17 | 1.7 | |
| DMR15:93229701 | 15 | 93229701 | 93229900 | ID_681934 | 200 | 1 | 6.87E-05 | 1 | 0.5 | |
| DMR15:93344901 | 15 | 93344901 | 93346200 | ID_681973 | 1300 | 1 | 2.85E-05 | 21 | 1.61538462 | RP11-266O8.1 |
| DMR15:94184201 | 15 | 94184201 | 94184800 | ID_682238 | 600 | 1 | 0.000061 | 7 | 1.16666667 | |
| DMR15:94238301 | 15 | 94238301 | 94239900 | ID_682254 | 1600 | 1 | 7.72E-07 | 10 | 0.625 | MCTP2 |
| DMR15:96176501 | 15 | 96176501 | 96176600 | ID_682858 | 100 | 1 | 5.57E-05 | 1 | 1 | NR2F2-AS1;RP11-759A24.3 |
| DMR15:97319501 | 15 | 97319501 | 97319800 | ID_683182 | 300 | 1 | 7.3E-06 | 4 | 1.33333333 | CTD-2147F2.1 |
| DMR15:97896201 | 15 | 97896201 | 97896400 | ID_683359 | 200 | 1 | 1.11E-05 | 4 | 2 | |
| DMR15:98993201 | 15 | 98993201 | 98993500 | ID_683727 | 300 | 1 | 6.38E-05 | 1 | 0.33333333 | RP11-654A16.3;PGPEP1L |
| DMR15:99410901 | 15 | 99410901 | 99412300 | ID_683840 | 1400 | 1 | 1.78E-05 | 29 | 2.07142857 | |
| DMR15:100178501 | 15 | 100178501 | 100179600 | ID_684088 | 1100 | 1 | 7.36E-06 | 8 | 0.72727273 | ADAMTS17 |
| DMR15:100379801 | 15 | 100379801 | 100380100 | ID_684153 | 300 | 1 | 3.75E-05 | 3 | 1 | CERS3-AS1 |
| DMR15:101772001 | 15 | 101772001 | 101774200 | ID_684595 | 2200 | 1 | 2.91E-05 | 37 | 1.68181818 | RN7SL209P;AC107977.2; |
| | | | | | | | | | | DNM1P47;GOLGA8VP |
| DMR16:411901 | 16 | 411901 | 412600 | ID_684791 | 700 | 1 | 4.32E-06 | 16 | 2.28571429 | DECR2 |
| DMR16:471301 | 16 | 471301 | 471800 | ID_684810 | 500 | 1 | 6.35E-05 | 17 | 3.4 | RAB11FIP3 |
| DMR16:545701 | 16 | 545701 | 546000 | ID_684837 | 300 | 1 | 2.77E-05 | 16 | 5.33333333 | CAPN15 |
| DMR16:627101 | 16 | 627101 | 634400 | ID_684860 | 7300 | 1 | 7.29E-05 | 361 | 4.94520548 | RAB40C;WFIKKN1 |
| DMR16:761001 | 16 | 761001 | 767100 | ID_684899 | 6100 | 1 | 9.88E-05 | 226 | 3.70491803 | MSLN |
| DMR16:1741801 | 16 | 1741801 | 1743500 | ID_685185 | 1700 | 1 | 3.2E-06 | 62 | 3.64705882 | MAPK8IP3 |
| DMR16:2134201 | 16 | 2134201 | 2137600 | ID_685306 | 3400 | 1 | 7.09E-05 | 222 | 6.52941177 | PKD1;MIR3180-5 |
| DMR16:2603101 | 16 | 2603101 | 2604700 | ID_685463 | 1600 | 5 | 6.45E-07 | 77 | 4.8125 | PDPK1;AC141586.5 |
| DMR16:2643701 | 16 | 2643701 | 2644900 | ID_685476 | 1200 | 1 | 9.69E-05 | 23 | 1.91666667 | CTD-3126B10.4 |
| DMR16:4200301 | 16 | 4200301 | 4206700 | ID_685960 | 6400 | 1 | 2.3E-06 | 130 | 2.03125 | SRL |
| DMR16:4283801 | 16 | 4283801 | 4286000 | ID_685988 | 2200 | 1 | 4.63E-05 | 33 | 1.5 | |
| DMR16:4372701 | 16 | 4372701 | 4374100 | ID_686014 | 1400 | 1 | 3.9E-06 | 20 | 1.42857143 | CORO7-PAM16;VASN; |
| | | | | | | | | | | CORO7 |
| DMR16:5463101 | 16 | 5463101 | 5463300 | ID_686371 | 200 | 1 | 3.56E-05 | 2 | 1 | RP11-420N3.3;RP11- |
| | | | | | | | | | | 420N3.2 |
| DMR16:5702201 | 16 | 5702201 | 5702400 | ID_686448 | 200 | 1 | 6.48E-06 | 2 | 1 | RP11-420N3.3 |
| DMR16:7352001 | 16 | 7352001 | 7353500 | ID_686987 | 1500 | 1 | 9.92E-05 | 18 | 1.2 | RBFOX1 |
| DMR16:7509601 | 16 | 7509601 | 7511000 | ID_687037 | 1400 | 1 | 8.02E-05 | 30 | 2.14285714 | RBFOX1 |
| DMR16:7523501 | 16 | 7523501 | 7523900 | ID_687042 | 400 | 1 | 1.52E-05 | 5 | 1.25 | RBFOX1 |
| DMR16:8214801 | 16 | 8214801 | 8216300 | ID_687253 | 1500 | 1 | 5.19E-05 | 11 | 0.73333333 | |
| DMR16:10342601 | 16 | 10342601 | 10345500 | ID_687924 | 2900 | 1 | 0.00005 | 32 | 1.10344828 | ATF7IP2 |
| DMR16:11045601 | 16 | 11045601 | 11047800 | ID_688124 | 2200 | 1 | 1.63E-05 | 24 | 1.09090909 | CLEC16A |
| DMR16:11189101 | 16 | 11189101 | 11190900 | ID_688170 | 1800 | 1 | 6.59E-05 | 32 | 1.77777778 | |
| DMR16:11232201 | 16 | 11232201 | 11232400 | ID_688183 | 200 | 1 | 8.75E-05 | 1 | 0.5 | |
| DMR16:14331201 | 16 | 14331201 | 14333700 | ID_689195 | 2500 | 1 | 8.07E-05 | 25 | 1 | |
| DMR16:14859901 | 16 | 14859901 | 14862600 | ID_689374 | 2700 | 1 | 4.07E-05 | 45 | 1.66666667 | NPIPA1;RP11-719K4.7; |
| | | | | | | | | | | NOMO1 |
| DMR16:14910901 | 16 | 14910901 | 14913700 | ID_689390 | 2800 | 5 | 9.51E-06 | 217 | 7.75 | RP11-958N24.1;NPIPA1; |
| | | | | | | | | | | MIR3180-1 |
| DMR16:15089401 | 16 | 15089401 | 15090400 | ID_689453 | 1000 | 1 | 0.000011 | 23 | 2.3 | RRN3;PDXDC1 |
| DMR16:15294001 | 16 | 15294001 | 15294800 | ID_689524 | 800 | 1 | 2.85E-05 | 19 | 2.375 | |
| DMR16:15372401 | 16 | 15372401 | 15373100 | ID_689546 | 700 | 1 | 1.47E-05 | 6 | 0.85714286 | NPIPA5 |
| DMR16:15571001 | 16 | 15571001 | 15571100 | ID_689613 | 100 | 1 | 2.5E-06 | 1 | 1 | C16orf45 |
| DMR16:16451801 | 16 | 16451801 | 16453800 | ID_689889 | 2000 | 1 | 2.69E-06 | 29 | 1.45 | |
| DMR16:17124401 | 16 | 17124401 | 17125000 | ID_690124 | 600 | 1 | 0.000088 | 6 | 1 | XYLT1 |
| DMR16:17322801 | 16 | 17322801 | 17325000 | ID_690185 | 2200 | 1 | 2.33E-05 | 35 | 1.59090909 | XYLT1 |
| DMR16:18323801 | 16 | 18323801 | 18325800 | ID_690520 | 2000 | 1 | 2.46E-05 | 36 | 1.8 | NPIPA8 |
| DMR16:18398601 | 16 | 18398601 | 18404400 | ID_690538 | 5800 | 1 | 3.77E-05 | 279 | 4.81034483 | MIR3180-3;PKD1P5 |
| DMR16:18601501 | 16 | 18601501 | 18601700 | ID_690589 | 200 | 1 | 5.69E-05 | 2 | 1 | |
| DMR16:18653401 | 16 | 18653401 | 18654900 | ID_690609 | 1500 | 1 | 0.000048 | 19 | 1.26666667 | |
| DMR16:19184001 | 16 | 19184001 | 19186200 | ID_690792 | 2200 | 1 | 9.6E-06 | 43 | 1.95454546 | SYT17 |
| DMR16:19307101 | 16 | 19307101 | 19307700 | ID_690835 | 600 | 1 | 2.6E-06 | 6 | 1 | AC003003.5;CLEC19A |
| DMR16:20876301 | 16 | 20876301 | 20879400 | ID_691314 | 3100 | 1 | 4.48E-05 | 28 | 0.90322581 | DCUN1D3;ERI2 |
| DMR16:21231701 | 16 | 21231701 | 21231900 | ID_691425 | 200 | 1 | 0.000096 | 1 | 0.5 | |
| DMR16:21465801 | 16 | 21465801 | 21467000 | ID_691500 | 1200 | 1 | 7.04E-05 | 13 | 1.08333333 | SMG1P3 |
| DMR16:21492901 | 16 | 21492901 | 21493200 | ID_691509 | 300 | 1 | 0.000023 | 0 | 0 | SMG1P3 |
| DMR16:21501601 | 16 | 21501601 | 21502500 | ID_691512 | 900 | 1 | 8.71E-05 | 116 | 12.8888889 | SMG1P3 |
| DMR16:21877201 | 16 | 21877201 | 21879000 | ID_691632 | 1800 | 1 | 1.51E-05 | 32 | 1.77777778 | NPIPB4 |
| DMR16:22409701 | 16 | 22409701 | 22412800 | ID_691800 | 3100 | 1 | 5.77E-05 | 28 | 0.90322581 | CDR2 |
| DMR16:22464701 | 16 | 22464701 | 22468500 | ID_691816 | 3800 | 1 | 0.000088 | 41 | 1.07894737 | SMG1P1 |
| DMR16:24260701 | 16 | 24260701 | 24260900 | ID_692369 | 200 | 1 | 5.88E-05 | 4 | 2 | CACNG3 |
| DMR16:24779901 | 16 | 24779901 | 24780800 | ID_692531 | 900 | 1 | 3.78E-05 | 4 | 0.44444444 | TNRC6A |
| DMR16:25382501 | 16 | 25382501 | 25383400 | ID_692713 | 900 | 1 | 9.56E-05 | 10 | 1.11111111 | |
| DMR16:26240901 | 16 | 26240901 | 26241900 | ID_692954 | 1000 | 1 | 8.11E-05 | 8 | 0.8 | |
| DMR16:29524001 | 16 | 29524001 | 29527400 | ID_694019 | 3400 | 1 | 0.000039 | 55 | 1.61764706 | AC133555.1 |
| DMR16:30038901 | 16 | 30038901 | 30039300 | ID_694186 | 400 | 1 | 4.73E-05 | 10 | 2.5 | FAM57B |
| DMR16:30621001 | 16 | 30621001 | 30622100 | ID_694361 | 1100 | 1 | 3.64E-05 | 10 | 0.90909091 | ZNF689 |
| DMR16:30734801 | 16 | 30734801 | 30735600 | ID_694398 | 800 | 1 | 3.71E-05 | 26 | 3.25 | RP11-2C24.9;SRCAP |
| DMR16:31436101 | 16 | 31436101 | 31436400 | ID_694620 | 300 | 1 | 3.93E-05 | 14 | 4.66666667 | ZNF843 |
| DMR16:31702301 | 16 | 31702301 | 31703000 | ID_694717 | 700 | 1 | 8.42E-05 | 5 | 0.71428571 | CLUHP3 |
| DMR16:32065801 | 16 | 32065801 | 32067200 | ID_694823 | 1400 | 1 | 3.63E-05 | 15 | 1.07142857 | RP11-1166P10.6; |
| | | | | | | | | | | IGHV3OR16-9 |
| DMR16:33904901 | 16 | 33904901 | 33909200 | ID_695368 | 4300 | 1 | 3.48E-05 | 62 | 1.44186047 | ARHGAP23P1 |
| DMR16:34946901 | 16 | 34946901 | 34949600 | ID_695628 | 2700 | 1 | 1.61E-05 | 97 | 3.59259259 | |
| DMR16:36391701 | 16 | 36391701 | 36392000 | ID_696031 | 300 | 1 | 4.34E-05 | 6 | 2 | |
| DMR16:37598701 | 16 | 37598701 | 37599900 | ID_696429 | 1200 | 1 | 0.000014 | 23 | 1.91666667 | |
| DMR16:38053001 | 16 | 38053001 | 38053900 | ID_696558 | 900 | 1 | 8.36E-05 | 18 | 2 | |
| DMR16:48659701 | 16 | 48659701 | 48660700 | ID_697318 | 1000 | 1 | 3.37E-05 | 2 | 0.2 | RP11-42I10.1 |
| DMR16:48913001 | 16 | 48913001 | 48913200 | ID_697399 | 200 | 1 | 9.46E-05 | 2 | 1 | |
| DMR16:49019901 | 16 | 49019901 | 49020900 | ID_697430 | 1000 | 1 | 1.08E-06 | 23 | 2.3 | |
| DMR16:51557301 | 16 | 51557301 | 51559100 | ID_698230 | 1800 | 1 | 4.61E-05 | 13 | 0.72222222 | |
| DMR16:52424701 | 16 | 52424701 | 52428100 | ID_698491 | 3400 | 1 | 6.41E-05 | 21 | 0.61764706 | |
| DMR16:53973101 | 16 | 53973101 | 53973400 | ID_698966 | 300 | 1 | 5.74E-05 | 4 | 1.33333333 | FTO |
| DMR16:54089601 | 16 | 54089601 | 54089900 | ID_699001 | 300 | 1 | 2.05E-05 | 2 | 0.66666667 | FTO |
| DMR16:54576901 | 16 | 54576901 | 54577700 | ID_699159 | 800 | 1 | 3.75E-05 | 21 | 2.625 | |
| DMR16:55544501 | 16 | 55544501 | 55546000 | ID_699458 | 1500 | 1 | 1.22E-05 | 7 | 0.46666667 | LPCAT2 |
| DMR16:56885801 | 16 | 56885801 | 56886900 | ID_699910 | 1100 | 1 | 7.26E-05 | 19 | 1.72727273 | SLC12A3 |
| DMR16:57029901 | 16 | 57029901 | 57030900 | ID_699953 | 1000 | 1 | 1.51E-06 | 6 | 0.6 | NLRC5 |
| DMR16:58353501 | 16 | 58353501 | 58354100 | ID_700379 | 600 | 1 | 0.000064 | 4 | 0.66666667 | GINS3 |
| DMR16:60535101 | 16 | 60535101 | 60535300 | ID_701005 | 200 | 1 | 6.94E-05 | 1 | 0.5 | |
| DMR16:61463701 | 16 | 61463701 | 61464900 | ID_701277 | 1200 | 2 | 2.76E-06 | 2 | 0.16666667 | |
| DMR16:62150101 | 16 | 62150101 | 62151000 | ID_701479 | 900 | 1 | 9.23E-05 | 6 | 0.66666667 | |
| DMR16:62797001 | 16 | 62797001 | 62797700 | ID_701656 | 700 | 1 | 3.05E-05 | 11 | 1.57142857 | |
| DMR16:63966201 | 16 | 63966201 | 63966500 | ID_701967 | 300 | 1 | 7.34E-05 | 11 | 3.66666667 | |
| DMR16:64001601 | 16 | 64001601 | 64002200 | ID_701977 | 600 | 1 | 1.51E-06 | 5 | 0.83333333 | |
| DMR16:66895801 | 16 | 66895801 | 66896200 | ID_702839 | 400 | 1 | 9.59E-05 | 6 | 1.5 | |
| DMR16:67421201 | 16 | 67421201 | 67422800 | ID_703025 | 1600 | 1 | 4.81E-05 | 24 | 1.5 | |
| DMR16:67696301 | 16 | 67696301 | 67696600 | ID_703107 | 300 | 1 | 2.11E-06 | 12 | 4 | GFOD2 |
| DMR16:68240501 | 16 | 68240501 | 68242200 | ID_703272 | 1700 | 1 | 2.01E-05 | 50 | 2.94117647 | |
| DMR16:68355601 | 16 | 68355601 | 68357100 | ID_703311 | 1500 | 1 | 6.77E-05 | 51 | 3.4 | PRMT7 |
| DMR16:68669501 | 16 | 68669501 | 68670400 | ID_703411 | 900 | 1 | 9.14E-06 | 14 | 1.55555556 | CDH3 |
| DMR16:69138801 | 16 | 69138801 | 69139100 | ID_703571 | 300 | 1 | 6.52E-06 | 3 | 1 | CIRH1A |
| DMR16:70080601 | 16 | 70080601 | 70082600 | ID_703865 | 2000 | 1 | 2.23E-06 | 33 | 1.65 | |
| DMR16:70137601 | 16 | 70137601 | 70139300 | ID_703886 | 1700 | 1 | 1.59E-05 | 34 | 2 | PDPR |
| DMR16:71390801 | 16 | 71390801 | 71391400 | ID_704266 | 600 | 1 | 3.74E-05 | 18 | 3 | |
| DMR16:71693801 | 16 | 71693801 | 71694800 | ID_704360 | 1000 | 1 | 7.87E-05 | 8 | 0.8 | PHLPP2 |
| DMR16:73713701 | 16 | 73713701 | 73715700 | ID_704960 | 2000 | 1 | 1.45E-05 | 34 | 1.7 | |
| DMR16:73814401 | 16 | 73814401 | 73815800 | ID_704988 | 1400 | 1 | 7.64E-05 | 17 | 1.21428571 | RP11-53L24.1 |
| DMR16:75737601 | 16 | 75737601 | 75737900 | ID_705596 | 300 | 1 | 1.81E-05 | 1 | 0.33333333 | TERF2IP |
| DMR16:76629401 | 16 | 76629401 | 76630000 | ID_705852 | 600 | 1 | 6.58E-05 | 1 | 0.16666667 | RP11-58C22.1 |
| DMR16:76895401 | 16 | 76895401 | 76896300 | ID_705938 | 900 | 1 | 0.00002 | 9 | 1 | CTD-2336H13.2 |
| DMR16:77769401 | 16 | 77769401 | 77770500 | ID_706206 | 1100 | 1 | 4.73E-05 | 9 | 0.81818182 | |
| DMR16:78767501 | 16 | 78767501 | 78767800 | ID_706535 | 300 | 1 | 4.06E-05 | 5 | 1.66666667 | WWOX |
| DMR16:80111401 | 16 | 80111401 | 80112600 | ID_706975 | 1200 | 1 | 0.000049 | 5 | 0.41666667 | RP11-525K10.1 |
| DMR16:80942901 | 16 | 80942901 | 80945500 | ID_707232 | 2600 | 1 | 3.74E-05 | 33 | 1.26923077 | |
| DMR16:82266401 | 16 | 82266401 | 82268200 | ID_707652 | 1800 | 1 | 0.000068 | 8 | 0.44444444 | |
| DMR16:83235901 | 16 | 83235901 | 83236900 | ID_707958 | 1000 | 1 | 0.000053 | 4 | 0.4 | CDH13 |
| DMR16:83300801 | 16 | 83300801 | 83301700 | ID_707980 | 900 | 1 | 1.28E-05 | 26 | 2.88888889 | CDH13 |
| DMR16:83425001 | 16 | 83425001 | 83428300 | ID_708021 | 3300 | 1 | 0.000062 | 33 | 1 | CDH13 |
| DMR16:85626101 | 16 | 85626101 | 85629700 | ID_708718 | 3600 | 1 | 5.88E-05 | 112 | 3.11111111 | GSE1 |
| DMR16:85972901 | 16 | 85972901 | 85974100 | ID_708833 | 1200 | 2 | 3.25E-05 | 95 | 7.91666667 | |
| DMR16:86653401 | 16 | 86653401 | 86655300 | ID_709061 | 1900 | 1 | 5.45E-05 | 50 | 2.63157895 | RP11-58A18.1 |
| DMR16:87112301 | 16 | 87112301 | 87112700 | ID_709201 | 400 | 1 | 0.000078 | 7 | 1.75 | C16orf95 |
| DMR16:87152201 | 16 | 87152201 | 87153500 | ID_709216 | 1300 | 1 | 1.92E-06 | 33 | 2.53846154 | C16orf95 |
| DMR16:87355501 | 16 | 87355501 | 87357400 | ID_709282 | 1900 | 1 | 1.46E-05 | 42 | 2.21052632 | FBXO31 |
| DMR16:88359301 | 16 | 88359301 | 88360000 | ID_709626 | 700 | 1 | 4.38E-05 | 13 | 1.85714286 | |
| DMR16:89081801 | 16 | 89081801 | 89085400 | ID_709865 | 3600 | 1 | 8.18E-05 | 135 | 3.75 | |
| DMR16:89097601 | 16 | 89097601 | 89098000 | ID_709872 | 400 | 1 | 3.88E-05 | 13 | 3.25 | ACSF3 |
| DMR16:90039801 | 16 | 90039801 | 90044200 | ID_710158 | 4400 | 1 | 5.69E-05 | 135 | 3.06818182 | GAS8;URAHP |
| DMR17:121701 | 17 | 121701 | 128000 | ID_710239 | 6300 | 2 | 1.17E-05 | 115 | 1.82539683 | |
| DMR17:505901 | 17 | 505901 | 507500 | ID_710349 | 1600 | 1 | 7.28E-06 | 41 | 2.5625 | RP5-1029F21.3 |
| DMR17:1939501 | 17 | 1939501 | 1943700 | ID_710813 | 4200 | 1 | 5.29E-05 | 117 | 2.78571429 | RTN4RL1 |
| DMR17:2487901 | 17 | 2487901 | 2490000 | ID_710987 | 2100 | 1 | 9.79E-06 | 36 | 1.71428571 | METTL16 |
| DMR17:3091001 | 17 | 3091001 | 3091700 | ID_711191 | 700 | 1 | 1.25E-05 | 6 | 0.85714286 | |
| DMR17:3295401 | 17 | 3295401 | 3297300 | ID_711255 | 1900 | 1 | 2.47E-05 | 13 | 0.68421053 | RP11-64J4.2 |
| DMR17:3686001 | 17 | 3686001 | 3687000 | ID_711381 | 1000 | 1 | 8.2E-06 | 63 | 6.3 | P2RX5;P2RX5-TAX1BP3 |
| DMR17:3917201 | 17 | 3917201 | 3918100 | ID_711463 | 900 | 1 | 5.06E-05 | 17 | 1.88888889 | |
| DMR17:4586001 | 17 | 4586001 | 4586800 | ID_711680 | 800 | 1 | 1.08E-05 | 12 | 1.5 | SMTNL2 |
| DMR17:5180001 | 17 | 5180001 | 5181300 | ID_711889 | 1300 | 1 | 5.45E-05 | 14 | 1.07692308 | ZNF594 |
| DMR17:5298001 | 17 | 5298001 | 5298200 | ID_711925 | 200 | 1 | 2.14E-05 | 1 | 0.5 | RABEP1 |
| DMR17:5739301 | 17 | 5739301 | 5739500 | ID_712060 | 200 | 1 | 4.48E-05 | 1 | 0.5 | |
| DMR17:7716501 | 17 | 7716501 | 7718500 | ID_712686 | 2000 | 1 | 1.83E-05 | 91 | 4.55 | DNAH2 |
| DMR17:8484101 | 17 | 8484101 | 8484300 | ID_712935 | 200 | 1 | 9.56E-05 | 2 | 1 | NDEL1;MYH10 |
| DMR17:8720401 | 17 | 8720401 | 8721000 | ID_713007 | 600 | 1 | 2.61E-05 | 11 | 1.83333333 | |
| DMR17:8836901 | 17 | 8836901 | 8839400 | ID_713044 | 2500 | 2 | 3.82E-06 | 53 | 2.12 | PIK3R6 |
| DMR17:8850701 | 17 | 8850701 | 8851300 | ID_713047 | 600 | 1 | 1.11E-05 | 12 | 2 | PIK3R6 |
| DMR17:10611401 | 17 | 10611401 | 10611700 | ID_713617 | 300 | 1 | 1.67E-06 | 7 | 2.33333333 | MYHAS;CTC-297N7.7 |
| DMR17:12794501 | 17 | 12794501 | 12795100 | ID_714282 | 600 | 1 | 8.79E-05 | 3 | 0.5 | ARHGAP44 |
| DMR17:13852801 | 17 | 13852801 | 13853200 | ID_714600 | 400 | 1 | 8.08E-05 | 2 | 0.5 | COX10-AS1 |
| DMR17:14774501 | 17 | 14774501 | 14774700 | ID_714887 | 200 | 1 | 3.69E-05 | 1 | 0.5 | AC005863.1 |
| DMR17:15302201 | 17 | 15302201 | 15305200 | ID_715062 | 3000 | 1 | 1.17E-05 | 34 | 1.13333333 | TEKT3 |
| DMR17:15486701 | 17 | 15486701 | 15488900 | ID_715121 | 2200 | 1 | 0.000065 | 24 | 1.09090909 | CDRT4;TVP23C-CDRT4 |
| DMR17:15819901 | 17 | 15819901 | 15821800 | ID_715225 | 1900 | 1 | 9.17E-05 | 40 | 2.10526316 | |
| DMR17:16226901 | 17 | 16226901 | 16230300 | ID_715349 | 3400 | 1 | 7.91E-05 | 58 | 1.70588235 | PIGL |
| DMR17:17147001 | 17 | 17147001 | 17148200 | ID_715634 | 1200 | 1 | 7.76E-05 | 22 | 1.83333333 | MPRIP |
| DMR17:17518201 | 17 | 17518201 | 17519400 | ID_715748 | 1200 | 1 | 6.13E-05 | 24 | 2 | PEMT |
| DMR17:18439601 | 17 | 18439601 | 18441600 | ID_716065 | 2000 | 1 | 6.21E-05 | 52 | 2.6 | KRT16P1 |
| DMR17:18568201 | 17 | 18568201 | 18569000 | ID_716101 | 800 | 1 | 3.76E-05 | 17 | 2.125 | CCDC144B |
| DMR17:19616201 | 17 | 19616201 | 19617200 | ID_716444 | 1000 | 1 | 5.38E-05 | 3 | 0.3 | CTD-2104P17.1 |
| DMR17:19665901 | 17 | 19665901 | 19666200 | ID_716462 | 300 | 1 | 0.000038 | 2 | 0.66666667 | ALDH3A2 |
| DMR17:21002201 | 17 | 21002201 | 21006500 | ID_716869 | 4300 | 1 | 4.07E-05 | 95 | 2.20930233 | CCDC144NL-AS1;USP22 |
| DMR17:22048101 | 17 | 22048101 | 22050400 | ID_717165 | 2300 | 1 | 4.96E-06 | 22 | 0.95652174 | |
| DMR17:25512301 | 17 | 25512301 | 25512400 | ID_717795 | 100 | 1 | 0.000024 | 4 | 4 | |
| DMR17:26100801 | 17 | 26100801 | 26101100 | ID_717879 | 300 | 1 | 2.01E-06 | 8 | 2.66666667 | |
| DMR17:26792001 | 17 | 26792001 | 26812800 | ID_718006 | 20800 | 1 | 2.92E-05 | 565 | 2.71634615 | |
| DMR17:26823401 | 17 | 26823401 | 26853400 | ID_718008 | 30000 | 1 | 1.74E-08 | 821 | 2.73666667 | |
| DMR17:27429401 | 17 | 27429401 | 27430200 | ID_718165 | 800 | 1 | 0.000026 | 17 | 2.125 | TBC1D3P5 |
| DMR17:28067601 | 17 | 28067601 | 28068700 | ID_718356 | 1100 | 1 | 4.47E-05 | 10 | 0.90909091 | NLK |
| DMR17:29249901 | 17 | 29249901 | 29250100 | ID_718721 | 200 | 1 | 8.11E-05 | 0 | 0 | CRYBA1 |
| DMR17:30857701 | 17 | 30857701 | 30861700 | ID_719251 | 4000 | 1 | 0.000095 | 67 | 1.675 | ATAD5;CTD-2349P21.11 |
| DMR17:30884301 | 17 | 30884301 | 30885400 | ID_719257 | 1100 | 1 | 4.96E-05 | 25 | 2.27272727 | ATAD5 |
| DMR17:31771501 | 17 | 31771501 | 31774300 | ID_719531 | 2800 | 1 | 6.54E-05 | 37 | 1.32142857 | |
| DMR17:32276701 | 17 | 32276701 | 32277500 | ID_719704 | 800 | 1 | 0.000088 | 15 | 1.875 | RHBDL3 |
| DMR17:33005801 | 17 | 33005801 | 33006900 | ID_719935 | 1100 | 1 | 3.54E-05 | 12 | 1.09090909 | |
| DMR17:33302801 | 17 | 33302801 | 33303700 | ID_720039 | 900 | 1 | 6.05E-05 | 6 | 0.66666667 | ASIC2 |
| DMR17:35482501 | 17 | 35482501 | 35482700 | ID_720728 | 200 | 1 | 0.000066 | 4 | 2 | SLFN12L |
| DMR17:35874601 | 17 | 35874601 | 35877800 | ID_720845 | 3200 | 1 | 5.92E-05 | 22 | 0.6875 | CCL5;AC015849.2 |
| DMR17:36399301 | 17 | 36399301 | 36401900 | ID_721018 | 2600 | 1 | 2.52E-05 | 24 | 0.92307692 | |
| DMR17:36405301 | 17 | 36405301 | 36407300 | ID_721020 | 2000 | 1 | 3.37E-05 | 29 | 1.45 | |
| DMR17:36558501 | 17 | 36558501 | 36560300 | ID_721067 | 1800 | 1 | 8.83E-05 | 29 | 1.61111111 | GGNBP2 |
| DMR17:36580101 | 17 | 36580101 | 36581700 | ID_721076 | 1600 | 1 | 8.99E-05 | 40 | 2.5 | GGNBP2 |
| DMR17:39593201 | 17 | 39593201 | 39595600 | ID_722069 | 2400 | 1 | 3.13E-05 | 22 | 0.91666667 | |
| DMR17:40314201 | 17 | 40314201 | 40315600 | ID_722298 | 1400 | 1 | 1.98E-05 | 10 | 0.71428571 | RARA |
| DMR17:40905201 | 17 | 40905201 | 40905700 | ID_722481 | 500 | 1 | 3.79E-05 | 7 | 1.4 | |
| DMR17:41364501 | 17 | 41364501 | 41367200 | ID_722614 | 2700 | 1 | 5.74E-05 | 48 | 1.77777778 | KRT33B |
| DMR17:41516201 | 17 | 41516201 | 41520900 | ID_722664 | 4700 | 1 | 4.89E-05 | 68 | 1.44680851 | KRT15;MIR6510 |
| DMR17:43184701 | 17 | 43184701 | 43185200 | ID_723201 | 500 | 1 | 7.06E-05 | 10 | 2 | NBR1 |
| DMR17:43223401 | 17 | 43223401 | 43224600 | ID_723212 | 1200 | 1 | 0.000098 | 12 | 1 | LINC00854 |
| DMR17:46264601 | 17 | 46264601 | 46266400 | ID_724174 | 1800 | 1 | 1.64E-05 | 36 | 2 | |
| DMR17:46330901 | 17 | 46330901 | 46331100 | ID_724195 | 200 | 1 | 1.19E-06 | 6 | 3 | ARL17B;LRRC37A |
| DMR17:46382701 | 17 | 46382701 | 46384300 | ID_724212 | 1600 | 2 | 1.94E-05 | 14 | 0.875 | NSFP1 |
| DMR17:46511801 | 17 | 46511801 | 46512900 | ID_724247 | 1100 | 1 | 5.48E-05 | 27 | 2.45454546 | LRRC37A2 |
| DMR17:46840701 | 17 | 46840701 | 46841900 | ID_724342 | 1200 | 1 | 3.37E-05 | 36 | 3 | WNT9B |
| DMR17:48032801 | 17 | 48032801 | 48033600 | ID_724727 | 800 | 1 | 9.42E-06 | 9 | 1.125 | COPZ2 |
| DMR17:50084301 | 17 | 50084301 | 50084400 | ID_725388 | 100 | 1 | 8.28E-05 | 1 | 1 | ITGA3 |
| DMR17:50187301 | 17 | 50187301 | 50189400 | ID_725425 | 2100 | 1 | 0.000027 | 41 | 1.95238095 | COL1A1 |
| DMR17:50257701 | 17 | 50257701 | 50259100 | ID_725446 | 1400 | 1 | 7.96E-05 | 26 | 1.85714286 | |
| DMR17:52255201 | 17 | 52255201 | 52255700 | ID_726045 | 500 | 1 | 8.46E-05 | 13 | 2.6 | |
| DMR17:55247301 | 17 | 55247301 | 55250800 | ID_726903 | 3500 | 1 | 4.6E-06 | 39 | 1.11428571 | |
| DMR17:55365601 | 17 | 55365601 | 55366300 | ID_726938 | 700 | 1 | 7.48E-05 | 8 | 1.14285714 | |
| DMR17:55491101 | 17 | 55491101 | 55492400 | ID_726975 | 1300 | 1 | 5.25E-06 | 18 | 1.38461539 | RP11-515E23.1 |
| DMR17:56613801 | 17 | 56613801 | 56614000 | ID_727313 | 200 | 1 | 3.76E-05 | 0 | 0 | |
| DMR17:56647701 | 17 | 56647701 | 56648300 | ID_727325 | 600 | 1 | 0.000068 | 1 | 0.16666667 | |
| DMR17:56659701 | 17 | 56659701 | 56661700 | ID_727327 | 2000 | 1 | 7.05E-05 | 16 | 0.8 | |
| DMR17:57466401 | 17 | 57466401 | 57466600 | ID_727580 | 200 | 1 | 9.26E-06 | 3 | 1.5 | MSI2 |
| DMR17:58826301 | 17 | 58826301 | 58828100 | ID_727997 | 1800 | 1 | 4.19E-06 | 36 | 2 | PPM1E |
| DMR17:59532201 | 17 | 59532201 | 59532800 | ID_728232 | 600 | 1 | 5.48E-05 | 21 | 3.5 | |
| DMR17:62183901 | 17 | 62183901 | 62184300 | ID_729048 | 400 | 1 | 9.87E-06 | 25 | 6.25 | |
| DMR17:62581901 | 17 | 62581901 | 62584200 | ID_729178 | 2300 | 1 | 3.67E-05 | 25 | 1.08695652 | TLK2 |
| DMR17:62799701 | 17 | 62799701 | 62800700 | ID_729252 | 1000 | 1 | 4.92E-05 | 15 | 1.5 | 42804 |
| DMR17:63185801 | 17 | 63185801 | 63186300 | ID_729368 | 500 | 1 | 3.74E-05 | 1 | 0.2 | TANC2 |
| DMR17:63414701 | 17 | 63414701 | 63415000 | ID_729433 | 300 | 1 | 3.18E-05 | 2 | 0.66666667 | RP11-269G24.3;TANC2 |
| DMR17:63800801 | 17 | 63800801 | 63801000 | ID_729566 | 200 | 1 | 8.06E-05 | 0 | 0 | DDX42 |
| DMR17:63815401 | 17 | 63815401 | 63815700 | ID_729573 | 300 | 1 | 6.81E-05 | 5 | 1.66666667 | DDX42 |
| DMR17:64136201 | 17 | 64136201 | 64137000 | ID_729686 | 800 | 1 | 6.08E-05 | 13 | 1.625 | |
| DMR17:64235901 | 17 | 64235901 | 64236100 | ID_729719 | 200 | 1 | 6.79E-05 | 1 | 0.5 | TEX2 |
| DMR17:65412301 | 17 | 65412301 | 65413200 | ID_730084 | 900 | 1 | 5.15E-05 | 6 | 0.66666667 | |
| DMR17:68151901 | 17 | 68151901 | 68152800 | ID_730908 | 900 | 2 | 4.81E-05 | 30 | 3.33333333 | RP11-147L13.7; |
| | | | | | | | | | | LRRC37A16P |
| DMR17:69912401 | 17 | 69912401 | 69913100 | ID_731425 | 700 | 1 | 9.55E-06 | 11 | 1.57142857 | |
| DMR17:70183001 | 17 | 70183001 | 70183800 | ID_731510 | 800 | 1 | 8.77E-05 | 5 | 0.625 | |
| DMR17:70298401 | 17 | 70298401 | 70298700 | ID_731549 | 300 | 1 | 1.68E-05 | 3 | 1 | |
| DMR17:70460001 | 17 | 70460001 | 70460600 | ID_731602 | 600 | 1 | 9.69E-05 | 12 | 2 | |
| DMR17:71240401 | 17 | 71240401 | 71242100 | ID_731828 | 1700 | 1 | 2.28E-05 | 10 | 0.58823529 | |
| DMR17:71245601 | 17 | 71245601 | 71245800 | ID_731830 | 200 | 1 | 6.94E-05 | 5 | 2.5 | |
| DMR17:71304401 | 17 | 71304401 | 71305100 | ID_731851 | 700 | 1 | 9.26E-05 | 7 | 1 | |
| DMR17:72697201 | 17 | 72697201 | 72698100 | ID_732292 | 900 | 1 | 6.14E-05 | 14 | 1.55555556 | SLC39A11 |
| DMR17:72776601 | 17 | 72776601 | 72777700 | ID_732319 | 1100 | 1 | 6.64E-05 | 16 | 1.45454546 | SLC39A11 |
| DMR17:72794601 | 17 | 72794601 | 72794800 | ID_732326 | 200 | 1 | 3.77E-05 | 1 | 0.5 | SLC39A11 |
| DMR17:73906701 | 17 | 73906701 | 73908100 | ID_732683 | 1400 | 1 | 4.78E-05 | 25 | 1.78571429 | CTD-2582D11.1 |
| DMR17:75024001 | 17 | 75024001 | 75027000 | ID_733054 | 3000 | 1 | 6.08E-06 | 38 | 1.26666667 | |
| DMR17:76573201 | 17 | 76573201 | 76573900 | ID_733545 | 700 | 1 | 2.61E-05 | 16 | 2.28571429 | ST6GALNAC2 |
| DMR17:77032401 | 17 | 77032401 | 77033400 | ID_733706 | 1000 | 1 | 3.15E-05 | 15 | 1.5 | |
| DMR17:78121801 | 17 | 78121801 | 78123900 | ID_734044 | 2100 | 1 | 6.07E-05 | 42 | 2 | TMC6 |
| DMR17:78627701 | 17 | 78627701 | 78630200 | ID_734216 | 2500 | 1 | 9.75E-05 | 74 | 2.96 | CTD-2357A8.3 |
| DMR17:79420301 | 17 | 79420301 | 79422900 | ID_734484 | 2600 | 1 | 0.000076 | 66 | 2.53846154 | RBFOX3 |
| DMR17:80373501 | 17 | 80373501 | 80375400 | ID_734806 | 1900 | 1 | 2.52E-05 | 41 | 2.15789474 | CTD-2047H16.4;RNF213 |
| DMR17:80900901 | 17 | 80900901 | 80901100 | ID_734976 | 200 | 1 | 1.62E-06 | 4 | 2 | RPTOR |
| DMR17:81299201 | 17 | 81299201 | 81301400 | ID_735117 | 2200 | 1 | 2.61E-05 | 62 | 2.81818182 | |
| DMR17:81985501 | 17 | 81985501 | 81986300 | ID_735320 | 800 | 1 | 4.44E-05 | 15 | 1.875 | ASPSCR1 |
| DMR17:82300901 | 17 | 82300901 | 82305200 | ID_735421 | 4300 | 1 | 4.5E-06 | 138 | 3.20930233 | |
| DMR17:82753501 | 17 | 82753501 | 82755000 | ID_735558 | 1500 | 1 | 4.37E-05 | 41 | 2.73333333 | TBCD |
| DMR17:82759601 | 17 | 82759601 | 82762600 | ID_735560 | 3000 | 1 | 9.65E-05 | 55 | 1.83333333 | TBCD |
| DMR17:82848601 | 17 | 82848601 | 82848800 | ID_735590 | 200 | 1 | 6.03E-05 | 3 | 1.5 | TBCD |
| DMR18:511101 | 18 | 511101 | 511200 | ID_735888 | 100 | 1 | 4.55E-05 | 3 | 3 | RP11-14P20.1 |
| DMR18:2109201 | 18 | 2109201 | 2109300 | ID_736368 | 100 | 1 | 0.00005 | 2 | 2 | RP11-161I6.2 |
| DMR18:3590801 | 18 | 3590801 | 3591100 | ID_736829 | 300 | 1 | 6.69E-05 | 4 | 1.33333333 | DLGAP1 |
| DMR18:3997401 | 18 | 3997401 | 3998300 | ID_736955 | 900 | 1 | 2.03E-06 | 2 | 0.22222222 | DLGAP1-AS4;DLGAP1 |
| DMR18:6995901 | 18 | 6995901 | 6996800 | ID_737866 | 900 | 1 | 7.09E-06 | 10 | 1.11111111 | LAMA1 |
| DMR18:8634901 | 18 | 8634901 | 8635100 | ID_738383 | 200 | 2 | 1.21E-05 | 1 | 0.5 | RAB12 |
| DMR18:8788801 | 18 | 8788801 | 8790000 | ID_738434 | 1200 | 1 | 8.66E-05 | 15 | 1.25 | MTCL1 |
| DMR18:10410601 | 18 | 10410601 | 10411700 | ID_738945 | 1100 | 1 | 7.55E-05 | 9 | 0.81818182 | LINC01254 |
| DMR18:10739801 | 18 | 10739801 | 10741400 | ID_739039 | 1600 | 1 | 2.9E-06 | 20 | 1.25 | PIEZO2 |
| DMR18:10924001 | 18 | 10924001 | 10925600 | ID_739099 | 1600 | 1 | 5.22E-05 | 13 | 0.8125 | PIEZO2 |
| DMR18:11215301 | 18 | 11215301 | 11218200 | ID_739188 | 2900 | 1 | 2.79E-06 | 34 | 1.17241379 | |
| DMR18:11801901 | 18 | 11801901 | 11802600 | ID_739372 | 700 | 1 | 4.16E-05 | 7 | 1 | GNAL |
| DMR18:14313801 | 18 | 14313801 | 14315400 | ID_740155 | 1600 | 1 | 1.54E-05 | 8 | 0.5 | |
| DMR18:14484901 | 18 | 14484901 | 14490000 | ID_740203 | 5100 | 2 | 1.18E-05 | 181 | 3.54901961 | CXADRP3;GRAMD4P7 |
| DMR18:14721701 | 18 | 14721701 | 14723000 | ID_740268 | 1300 | 1 | 8.75E-05 | 7 | 0.53846154 | |
| DMR18:14842801 | 18 | 14842801 | 14843000 | ID_740304 | 200 | 1 | 1.73E-05 | 1 | 0.5 | ANKRD30B |
| DMR18:15338101 | 18 | 15338101 | 15338400 | ID_740449 | 300 | 1 | 9.31E-05 | 1 | 0.33333333 | |
| DMR18:15705801 | 18 | 15705801 | 15706000 | ID_740542 | 200 | 1 | 3.61E-05 | 5 | 2.5 | |
| DMR18:21103501 | 18 | 21103501 | 21105400 | ID_741805 | 1900 | 1 | 2.5E-06 | 29 | 1.52631579 | ROCK1 |
| DMR18:21379401 | 18 | 21379401 | 21381500 | ID_741895 | 2100 | 1 | 5.18E-05 | 39 | 1.85714286 | RP11-296E23.1;GREB1L |
| DMR18:21598401 | 18 | 21598401 | 21600600 | ID_741973 | 2200 | 1 | 9.03E-05 | 101 | 4.59090909 | ESCO1 |
| DMR18:23499601 | 18 | 23499601 | 23500700 | ID_742556 | 1100 | 1 | 5.71E-05 | 19 | 1.72727273 | |
| DMR18:26562101 | 18 | 26562101 | 26564500 | ID_743500 | 2400 | 1 | 0.000092 | 18 | 0.75 | KCTD1 |
| DMR18:26620401 | 18 | 26620401 | 26621100 | ID_743519 | 700 | 1 | 7.57E-05 | 25 | 3.57142857 | KCTD1 |
| DMR18:30755901 | 18 | 30755901 | 30756600 | ID_744650 | 700 | 1 | 9.45E-05 | 2 | 0.28571429 | |
| DMR18:32116401 | 18 | 32116401 | 32117900 | ID_745058 | 1500 | 1 | 2.03E-05 | 19 | 1.26666667 | RNF138 |
| DMR18:33844601 | 18 | 33844601 | 33844800 | ID_745550 | 200 | 1 | 4.85E-05 | 1 | 0.5 | |
| DMR18:38918901 | 18 | 38918901 | 38919700 | ID_747087 | 800 | 1 | 5.28E-05 | 4 | 0.5 | |
| DMR18:40536501 | 18 | 40536501 | 40536700 | ID_747549 | 200 | 1 | 3.75E-05 | 1 | 0.5 | |
| DMR18:41850201 | 18 | 41850201 | 41851000 | ID_747915 | 800 | 1 | 2.27E-05 | 6 | 0.75 | |
| DMR18:45460301 | 18 | 45460301 | 45461200 | ID_748940 | 900 | 1 | 7.42E-05 | 2 | 0.22222222 | SLC14A2-AS1;SLC14A2 |
| DMR18:46969701 | 18 | 46969701 | 46969900 | ID_749415 | 200 | 2 | 2.87E-05 | 18 | 9 | TCEB3CL;KATNAL2 |
| DMR18:47577201 | 18 | 47577201 | 47578600 | ID_749576 | 1400 | 1 | 3.38E-05 | 22 | 1.57142857 | CTD-2130O13.1 |
| DMR18:48327801 | 18 | 48327801 | 48328300 | ID_749825 | 500 | 1 | 5.96E-07 | 15 | 3 | ZBTB7C |
| DMR18:48498501 | 18 | 48498501 | 48498700 | ID_749878 | 200 | 1 | 3.03E-05 | 0 | 0 | |
| DMR18:48727901 | 18 | 48727901 | 48730700 | ID_749953 | 2800 | 1 | 5.77E-05 | 46 | 1.64285714 | CTIF |
| DMR18:53316501 | 18 | 53316501 | 53318700 | ID_751336 | 2200 | 1 | 3.26E-05 | 13 | 0.59090909 | DCC |
| DMR18:53619501 | 18 | 53619501 | 53619700 | ID_751418 | 200 | 1 | 8.08E-05 | 11 | 5.5 | |
| DMR18:57970401 | 18 | 57970401 | 57972200 | ID_752722 | 1800 | 1 | 9.64E-05 | 25 | 1.38888889 | |
| DMR18:58115801 | 18 | 58115801 | 58118300 | ID_752764 | 2500 | 1 | 7.62E-05 | 32 | 1.28 | NEDD4L |
| DMR18:58675801 | 18 | 58675801 | 58675900 | ID_752939 | 100 | 1 | 5.71E-05 | 2 | 2 | MALT1;RP11-126O1.4 |
| DMR18:59752001 | 18 | 59752001 | 59752300 | ID_753286 | 300 | 2 | 1.46E-06 | 3 | 1 | |
| DMR18:62454101 | 18 | 62454101 | 62455700 | ID_754083 | 1600 | 1 | 0.00002 | 17 | 1.0625 | |
| DMR18:62617401 | 18 | 62617401 | 62618000 | ID_754132 | 600 | 1 | 5.32E-05 | 5 | 0.83333333 | |
| DMR18:63609901 | 18 | 63609901 | 63610800 | ID_754449 | 900 | 1 | 3.91E-05 | 5 | 0.55555556 | |
| DMR18:64449301 | 18 | 64449301 | 64449900 | ID_754694 | 600 | 1 | 2.37E-05 | 3 | 0.5 | |
| DMR18:64570401 | 18 | 64570401 | 64571300 | ID_754721 | 900 | 1 | 6.91E-05 | 8 | 0.88888889 | |
| DMR18:65609101 | 18 | 65609101 | 65609700 | ID_754992 | 600 | 2 | 2.08E-05 | 19 | 3.16666667 | RP11-775G23.1 |
| DMR18:67174701 | 18 | 67174701 | 67175700 | ID_755390 | 1000 | 1 | 9.78E-05 | 7 | 0.7 | |
| DMR18:67378201 | 18 | 67378201 | 67379900 | ID_755456 | 1700 | 1 | 6.5E-06 | 4 | 0.23529412 | |
| DMR18:67949701 | 18 | 67949701 | 67951800 | ID_755623 | 2100 | 1 | 1.19E-05 | 20 | 0.95238095 | RP11-659F24.1 |
| DMR18:69859401 | 18 | 69859401 | 69859700 | ID_756172 | 300 | 1 | 2.37E-06 | 0 | 0 | CD226 |
| DMR18:69979001 | 18 | 69979001 | 69980400 | ID_756208 | 1400 | 1 | 5.77E-05 | 17 | 1.21428571 | |
| DMR18:70138801 | 18 | 70138801 | 70139900 | ID_756257 | 1100 | 1 | 0.000049 | 9 | 0.81818182 | RTTN |
| DMR18:70848101 | 18 | 70848101 | 70849000 | ID_756471 | 900 | 2 | 1.62E-05 | 13 | 1.44444444 | |
| DMR18:71068401 | 18 | 71068401 | 71069700 | ID_756530 | 1300 | 1 | 5.29E-06 | 8 | 0.61538462 | |
| DMR18:71781901 | 18 | 71781901 | 71782100 | ID_756737 | 200 | 1 | 8.99E-06 | 2 | 1 | RP11-723G8.2 |
| DMR18:74305501 | 18 | 74305501 | 74305700 | ID_757461 | 200 | 1 | 0.000028 | 0 | 0 | |
| DMR18:75989101 | 18 | 75989101 | 75990300 | ID_758000 | 1200 | 1 | 2.05E-05 | 11 | 0.91666667 | |
| DMR18:76003301 | 18 | 76003301 | 76006100 | ID_758005 | 2800 | 2 | 2.92E-07 | 39 | 1.39285714 | |
| DMR18:76391701 | 18 | 76391701 | 76392800 | ID_758135 | 1100 | 1 | 1.78E-05 | 24 | 2.18181818 | ZNF516 |
| DMR18:77258301 | 18 | 77258301 | 77258700 | ID_758418 | 400 | 1 | 5.82E-05 | 2 | 0.5 | GALR1 |
| DMR18:77588501 | 18 | 77588501 | 77590900 | ID_758525 | 2400 | 1 | 4.05E-05 | 54 | 2.25 | |
| DMR18:77782501 | 18 | 77782501 | 77783500 | ID_758590 | 1000 | 1 | 6.76E-05 | 10 | 1 | |
| DMR18:77872601 | 18 | 77872601 | 77875300 | ID_758621 | 2700 | 1 | 5.66E-05 | 42 | 1.55555556 | |
| DMR18:78122501 | 18 | 78122501 | 78125700 | ID_758708 | 3200 | 1 | 1.41E-05 | 76 | 2.375 | |
| DMR18:78388601 | 18 | 78388601 | 78390100 | ID_758796 | 1500 | 1 | 4.96E-07 | 39 | 2.6 | |
| DMR18:78500201 | 18 | 78500201 | 78500400 | ID_758833 | 200 | 1 | 5.32E-05 | 7 | 3.5 | |
| DMR18:78659701 | 18 | 78659701 | 78660100 | ID_758877 | 400 | 1 | 7.55E-05 | 16 | 4 | |
| DMR18:78963601 | 18 | 78963601 | 78965700 | ID_758968 | 2100 | 1 | 1.88E-05 | 71 | 3.38095238 | |
| DMR19:740601 | 19 | 740601 | 740800 | ID_759604 | 200 | 1 | 7.51E-05 | 5 | 2.5 | PALM |
| DMR19:756801 | 19 | 756801 | 758400 | ID_759611 | 1600 | 2 | 3.5E-06 | 76 | 4.75 | MISP |
| DMR19:841001 | 19 | 841001 | 842600 | ID_759641 | 1600 | 1 | 9.19E-06 | 40 | 2.5 | PRTN3 |
| DMR19:1396101 | 19 | 1396101 | 1397500 | ID_759812 | 1400 | 1 | 7.72E-05 | 58 | 4.14285714 | AC005329.7;GAMT |
| DMR19:1743801 | 19 | 1743801 | 1746500 | ID_759923 | 2700 | 1 | 1.94E-05 | 56 | 2.07407407 | |
| DMR19:2372301 | 19 | 2372301 | 2374800 | ID_760116 | 2500 | 1 | 0.000044 | 58 | 2.32 | |
| DMR19:2518101 | 19 | 2518101 | 2520000 | ID_760159 | 1900 | 1 | 7.01E-05 | 57 | 3 | GNG7 |
| DMR19:2905701 | 19 | 2905701 | 2911000 | ID_760284 | 5300 | 1 | 8.72E-09 | 119 | 2.24528302 | ZNF57 |
| DMR19:3782801 | 19 | 3782801 | 3784400 | ID_760579 | 1600 | 1 | 2.92E-05 | 58 | 3.625 | MATK |
| DMR19:3861901 | 19 | 3861901 | 3863100 | ID_760606 | 1200 | 1 | 4.6E-06 | 23 | 1.91666667 | ZFR2 |
| DMR19:4295501 | 19 | 4295501 | 4296200 | ID_760740 | 700 | 1 | 2.23E-05 | 17 | 2.42857143 | TMIGD2 |
| DMR19:4314401 | 19 | 4314401 | 4315300 | ID_760745 | 900 | 1 | 0.000014 | 27 | 3 | FSD1 |
| DMR19:4802201 | 19 | 4802201 | 4803200 | ID_760903 | 1000 | 1 | 4.18E-05 | 20 | 2 | |
| DMR19:5233001 | 19 | 5233001 | 5234100 | ID_761040 | 1100 | 1 | 5.28E-05 | 19 | 1.72727273 | PTPRS |
| DMR19:6090601 | 19 | 6090601 | 6094100 | ID_761323 | 3500 | 1 | 9.96E-05 | 76 | 2.17142857 | RFX2 |
| DMR19:6340701 | 19 | 6340701 | 6343000 | ID_761400 | 2300 | 1 | 4.76E-05 | 42 | 1.82608696 | |
| DMR19:8054101 | 19 | 8054101 | 8056200 | ID_761980 | 2100 | 1 | 7.32E-05 | 50 | 2.38095238 | CCL25;ELAVL1 |
| DMR19:8300401 | 19 | 8300401 | 8301600 | ID_762068 | 1200 | 1 | 0.000059 | 18 | 1.5 | ELAVL1 |
| DMR19:8765201 | 19 | 8765201 | 8768400 | ID_762215 | 3200 | 1 | 3.13E-05 | 65 | 2.03125 | |
| DMR19:9416001 | 19 | 9416001 | 9416400 | ID_762399 | 400 | 1 | 2.32E-05 | 6 | 1.5 | ZNF266 |
| DMR19:10199101 | 19 | 10199101 | 10199300 | ID_762662 | 200 | 1 | 1.02E-05 | 2 | 1 | DNMT1 |
| DMR19:11312101 | 19 | 11312101 | 11312600 | ID_763025 | 500 | 1 | 2.84E-05 | 1 | 0.2 | TSPAN16;CTC-510F12.4 |
| DMR19:12252801 | 19 | 12252801 | 12252900 | ID_763323 | 100 | 1 | 1.57E-06 | 0 | 0 | ZNF44 |
| DMR19:15087001 | 19 | 15087001 | 15088000 | ID_764213 | 1000 | 1 | 3.07E-05 | 23 | 2.3 | OR1I1 |
| DMR19:17063701 | 19 | 17063701 | 17065100 | ID_764866 | 1400 | 1 | 2.04E-05 | 11 | 0.78571429 | HAUS8 |
| DMR19:17159801 | 19 | 17159801 | 17160600 | ID_764893 | 800 | 1 | 3.86E-06 | 8 | 1 | MYO9B;CTD-3032J10.2 |
| DMR19:17420901 | 19 | 17420901 | 17421100 | ID_764981 | 200 | 1 | 6.64E-05 | 5 | 2.5 | CTD-2521M24.6;MVB12A |
| DMR19:17546601 | 19 | 17546601 | 17546700 | ID_765023 | 100 | 1 | 6.44E-05 | 2 | 2 | FAM129C |
| DMR19:17670901 | 19 | 17670901 | 17672200 | ID_765060 | 1300 | 1 | 3.43E-05 | 6 | 0.46153846 | UNC13A |
| DMR19:18505501 | 19 | 18505501 | 18507900 | ID_765304 | 2400 | 1 | 8.12E-05 | 42 | 1.75 | ELL |
| DMR19:18796201 | 19 | 18796201 | 18798800 | ID_765397 | 2600 | 1 | 2.88E-05 | 34 | 1.30769231 | |
| DMR19:19056901 | 19 | 19056901 | 19058500 | ID_765480 | 1600 | 1 | 5.78E-05 | 32 | 2 | ARMC6 |
| DMR19:20295701 | 19 | 20295701 | 20298000 | ID_765862 | 2300 | 1 | 5.37E-05 | 66 | 2.86956522 | AC078899.3;CTC-260E6.6 |
| DMR19:24223701 | 19 | 24223701 | 24224000 | ID_767029 | 300 | 1 | 6.53E-05 | 2 | 0.66666667 | |
| DMR19:24633701 | 19 | 24633701 | 24637400 | ID_767121 | 3700 | 1 | 1.06E-05 | 58 | 1.56756757 | |
| DMR19:28013401 | 19 | 28013401 | 28014700 | ID_767899 | 1300 | 1 | 4.49E-05 | 9 | 0.69230769 | |
| DMR19:30870801 | 19 | 30870801 | 30872500 | ID_768815 | 1700 | 1 | 8.52E-05 | 24 | 1.41176471 | CTC-400I9.2 |
| DMR19:31835101 | 19 | 31835101 | 31835400 | ID_769115 | 300 | 1 | 8.16E-05 | 0 | 0 | |
| DMR19:32414201 | 19 | 32414201 | 32416800 | ID_769299 | 2600 | 1 | 7.53E-05 | 33 | 1.26923077 | DPY19L3 |
| DMR19:34774301 | 19 | 34774301 | 34775500 | ID_770043 | 1200 | 1 | 5.41E-05 | 3 | 0.25 | |
| DMR19:34840601 | 19 | 34840601 | 34840900 | ID_770063 | 300 | 1 | 0.000046 | 5 | 1.66666667 | CTC-523E23.5 |
| DMR19:36779901 | 19 | 36779901 | 36780200 | ID_770681 | 300 | 1 | 7.16E-05 | 2 | 0.66666667 | |
| DMR19:37842601 | 19 | 37842601 | 37845100 | ID_771020 | 2500 | 2 | 1.14E-05 | 36 | 1.44 | AC016582.2 |
| DMR19:37956701 | 19 | 37956701 | 37958000 | ID_771052 | 1300 | 1 | 3.39E-05 | 7 | 0.53846154 | SIPA1L3 |
| DMR19:38340401 | 19 | 38340401 | 38344600 | ID_771177 | 4200 | 1 | 6.03E-05 | 67 | 1.5952381 | CATSPERG |
| DMR19:38472701 | 19 | 38472701 | 38474700 | ID_771224 | 2000 | 1 | 4.46E-05 | 59 | 2.95 | RYR1 |
| DMR19:43005301 | 19 | 43005301 | 43006000 | ID_772703 | 700 | 1 | 2.06E-05 | 7 | 1 | PSG7;CTC-490G23.6 |
| DMR19:43206901 | 19 | 43206901 | 43207300 | ID_772768 | 400 | 2 | 2.88E-06 | 16 | 4 | PSG4 |
| DMR19:45466501 | 19 | 45466501 | 45467400 | ID_773474 | 900 | 1 | 1.29E-05 | 22 | 2.44444444 | ERCC1 |
| DMR19:45629801 | 19 | 45629801 | 45631100 | ID_773525 | 1300 | 1 | 7.55E-05 | 13 | 1 | EML2 |
| DMR19:48181401 | 19 | 48181401 | 48183000 | ID_774327 | 1600 | 2 | 7.54E-06 | 51 | 3.1875 | C19orf68;ZNF114;CARD8 |
| DMR19:49061801 | 19 | 49061801 | 49062000 | ID_774612 | 200 | 1 | 6.18E-05 | 1 | 0.5 | NTF4 |
| DMR19:49753901 | 19 | 49753901 | 49756800 | ID_774829 | 2900 | 1 | 9.38E-05 | 35 | 1.20689655 | TSKS |
| DMR19:51400301 | 19 | 51400301 | 51401400 | ID_775363 | 1100 | 1 | 5.19E-05 | 15 | 1.36363636 | CTD-2616J11.14;NIFKP6 |
| DMR19:52241001 | 19 | 52241001 | 52241200 | ID_775617 | 200 | 1 | 2.53E-05 | 1 | 0.5 | |
| DMR19:52916701 | 19 | 52916701 | 52920900 | ID_775844 | 4200 | 5 | 3.66E-10 | 101 | 2.40476191 | CTD-2331H12.8;ZNF888 |
| DMR19:53511801 | 19 | 53511801 | 53518100 | ID_776028 | 6300 | 1 | 1.75E-05 | 117 | 1.85714286 | CTB-167G5.7;CTD-2224J9.8 |
| DMR19:54772001 | 19 | 54772001 | 54778000 | ID_776437 | 6000 | 4 | 8.2E-06 | 62 | 1.03333333 | CTB-61M7.1;KIR2DL1 |
| DMR19:54818001 | 19 | 54818001 | 54819200 | ID_776449 | 1200 | 1 | 7.06E-05 | 18 | 1.5 | KIR3DL1 |
| DMR19:57178901 | 19 | 57178901 | 57179300 | ID_777216 | 400 | 1 | 1.2E-06 | 6 | 1.5 | |
| DMR19:57579101 | 19 | 57579101 | 57581500 | ID_777334 | 2400 | 1 | 4.45E-05 | 26 | 1.08333333 | ZIK1 |
| DMR20:131201 | 20 | 131201 | 131600 | ID_777678 | 400 | 1 | 8.87E-05 | 8 | 2 | |
| DMR20:574601 | 20 | 574601 | 577700 | ID_777820 | 3100 | 1 | 1.63E-05 | 45 | 1.4516129 | |
| DMR20:1448001 | 20 | 1448001 | 1449300 | ID_778095 | 1300 | 1 | 9.02E-06 | 9 | 0.69230769 | NSFL1C |
| DMR20:2311001 | 20 | 2311001 | 2311800 | ID_778380 | 800 | 2 | 7.56E-06 | 7 | 0.875 | TGM3 |
| DMR20:2588101 | 20 | 2588101 | 2588600 | ID_778468 | 500 | 1 | 1.68E-07 | 2 | 0.4 | TMC2 |
| DMR20:2869501 | 20 | 2869501 | 2871100 | ID_778561 | 1600 | 1 | 6.97E-05 | 22 | 1.375 | PTPRA |
| DMR20:2936401 | 20 | 2936401 | 2937600 | ID_778582 | 1200 | 1 | 8.75E-05 | 12 | 1 | PTPRA |
| DMR20:3648501 | 20 | 3648501 | 3649400 | ID_778794 | 900 | 1 | 4.58E-05 | 11 | 1.22222222 | ATRN |
| DMR20:4346701 | 20 | 4346701 | 4347400 | ID_779025 | 700 | 1 | 7.08E-05 | 13 | 1.85714286 | |
| DMR20:5598901 | 20 | 5598901 | 5599100 | ID_779433 | 200 | 1 | 4.34E-05 | 2 | 1 | GPCPD1 |
| DMR20:6288301 | 20 | 6288301 | 6288500 | ID_779663 | 200 | 1 | 4.37E-05 | 1 | 0.5 | |
| DMR20:6646201 | 20 | 6646201 | 6647400 | ID_779770 | 1200 | 1 | 2.11E-05 | 10 | 0.83333333 | |
| DMR20:7279101 | 20 | 7279101 | 7279300 | ID_779963 | 200 | 1 | 2.52E-06 | 1 | 0.5 | |
| DMR20:10349401 | 20 | 10349401 | 10349600 | ID_780896 | 200 | 1 | 5.77E-05 | 4 | 2 | SNAP25-AS1;RPL23AP6 |
| DMR20:10859101 | 20 | 10859101 | 10859300 | ID_781045 | 200 | 1 | 0.000037 | 2 | 1 | RP11-103J8.1 |
| DMR20:12109001 | 20 | 12109001 | 12111700 | ID_781402 | 2700 | 1 | 2.72E-07 | 30 | 1.11111111 | |
| DMR20:12306201 | 20 | 12306201 | 12306400 | ID_781461 | 200 | 1 | 2.81E-05 | 2 | 1 | RP11-102J14.1 |
| DMR20:14262601 | 20 | 14262601 | 14262800 | ID_782020 | 200 | 1 | 6.85E-05 | 0 | 0 | MACROD2 |
| DMR20:14736301 | 20 | 14736301 | 14737500 | ID_782153 | 1200 | 1 | 7.36E-06 | 7 | 0.58333333 | MACROD2 |
| DMR20:19605101 | 20 | 19605101 | 19605500 | ID_783664 | 400 | 1 | 8.15E-06 | 4 | 1 | SLC24A3 |
| DMR20:22593201 | 20 | 22593201 | 22593400 | ID_784573 | 200 | 1 | 6.72E-05 | 2 | 1 | LINC01384 |
| DMR20:23275101 | 20 | 23275101 | 23275300 | ID_784787 | 200 | 1 | 0.000098 | 3 | 1.5 | |
| DMR20:30319601 | 20 | 30319601 | 30319900 | ID_786752 | 300 | 1 | 9.22E-05 | 5 | 1.66666667 | |
| DMR20:30405101 | 20 | 30405101 | 30406600 | ID_786777 | 1500 | 1 | 3.52E-05 | 66 | 4.4 | |
| DMR20:31215401 | 20 | 31215401 | 31228500 | ID_786947 | 13100 | 1 | 7.82E-05 | 308 | 2.35114504 | |
| DMR20:33483901 | 20 | 33483901 | 33485800 | ID_787644 | 1900 | 1 | 3.17E-05 | 42 | 2.21052632 | |
| DMR20:35650401 | 20 | 35650401 | 35650700 | ID_788353 | 300 | 1 | 0.000012 | 2 | 0.66666667 | RP1-309K20.6;RBM12; |
| | | | | | | | | | | CPNE1 |
| DMR20:36543101 | 20 | 36543101 | 36543400 | ID_788646 | 300 | 1 | 4.66E-05 | 7 | 2.33333333 | MYL9;DLGAP4-AS1 |
| DMR20:37154201 | 20 | 37154201 | 37155200 | ID_788838 | 1000 | 1 | 1.21E-06 | 11 | 1.1 | MROH8 |
| DMR20:38121401 | 20 | 38121401 | 38121800 | ID_789153 | 400 | 1 | 0.000013 | 12 | 3 | RPRD1B |
| DMR20:38582301 | 20 | 38582301 | 38583000 | ID_789297 | 700 | 1 | 9.38E-05 | 11 | 1.57142857 | ADIG |
| DMR20:39622001 | 20 | 39622001 | 39622900 | ID_789618 | 900 | 1 | 5.98E-05 | 7 | 0.77777778 | |
| DMR20:40739201 | 20 | 40739201 | 40741700 | ID_789944 | 2500 | 1 | 6.63E-05 | 19 | 0.76 | |
| DMR20:46561301 | 20 | 46561301 | 46562500 | ID_791796 | 1200 | 1 | 0.00003 | 19 | 1.58333333 | SLC13A3 |
| DMR20:46639701 | 20 | 46639701 | 46640600 | ID_791821 | 900 | 1 | 7.09E-05 | 11 | 1.22222222 | SLC13A3 |
| DMR20:47404401 | 20 | 47404401 | 47404700 | ID_792060 | 300 | 1 | 1.88E-05 | 1 | 0.33333333 | RP1-148H17.1 |
| DMR20:49000501 | 20 | 49000501 | 49001700 | ID_792571 | 1200 | 1 | 2.85E-05 | 12 | 1 | ARFGEF2 |
| DMR20:50038501 | 20 | 50038501 | 50039100 | ID_792909 | 600 | 1 | 6.56E-05 | 12 | 2 | |
| DMR20:50922201 | 20 | 50922201 | 50923400 | ID_793202 | 1200 | 1 | 4.55E-05 | 21 | 1.75 | ADNP |
| DMR20:51027301 | 20 | 51027301 | 51027700 | ID_793230 | 400 | 1 | 1.24E-05 | 1 | 0.25 | |
| DMR20:52529701 | 20 | 52529701 | 52531900 | ID_793718 | 2200 | 1 | 3.65E-05 | 15 | 0.68181818 | LINC01524 |
| DMR20:52799801 | 20 | 52799801 | 52801300 | ID_793804 | 1500 | 1 | 7.05E-05 | 8 | 0.53333333 | |
| DMR20:53152001 | 20 | 53152001 | 53155600 | ID_793903 | 3600 | 1 | 9.19E-05 | 18 | 0.5 | TSHZ2 |
| DMR20:54081601 | 20 | 54081601 | 54082800 | ID_794182 | 1200 | 1 | 7.59E-05 | 14 | 1.16666667 | |
| DMR20:54465601 | 20 | 54465601 | 54465800 | ID_794296 | 200 | 1 | 8.23E-05 | 0 | 0 | |
| DMR20:56802801 | 20 | 56802801 | 56804500 | ID_795006 | 1700 | 1 | 7.41E-05 | 76 | 4.47058824 | |
| DMR20:58690001 | 20 | 58690001 | 58690900 | ID_795631 | 900 | 1 | 7.47E-05 | 4 | 0.44444444 | NPEPL1;STX16-NPEPL1 |
| DMR20:59715801 | 20 | 59715801 | 59716600 | ID_795951 | 800 | 1 | 8.45E-05 | 7 | 0.875 | PHACTR3 |
| DMR20:60522301 | 20 | 60522301 | 60522600 | ID_796205 | 300 | 1 | 1.96E-05 | 2 | 0.66666667 | MIR646HG |
| DMR20:60610501 | 20 | 60610501 | 60611200 | ID_796237 | 700 | 1 | 4.37E-05 | 20 | 2.85714286 | |
| DMR20:61034401 | 20 | 61034401 | 61036600 | ID_796373 | 2200 | 1 | 6.66E-05 | 15 | 0.68181818 | |
| DMR20:61054401 | 20 | 61054401 | 61054600 | ID_796380 | 200 | 1 | 2.41E-05 | 5 | 2.5 | |
| DMR20:61964901 | 20 | 61964901 | 61966400 | ID_796686 | 1500 | 2 | 8.95E-08 | 82 | 5.46666667 | TAF4 |
| DMR20:62445201 | 20 | 62445201 | 62446700 | ID_796846 | 1500 | 1 | 1.01E-05 | 64 | 4.26666667 | RP5-908M14.5 |
| DMR20:63017901 | 20 | 63017901 | 63018200 | ID_797031 | 300 | 1 | 9.28E-05 | 15 | 5 | RP11-305P22.9 |
| DMR20:63761401 | 20 | 63761401 | 63763200 | ID_797258 | 1800 | 1 | 2.87E-05 | 22 | 1.22222222 | ZBTB46 |
| DMR20:64125901 | 20 | 64125901 | 64127900 | ID_797361 | 2000 | 1 | 9.34E-05 | 8 | 0.4 | |
| DMR20:64131901 | 20 | 64131901 | 64134600 | ID_797363 | 2700 | 3 | 1.68E-08 | 15 | 0.55555556 | |
| DMR20:64156501 | 20 | 64156501 | 64159100 | ID_797370 | 2600 | 1 | 3.14E-05 | 36 | 1.38461539 | MYT1 |
| DMR21:5574101 | 21 | 5574101 | 5575100 | ID_797562 | 1000 | 1 | 1.57E-05 | 9 | 0.9 | RP11-717F1.2 |
| DMR21:7916001 | 21 | 7916001 | 7942500 | ID_798078 | 26500 | 5 | 1.05E-06 | 710 | 2.67924528 | |
| DMR21:7950101 | 21 | 7950101 | 7955800 | ID_798081 | 5700 | 1 | 2.39E-05 | 128 | 2.24561404 | |
| DMR21:9070001 | 21 | 9070001 | 9071400 | ID_798290 | 1400 | 1 | 9.41E-05 | 72 | 5.14285714 | TEKT4P2 |
| DMR21:9342901 | 21 | 9342901 | 9346400 | ID_798367 | 3500 | 1 | 6.77E-06 | 26 | 0.74285714 | bP-21264C1.2 |
| DMR21:9673401 | 21 | 9673401 | 9679600 | ID_798423 | 6200 | 1 | 1.37E-05 | 99 | 1.59677419 | |
| DMR21:9712601 | 21 | 9712601 | 9713200 | ID_798435 | 600 | 1 | 4.68E-06 | 5 | 0.83333333 | |
| DMR21:10413001 | 21 | 10413001 | 10415300 | ID_798612 | 2300 | 1 | 5.56E-06 | 56 | 2.43478261 | BAGE2 |
| DMR21:10652801 | 21 | 10652801 | 10690800 | ID_798685 | 38000 | 3 | 9.1E-06 | 829 | 2.18157895 | |
| DMR21:12398001 | 21 | 12398001 | 12398300 | ID_799087 | 300 | 1 | 5.56E-06 | 4 | 1.33333333 | |
| DMR21:13434701 | 21 | 13434701 | 13434900 | ID_799393 | 200 | 1 | 4.31E-05 | 2 | 1 | |
| DMR21:14534901 | 21 | 14534901 | 14538100 | ID_799708 | 3200 | 1 | 2.15E-06 | 20 | 0.625 | SAMSN1 |
| DMR21:15722601 | 21 | 15722601 | 15722800 | ID_800052 | 200 | 1 | 7.67E-05 | 3 | 1.5 | |
| DMR21:16665201 | 21 | 16665201 | 16665400 | ID_800320 | 200 | 1 | 7.04E-05 | 1 | 0.5 | |
| DMR21:16876301 | 21 | 16876301 | 16876600 | ID_800383 | 300 | 1 | 8.75E-05 | 2 | 0.66666667 | |
| DMR21:17383301 | 21 | 17383301 | 17384300 | ID_800533 | 1000 | 1 | 4.38E-06 | 11 | 1.1 | |
| DMR21:19678301 | 21 | 19678301 | 19678400 | ID_801189 | 100 | 1 | 7.08E-05 | 1 | 1 | |
| DMR21:22283201 | 21 | 22283201 | 22285600 | ID_801882 | 2400 | 1 | 9.34E-05 | 19 | 0.79166667 | AP000705.7 |
| DMR21:22396001 | 21 | 22396001 | 22396900 | ID_801914 | 900 | 1 | 5.04E-05 | 14 | 1.55555556 | AP000705.7 |
| DMR21:23553901 | 21 | 23553901 | 23554100 | ID_802212 | 200 | 1 | 8.43E-05 | 1 | 0.5 | |
| DMR21:23591301 | 21 | 23591301 | 23592800 | ID_802224 | 1500 | 1 | 1.77E-05 | 11 | 0.73333333 | |
| DMR21:25579601 | 21 | 25579601 | 25579800 | ID_802801 | 200 | 1 | 4.33E-05 | 0 | 0 | |
| DMR21:26220001 | 21 | 26220001 | 26220500 | ID_802993 | 500 | 1 | 0.000092 | 3 | 0.6 | |
| DMR21:26397901 | 21 | 26397901 | 26398600 | ID_803045 | 700 | 1 | 4.86E-05 | 7 | 1 | CYYR1-AS1;AP001596.6 |
| DMR21:26854801 | 21 | 26854801 | 26856700 | ID_803165 | 1900 | 1 | 3.73E-05 | 47 | 2.47368421 | |
| DMR21:27779801 | 21 | 27779801 | 27781000 | ID_803428 | 1200 | 1 | 1.06E-05 | 7 | 0.58333333 | |
| DMR21:28634201 | 21 | 28634201 | 28635600 | ID_803667 | 1400 | 1 | 1.02E-05 | 14 | 1 | AF131217.1 |
| DMR21:31031501 | 21 | 31031501 | 31033200 | ID_804362 | 1700 | 1 | 4.28E-05 | 21 | 1.23529412 | |
| DMR21:31118901 | 21 | 31118901 | 31119800 | ID_804391 | 900 | 1 | 9.67E-05 | 8 | 0.88888889 | TIAM1 |
| DMR21:32147001 | 21 | 32147001 | 32149200 | ID_804726 | 2200 | 1 | 2.08E-05 | 14 | 0.63636364 | LINC00159 |
| DMR21:32298701 | 21 | 32298701 | 32301500 | ID_804773 | 2800 | 1 | 7.99E-05 | 100 | 3.57142857 | MRAP |
| DMR21:34079501 | 21 | 34079501 | 34081500 | ID_805322 | 2000 | 1 | 3.22E-05 | 17 | 0.85 | AP000320.7;SLC5A3; |
| | | | | | | | | | | MRPS6 |
| DMR21:35961601 | 21 | 35961601 | 35964500 | ID_805919 | 2900 | 1 | 2.61E-05 | 24 | 0.82758621 | RUNX1 |
| DMR21:40925701 | 21 | 40925701 | 40925800 | ID_807490 | 100 | 1 | 1.48E-05 | 1 | 1 | |
| DMR21:41043401 | 21 | 41043401 | 41044600 | ID_807522 | 1200 | 1 | 6.86E-05 | 12 | 1 | |
| DMR21:42245601 | 21 | 42245601 | 42246000 | ID_807900 | 400 | 1 | 3.68E-05 | 5 | 1.25 | ABCG1 |
| DMR21:42645701 | 21 | 42645701 | 42647000 | ID_808030 | 1300 | 1 | 5.08E-05 | 33 | 2.53846154 | |
| DMR21:42955701 | 21 | 42955701 | 42955900 | ID_808123 | 200 | 2 | 2.98E-05 | 12 | 6 | |
| DMR21:43934101 | 21 | 43934101 | 43936300 | ID_808416 | 2200 | 1 | 2.71E-05 | 82 | 3.72727273 | AGPAT3 |
| DMR21:44158201 | 21 | 44158201 | 44160000 | ID_808490 | 1800 | 2 | 1.96E-05 | 51 | 2.83333333 | AP001055.6 |
| DMR21:45909101 | 21 | 45909101 | 45911600 | ID_809074 | 2500 | 1 | 0.000045 | 77 | 3.08 | PCBP3 |
| DMR21:45930401 | 21 | 45930401 | 45930800 | ID_809080 | 400 | 1 | 6.43E-06 | 10 | 2.5 | PCBP3 |
| DMR21:46053701 | 21 | 46053701 | 46059400 | ID_809125 | 5700 | 1 | 2.07E-05 | 186 | 3.2631579 | AP001476.3 |
| DMR22:11248401 | 22 | 11248401 | 11256900 | ID_809479 | 8500 | 2 | 1.87E-05 | 383 | 4.50588235 | AC137488.1;5_8S_rRNA |
| DMR22:11598001 | 22 | 11598001 | 11601900 | ID_809550 | 3900 | 1 | 5.66E-05 | 185 | 4.74358974 | |
| DMR22:11844501 | 22 | 11844501 | 11845500 | ID_809597 | 1000 | 1 | 5.47E-05 | 3 | 0.3 | |
| DMR22:14593301 | 22 | 14593301 | 14594600 | ID_810214 | 1300 | 1 | 4.32E-05 | 26 | 2 | |
| DMR22:15549001 | 22 | 15549001 | 15549200 | ID_810439 | 200 | 1 | 0.00004 | 2 | 1 | LA16c-60G3.6 |
| DMR22:15853401 | 22 | 15853401 | 15855300 | ID_810532 | 1900 | 1 | 2.85E-05 | 83 | 4.36842105 | LA16c-60H5.7;NBEAP3 |
| DMR22:17593401 | 22 | 17593401 | 17593500 | ID_811034 | 100 | 1 | 5.41E-05 | 0 | 0 | ATP6V1E1 |
| DMR22:17883901 | 22 | 17883901 | 17884100 | ID_811129 | 200 | 1 | 3.37E-05 | 4 | 2 | MICAL3 |
| DMR22:18185201 | 22 | 18185201 | 18186200 | ID_811235 | 1000 | 1 | 7.04E-05 | 77 | 7.7 | AC008079.9 |
| DMR22:18549701 | 22 | 18549701 | 18549900 | ID_811302 | 200 | 1 | 5.84E-05 | 3 | 1.5 | PI4KAP1 |
| DMR22:20137801 | 22 | 20137801 | 20138300 | ID_811784 | 500 | 1 | 5.35E-06 | 19 | 3.8 | ZDHHC8 |
| DMR22:20174201 | 22 | 20174201 | 20174500 | ID_811796 | 300 | 1 | 0.000027 | 8 | 2.66666667 | |
| DMR22:20697501 | 22 | 20697501 | 20698400 | ID_811964 | 900 | 1 | 7.98E-05 | 18 | 2 | POM121L4P;BCRP5 |
| DMR22:20894701 | 22 | 20894701 | 20895000 | ID_812032 | 300 | 1 | 0.000019 | 6 | 2 | |
| DMR22:21297901 | 22 | 21297901 | 21299400 | ID_812174 | 1500 | 1 | 9.69E-05 | 17 | 1.13333333 | FAM230B |
| DMR22:22855101 | 22 | 22855101 | 22855400 | ID_812674 | 300 | 1 | 7.84E-05 | 12 | 4 | |
| DMR22:23477501 | 22 | 23477501 | 23477900 | ID_812879 | 400 | 1 | 3.23E-05 | 3 | 0.75 | AP000345.1 |
| DMR22:24095101 | 22 | 24095101 | 24095400 | ID_813081 | 300 | 1 | 1.38E-05 | 1 | 0.33333333 | CABIN1 |
| DMR22:24493001 | 22 | 24493001 | 24494100 | ID_813210 | 1100 | 1 | 3.66E-05 | 22 | 2 | ADORA2A-AS1 |
| DMR22:26704101 | 22 | 26704101 | 26704300 | ID_813894 | 200 | 1 | 3.96E-05 | 0 | 0 | MIATNB |
| DMR22:27238001 | 22 | 27238001 | 27239500 | ID_814072 | 1500 | 1 | 1.81E-05 | 23 | 1.53333333 | |
| DMR22:27565001 | 22 | 27565001 | 27565200 | ID_814173 | 200 | 1 | 4.95E-05 | 1 | 0.5 | RP1-231P7P.1 |
| DMR22:28342301 | 22 | 28342301 | 28343200 | ID_814417 | 900 | 1 | 2.62E-05 | 5 | 0.55555556 | TTC28 |
| DMR22:30387501 | 22 | 30387501 | 30387800 | ID_815070 | 300 | 1 | 8.93E-05 | 19 | 6.33333333 | RNF215 |
| DMR22:30465901 | 22 | 30465901 | 30467200 | ID_815096 | 1300 | 1 | 9.01E-05 | 6 | 0.46153846 | SEC14L3 |
| DMR22:30504301 | 22 | 30504301 | 30504500 | ID_815109 | 200 | 1 | 0.000018 | 4 | 2 | SEC14L4 |
| DMR22:31780401 | 22 | 31780401 | 31780700 | ID_815499 | 300 | 1 | 7.05E-05 | 4 | 1.33333333 | DEPDC5 |
| DMR22:32116501 | 22 | 32116501 | 32116800 | ID_815604 | 300 | 1 | 7.08E-06 | 0 | 0 | |
| DMR22:32203601 | 22 | 32203601 | 32207400 | ID_815634 | 3800 | 2 | 3.66E-06 | 159 | 4.18421053 | RP1-90G24.10 |
| DMR22:33512001 | 22 | 33512001 | 33512600 | ID_816057 | 600 | 1 | 9.27E-05 | 4 | 0.66666667 | LARGE |
| DMR22:34026301 | 22 | 34026301 | 34026600 | ID_816229 | 300 | 1 | 8.9E-06 | 6 | 2 | LL22NC03-86D4.1 |
| DMR22:35078001 | 22 | 35078001 | 35080600 | ID_816538 | 2600 | 1 | 0.00004 | 18 | 0.69230769 | ISX |
| DMR22:35302201 | 22 | 35302201 | 35302500 | ID_816615 | 300 | 1 | 8.58E-05 | 11 | 3.66666667 | TOM1 |
| DMR22:35397801 | 22 | 35397801 | 35398100 | ID_816644 | 300 | 1 | 0.00005 | 9 | 3 | |
| DMR22:36747801 | 22 | 36747801 | 36749400 | ID_817062 | 1600 | 1 | 5.24E-05 | 34 | 2.125 | |
| DMR22:38444601 | 22 | 38444601 | 38446700 | ID_817612 | 2100 | 1 | 2.62E-05 | 44 | 2.0952381 | KCNJ4 |
| DMR22:38735601 | 22 | 38735601 | 38735700 | ID_817705 | 100 | 1 | 0.00003 | 2 | 2 | RP3-508I15.18;RP3- |
| | | | | | | | | | | 508I15.19;GTPBP1;SUN2 |
| DMR22:42174901 | 22 | 42174901 | 42175100 | ID_818839 | 200 | 1 | 0.000018 | 11 | 5.5 | TCF20 |
| DMR22:43401701 | 22 | 43401701 | 43404500 | ID_819236 | 2800 | 1 | 8.45E-05 | 11 | 0.39285714 | RP4-754E20__A.5 |
| DMR22:43734001 | 22 | 43734001 | 43734400 | ID_819346 | 400 | 1 | 5.81E-05 | 2 | 0.5 | EFCAB6 |
| DMR22:44430601 | 22 | 44430601 | 44431000 | ID_819577 | 400 | 1 | 1.29E-05 | 8 | 2 | |
| DMR22:44955801 | 22 | 44955801 | 44957400 | ID_819742 | 1600 | 1 | 7.58E-05 | 42 | 2.625 | PHF21B |
| DMR22:46369201 | 22 | 46369201 | 46369500 | ID_820193 | 300 | 1 | 7.84E-05 | 12 | 4 | CELSR1 |
| DMR22:46858601 | 22 | 46858601 | 46860600 | ID_820348 | 2000 | 1 | 6.54E-06 | 120 | 6 | TBC1D22A |
| DMR22:47720601 | 22 | 47720601 | 47721200 | ID_820614 | 600 | 1 | 6.02E-05 | 3 | 0.5 | RP11-191L9.4 |
| DMR22:48525801 | 22 | 48525801 | 48527000 | ID_820878 | 1200 | 1 | 2.25E-05 | 26 | 2.16666667 | FAM19A5 |
| DMR22:48621201 | 22 | 48621201 | 48622400 | ID_820914 | 1200 | 1 | 4.14E-05 | 25 | 2.08333333 | FAM19A5 |
| DMR22:48701801 | 22 | 48701801 | 48704900 | ID_820939 | 3100 | 2 | 3.52E-05 | 92 | 2.96774194 | FAM19A5 |
| DMR22:49024601 | 22 | 49024601 | 49025400 | ID_821052 | 800 | 1 | 9.81E-05 | 21 | 2.625 | |
| DMR22:49621301 | 22 | 49621301 | 49622300 | ID_821254 | 1000 | 1 | 8.45E-05 | 30 | 3 | C22orf34 |
| DMR22:50216701 | 22 | 50216701 | 50220800 | ID_821446 | 4100 | 1 | 0.000073 | 207 | 5.04878049 | SELO;TUBGCP6 |
| DMR22:50629701 | 22 | 50629701 | 50630100 | ID_821581 | 400 | 1 | 8.56E-05 | 9 | 2.25 | |
| DMRX:666401 | X | 666401 | 667400 | ID_821803 | 1000 | 2 | 1.66E-05 | 18 | 1.8 | |
| DMRX:1041801 | X | 1041801 | 1051000 | ID_821932 | 9200 | 4 | 1.75E-06 | 164 | 1.7826087 | |
| DMRX:1235401 | X | 1235401 | 1236500 | ID_821989 | 1100 | 2 | 1.72E-05 | 98 | 8.90909091 | |
| DMRX:1717801 | X | 1717801 | 1719100 | ID_822143 | 1300 | 1 | 9.82E-05 | 21 | 1.61538462 | |
| DMRX:3862001 | X | 3862001 | 3864100 | ID_822739 | 2100 | 1 | 9.39E-05 | 40 | 1.90476191 | RP11-706O15.3 |
| DMRX:3865201 | X | 3865201 | 3868300 | ID_822740 | 3100 | 2 | 8.41E-05 | 83 | 2.67741936 | RP11-706O15.3 |
| DMRX:3934001 | X | 3934001 | 3936300 | ID_822760 | 2300 | 1 | 0.000079 | 36 | 1.56521739 | RP11-706O15.7 |
| DMRX:5870001 | X | 5870001 | 5870300 | ID_823241 | 300 | 1 | 3.59E-05 | 2 | 0.66666667 | NLGN4X |
| DMRX:6338801 | X | 6338801 | 6339800 | ID_823365 | 1000 | 1 | 4.05E-05 | 11 | 1.1 | |
| DMRX:6585001 | X | 6585001 | 6588700 | ID_823425 | 3700 | 1 | 1.73E-05 | 32 | 0.86486487 | |
| DMRX:9448201 | X | 9448201 | 9449400 | ID_824178 | 1200 | 1 | 3.19E-06 | 10 | 0.83333333 | |
| DMRX:11916701 | X | 11916701 | 11917800 | ID_824811 | 1100 | 1 | 1.85E-06 | 6 | 0.54545455 | |
| DMRX:12538001 | X | 12538001 | 12538400 | ID_824969 | 400 | 1 | 4.52E-05 | 14 | 3.5 | FRMPD4 |
| DMRX:19809601 | X | 19809601 | 19809800 | ID_826884 | 200 | 1 | 9.36E-05 | 1 | 0.5 | SH3KBP1 |
| DMRX:20136101 | X | 20136101 | 20138600 | ID_826983 | 2500 | 1 | 7.29E-06 | 44 | 1.76 | EIF1AX;snoU2_19; |
| | | | | | | | | | | snoU2-30 |
| DMRX:20315601 | X | 20315601 | 20316100 | ID_827019 | 500 | 1 | 2.05E-05 | 5 | 1 | |
| DMRX:21816401 | X | 21816401 | 21817500 | ID_827383 | 1100 | 1 | 5.31E-05 | 11 | 1 | |
| DMRX:21958601 | X | 21958601 | 21960200 | ID_827423 | 1600 | 1 | 5.25E-06 | 29 | 1.8125 | SMS |
| DMRX:21968701 | X | 21968701 | 21968900 | ID_827427 | 200 | 1 | 5.34E-05 | 2 | 1 | SMS |
| DMRX:22664601 | X | 22664601 | 22664900 | ID_827618 | 300 | 1 | 3.43E-05 | 0 | 0 | PTCHD1-AS |
| DMRX:26317501 | X | 26317501 | 26319000 | ID_828592 | 1500 | 1 | 2.4E-06 | 16 | 1.06666667 | |
| DMRX:36753601 | X | 36753601 | 36754600 | ID_831095 | 1000 | 1 | 3.42E-05 | 5 | 0.5 | |
| DMRX:41662501 | X | 41662501 | 41662600 | ID_832355 | 100 | 1 | 5.52E-05 | 3 | 3 | CASK |
| DMRX:42536201 | X | 42536201 | 42538900 | ID_832581 | 2700 | 1 | 8.05E-05 | 14 | 0.51851852 | RP1-154K9.2 |
| DMRX:43786001 | X | 43786001 | 43786700 | ID_832889 | 700 | 1 | 7.39E-05 | 5 | 0.71428571 | MAOB |
| DMRX:47431801 | X | 47431801 | 47432600 | ID_833873 | 800 | 1 | 5.21E-05 | 15 | 1.875 | |
| DMRX:49330101 | X | 49330101 | 49332000 | ID_834428 | 1900 | 1 | 1.18E-05 | 64 | 3.36842105 | GAGE13 |
| DMRX:49882301 | X | 49882301 | 49882600 | ID_834534 | 300 | 1 | 0.000063 | 3 | 1 | USP27X |
| DMRX:49912101 | X | 49912101 | 49912300 | ID_834543 | 200 | 1 | 6.48E-05 | 3 | 1.5 | AF238380.8 |
| DMRX:51113101 | X | 51113101 | 51114000 | ID_834853 | 900 | 1 | 4.21E-05 | 9 | 1 | LINC01284 |
| DMRX:53468201 | X | 53468201 | 53468400 | ID_835493 | 200 | 1 | 3.89E-05 | 0 | 0 | |
| DMRX:53756501 | X | 53756501 | 53757300 | ID_835576 | 800 | 1 | 0.000016 | 9 | 1.125 | |
| DMRX:53830801 | X | 53830801 | 53831700 | ID_835601 | 900 | 1 | 8.96E-06 | 4 | 0.44444444 | |
| DMRX:53853001 | X | 53853001 | 53853300 | ID_835611 | 300 | 1 | 5.69E-05 | 4 | 1.33333333 | |
| DMRX:54226501 | X | 54226501 | 54229200 | ID_835721 | 2700 | 1 | 1.87E-05 | 27 | 1 | WNK3 |
| DMRX:54781101 | X | 54781101 | 54781300 | ID_835888 | 200 | 1 | 9.97E-05 | 2 | 1 | ITIH6 |
| DMRX:56768001 | X | 56768001 | 56769300 | ID_836384 | 1300 | 1 | 4.99E-05 | 50 | 3.84615385 | LINC01420 |
| DMRX:66272401 | X | 66272401 | 66277200 | ID_838317 | 4800 | 1 | 5.75E-05 | 16 | 0.33333333 | |
| DMRX:68526701 | X | 68526701 | 68528200 | ID_838870 | 1500 | 1 | 8.68E-05 | 12 | 0.8 | YIPF6 |
| DMRX:68721601 | X | 68721601 | 68722800 | ID_838931 | 1200 | 1 | 0.000062 | 21 | 1.75 | STARD8 |
| DMRX:69238401 | X | 69238401 | 69239000 | ID_839080 | 600 | 1 | 2.03E-05 | 15 | 2.5 | |
| DMRX:70885901 | X | 70885901 | 70886100 | ID_839532 | 200 | 1 | 1.41E-05 | 1 | 0.5 | TEX11 |
| DMRX:70928701 | X | 70928701 | 70928900 | ID_839541 | 200 | 1 | 6.46E-05 | 1 | 0.5 | SLC7A3 |
| DMRX:71300101 | X | 71300101 | 71302400 | ID_839643 | 2300 | 1 | 2.14E-05 | 28 | 1.2173913 | ITGB1BP2;NONO |
| DMRX:71332901 | X | 71332901 | 71334100 | ID_839651 | 1200 | 1 | 5.07E-05 | 19 | 1.58333333 | |
| DMRX:71603201 | X | 71603201 | 71606300 | ID_839730 | 3100 | 1 | 7.35E-05 | 76 | 2.4516129 | ACRC |
| DMRX:72770201 | X | 72770201 | 72771100 | ID_840064 | 900 | 1 | 0.000026 | 17 | 1.88888889 | |
| DMRX:74098401 | X | 74098401 | 74099500 | ID_840392 | 1100 | 1 | 4.64E-05 | 47 | 4.27272727 | FTX |
| DMRX:74356201 | X | 74356201 | 74358900 | ID_840463 | 2700 | 1 | 5.2E-06 | 20 | 0.74074074 | |
| DMRX:74954701 | X | 74954701 | 74955000 | ID_840631 | 300 | 1 | 2.88E-05 | 4 | 1.33333333 | |
| DMRX:74979401 | X | 74979401 | 74979500 | ID_840637 | 100 | 1 | 8.19E-05 | 0 | 0 | |
| DMRX:85133501 | X | 85133501 | 85133800 | ID_843077 | 300 | 1 | 5.09E-05 | 4 | 1.33333333 | |
| DMRX:86200701 | X | 86200701 | 86201400 | ID_843315 | 700 | 1 | 1.54E-05 | 4 | 0.57142857 | DACH2 |
| DMRX:96434601 | X | 96434601 | 96435300 | ID_845655 | 700 | 1 | 4.93E-05 | 5 | 0.71428571 | |
| DMRX:97759501 | X | 97759501 | 97759800 | ID_845984 | 300 | 1 | 8.84E-06 | 1 | 0.33333333 | |
| DMRX:98155701 | X | 98155701 | 98156000 | ID_846084 | 300 | 1 | 9.15E-05 | 0 | 0 | |
| DMRX:98562901 | X | 98562901 | 98563900 | ID_846194 | 1000 | 1 | 7.02E-06 | 5 | 0.5 | |
| DMRX:100697901 | X | 100697901 | 100698100 | ID_846683 | 200 | 1 | 4.82E-05 | 0 | 0 | SYTL4 |
| DMRX:100917401 | X | 100917401 | 100918900 | ID_846750 | 1500 | 1 | 1.01E-06 | 4 | 0.26666667 | XKRX |
| DMRX:102889401 | X | 102889401 | 102889600 | ID_847298 | 200 | 1 | 6.62E-05 | 10 | 5 | LL0XNC01-237H1.2 |
| DMRX:103499201 | X | 103499201 | 103500500 | ID_847455 | 1300 | 1 | 1.78E-05 | 27 | 2.07692308 | LL0XNC01-250H12.3; |
| | | | | | | | | | | RAB40A |
| DMRX:105210001 | X | 105210001 | 105210200 | ID_847884 | 200 | 1 | 9.46E-05 | 0 | 0 | IL1RAPL2 |
| DMRX:107113701 | X | 107113701 | 107114000 | ID_848324 | 300 | 1 | 7.78E-05 | 2 | 0.66666667 | RBM41 |
| DMRX:111285101 | X | 111285101 | 111285300 | ID_849353 | 200 | 1 | 9.69E-05 | 1 | 0.5 | |
| DMRX:113823501 | X | 113823501 | 113824100 | ID_849966 | 600 | 1 | 1.47E-05 | 4 | 0.66666667 | XACT |
| DMRX:115191101 | X | 115191101 | 115192600 | ID_850263 | 1500 | 6 | 5.42E-07 | 128 | 8.53333333 | LRCH2;RBMXL3 |
| DMRX:115665001 | X | 115665001 | 115665300 | ID_850380 | 300 | 1 | 0.000018 | 5 | 1.66666667 | ASS1P5 |
| DMRX:115738701 | X | 115738701 | 115739000 | ID_850409 | 300 | 1 | 4.27E-06 | 23 | 7.66666667 | |
| DMRX:118280401 | X | 118280401 | 118280600 | ID_850981 | 200 | 1 | 2.48E-05 | 5 | 2.5 | RP11-197B12.1 |
| DMRX:118367101 | X | 118367101 | 118367300 | ID_851004 | 200 | 1 | 7.23E-05 | 0 | 0 | WDR44 |
| DMRX:121201301 | X | 121201301 | 121201500 | ID_851776 | 200 | 1 | 2.94E-05 | 1 | 0.5 | |
| DMRX:121853801 | X | 121853801 | 121855100 | ID_851938 | 1300 | 1 | 1.02E-05 | 33 | 2.53846154 | |
| DMRX:125133301 | X | 125133301 | 125133600 | ID_852723 | 300 | 1 | 4.36E-05 | 2 | 0.66666667 | |
| DMRX:125931501 | X | 125931501 | 125932000 | ID_852892 | 500 | 1 | 5.57E-05 | 2 | 0.4 | |
| DMRX:126866001 | X | 126866001 | 126867100 | ID_853101 | 1100 | 1 | 3.67E-05 | 12 | 1.09090909 | |
| DMRX:135811901 | X | 135811901 | 135813800 | ID_855378 | 1900 | 1 | 5.47E-05 | 23 | 1.21052632 | CT45A2 |
| DMRX:135829101 | X | 135829101 | 135832900 | ID_855384 | 3800 | 1 | 1.73E-06 | 56 | 1.47368421 | CT45A7 |
| DMRX:135864501 | X | 135864501 | 135865600 | ID_855395 | 1100 | 1 | 6.92E-05 | 15 | 1.36363636 | CT45A9 |
| DMRX:135880201 | X | 135880201 | 135884700 | ID_855400 | 4500 | 1 | 5.87E-05 | 72 | 1.6 | CT45A10 |
| DMRX:137110401 | X | 137110401 | 137110500 | ID_855761 | 100 | 1 | 9.18E-05 | 0 | 0 | |
| DMRX:137417001 | X | 137417001 | 137418100 | ID_855835 | 1100 | 1 | 5.82E-05 | 10 | 0.90909091 | |
| DMRX:139859101 | X | 139859101 | 139860400 | ID_856425 | 1300 | 1 | 5.26E-05 | 26 | 2 | ATP11C |
| DMRX:140671601 | X | 140671601 | 140672800 | ID_856630 | 1200 | 1 | 8.19E-05 | 5 | 0.41666667 | |
| DMRX:141559201 | X | 141559201 | 141560300 | ID_856896 | 1100 | 1 | 4.11E-05 | 18 | 1.63636364 | SPANXA2-OT1 |
| DMRX:142118601 | X | 142118601 | 142118700 | ID_857044 | 100 | 1 | 9.71E-05 | 1 | 1 | |
| DMRX:145352901 | X | 145352901 | 145353600 | ID_857816 | 700 | 1 | 4.28E-05 | 2 | 0.28571429 | |
| DMRX:146952401 | X | 146952401 | 146952600 | ID_858232 | 200 | 1 | 5.88E-05 | 4 | 2 | |
| DMRX:147511301 | X | 147511301 | 147511600 | ID_858374 | 300 | 1 | 0.000062 | 1 | 0.33333333 | |
| DMRX:150883501 | X | 150883501 | 150883900 | ID_859270 | 400 | 1 | 0.000072 | 3 | 0.75 | CD99L2 |
| DMRX:152701701 | X | 152701701 | 152703300 | ID_859781 | 1600 | 1 | 3.92E-05 | 27 | 1.6875 | MAGEA3 |
| DMRX:155386901 | X | 155386901 | 155387000 | ID_860560 | 100 | 1 | 6.13E-05 | 1 | 1 | |
| DMRX:155702301 | X | 155702301 | 155704600 | ID_860646 | 2300 | 1 | 7.24E-05 | 19 | 0.82608696 | |
| DMRY:4436601 | Y | 4436601 | 4437800 | ID_861118 | 1200 | 1 | 8.94E-05 | 12 | 1 | |
| DMRY:9380101 | Y | 9380101 | 9383700 | ID_862230 | 3600 | 1 | 1.36E-05 | 74 | 2.05555556 | TSPY8;TSPY7P |
| DMRY:10036801 | Y | 10036801 | 10037200 | ID_862391 | 400 | 1 | 8.87E-05 | 10 | 2.5 | TSPY20P |
| DMRY:11559901 | Y | 11559901 | 11592900 | ID_862727 | 33000 | 3 | 9.16E-06 | 910 | 2.75757576 | |
| DMRY:11985801 | Y | 11985801 | 11987500 | ID_862816 | 1700 | 1 | 9.76E-05 | 59 | 3.47058824 | MXRA5Y |
| DMRY:13955001 | Y | 13955001 | 13955400 | ID_863311 | 400 | 1 | 8.21E-05 | 3 | 0.75 | |
| DMRY:15102901 | Y | 15102901 | 15103200 | ID_863579 | 300 | 1 | 2.73E-06 | 0 | 0 | |
| DMRY:17474301 | Y | 17474301 | 17475000 | ID_864122 | 700 | 1 | 1.11E-05 | 7 | 1 | |
| DMRY:17713101 | Y | 17713101 | 17713300 | ID_864188 | 200 | 1 | 1.01E-05 | 2 | 1 | |
| DMRY:21496801 | Y | 21496801 | 21500300 | ID_865121 | 3500 | 1 | 7.87E-05 | 44 | 1.25714286 | RBMY1HP |
| DMRY:21508901 | Y | 21508901 | 21509800 | ID_865126 | 900 | 1 | 2.19E-05 | 29 | 3.22222222 | AC010141.4 |
| DMRY:23271301 | Y | 23271301 | 23276800 | ID_865548 | 5500 | 1 | 6.98E-05 | 59 | 1.07272727 | DAZ2 |
| DMRY:24532201 | Y | 24532201 | 24532300 | ID_865872 | 100 | 1 | 3.58E-05 | 0 | 0 | |
| DMRY:25211201 | Y | 25211201 | 25211400 | ID_866042 | 200 | 1 | 4.04E-05 | 2 | 1 | |
| DMRY:56687101 | Y | 56687101 | 56689100 | ID_866431 | 2000 | 1 | 2.35E-05 | 49 | 2.45 | |
| DMRY:56755401 | Y | 56755401 | 56756900 | ID_866453 | 1500 | 1 | 2.38E-05 | 42 | 2.8 | |

The application's sequence listing, which the Patent Office published only in electronic form, follows.

SEQUENCE LISTING (2834 sequences)

SEQ ID NO: 1 - DNA, 2200 bp, Homo sapiens
  misc_feature (1)..(2200): DMR1:362301
gaaacaaaatcaatatatcgtaaagacatctgcactctcatgtttactgcgggactactcacaatcgccaaaatacggaatcagcctctgagttcatcagcggatgatggataaacagaacgtggtgtgtatacacagtggaatattattcagccatacagaggaacgacagcctgttatttgtacaagatggaactagggatcattatgttaagtgaaataagccaagcacagaaagacaaacattgaatgttctctcccacctactaaaaaagtagctctcgtgaagacagagggtagacgcgtggttaccagaggtggggaaatgtagcggggagagggggagaaagagaagttgattgaagggtacaaatacgtggtttgatagaaggaataagacctagtgttacatagatcatagttggcaattgcctactgtatatttcaaaatggctagaagagaagaatcggaacggttctagcataaagcaaaaacaaatatttaaggcgatagatattccaagtaggctgatttgattttcacaattatatgaatgcattaaactatcacatgtaccctgaaactatgtacatctattatgcatcagtgaaaaagaaaaaagaaacaagaacttagattttaaactcagcactctcctagtgggctccttaaaaatatttttgtttgggaggacaaagtaggaggattccttgagcccgggagcttgaggctgcagtgagatagtgccactgcactccagcctgagcgacagagagatacactggctctaaatataaataatataaatatatatttatggaataaataaatgaataaaatatctttgcatgctggtgagcccagggtacagtctgcccttggcagctcggtgactcagccaaggcggctaaacaatcctcgcccactagacagtggaggtcgccctccagaggaccttatcagatgtacgtgcaaagcagttttcaagacagttttctattcagagtgtggtttagccgttcagggagagagatcacaaaggaaaaccacctttaggaaagcaggtgagaaaggtgtaagttcccaggcttgggggtcctggcccagcctagctgtgggcaaccccgggaaggctgagccccgcaggctgtatggacaaagcatctcgctttccacactggccacaggtctatccctggcagtaaacaggtcacaggtgggcagcaggtctaacacctgtagcgaaagaacgcaggagaggaactgaggctctgctaccagcagatgctccaagcacatcccacggggaggaccatgaacaactcagctggccacaaccaggaaaagggtgtccagggcctcagagctgcttcagtggggccatttccaggctcccaagcagtaatgtgggtgccctctcaagaacagaagcggaacagcctaacgctaatgtttgggaagaagagaacagtgatccccctggttacctcccatctctctctgcagttctcatgcatctgtgcacacacgctcacacacacatatgtccatcaatccactcacaatgtttgacttaaagcagaaaccatataaagggcaggataaggagaaaagacgaaaggaactgaaaagatgcaaacagccactaacacgccaatttgcaccttgcacagggcctgggaagtaatgacacggcttctcgttatgcatcaatgatctcatgttttcattttaacaaacaccctaatacaaaaataggctttatagggaggagagaaaatatgttttatagggaggagagaaaagccattctgaagagctggataggttgcctttggcccacatggagtcagccccctgcccacgccaccaggctcacgttcagggccctggctggagaaacctgagctgcaggacccgctgcccaccaatgcagaagagaaggcagtatgctttttgcattgggtggaacaaaaacagaagaaatgggaatttggtgagaaataagggaggtggtcctcagaatctgcagagcagtggcttccaaactctgtgatgcaaccccagccagaaaaacactttacatcatggctgagggcacatacatgcacgcacatatgcacaatacaggaaatctggaatacagaaagccctggaattcctaaataacatcctgcccacatgggaattctgccctag

SEQ ID NO: 2 - DNA, 1600 bp, Homo sapiens
  misc_feature (1)..(1600): DMR1:609301
gagtccctccccttaggtgagggggggaactagggcccggggagatgcccaggcctggcggccggcacacgcgggttctctgtggccagcaggcggcgctgcaggagaggagatgcccaggcctggcggccggcgcacgcgggttctctgtggccagcaggcggcgctgcaggagaggagatgcccaggccaggcggccggcgcacgcgggttctctgtggccagcaggcggcgctgcaggagaggagatgcccaggcctggcggccggcgcacgcgggttctctgtggccagcaggcggcgctgcaggagaggagatgcccaggcctggcggcacacgcgggttctctgtggccagcaggcggcgctgcaggagaggagatgcccaggcctggcggccggcgcacgcgggttctctgtggccagcaggcggcgctgcaggagaggagatgcccaggcctggcggccggcgcacgcgggttctctgtggccagcaggcggcgctgcaggagaggagatgcccaggcctggcggccggcgcacgcgggttctctgtggccagcaggcggcgctgcaggagaggagatgcccaggccaggcggccggcgcacgcgggttctctgtggccagcaggcggtgctgcaggagaggagatgcccaggcctggcggccggcgcacgcgggttctctgtggccagcaggcggcgctgcaggagaggagatgcccaggcctggcggccggcgcacgcgggttctctgtggccagcaggcggcgctgcaggagaggagatgcccaggcctggcggcacacgcgggttctctgtggccagcaggcggcgctgcaggagaggagatgcccaggcctggcggccggcgcacgcgggttctctgtggccagcaggcggcgctgcaggagaggagatgcccaggcctggcggccggcgcacgcgggttctctgtggccagcaggcggcgctgcaggagaggagatgcccaggcctggcggccggcgcacgcgggttctctgtggccagcaggcggcgctgcaggagaggagatgcccaggccaggcggccggcgcacgcgggttctctgtggccagcaggcggtgctgcaggagaggagatgcccaggcctggcggccggcgcacgcgggttctctgtggccagcaggcggcgctgcaggagaggagatgcccaggccaggcggccggcgcacgcgggttctctgtggccagcaggcggtgctgcaggagaggagatgcccaggcctggcggccggcgcacgcgggttctctgtggccagcaggcggcgctgcaggagaggagatgcccaggcctggcggccggcgcacgcgggttctctgtggccagcaggcggcgctgcaggaggggagatgcccaggcctggcggccggcgcacgtgggctctctgtggccagcaggcggcgctgcaggagagctcaggagcaggggcctgggcctgctccgggggaatccgcccaccccaccgcggcggcctctcctgaggttccctagtggccgcgaagggtgggctcagggtgaggggtcaggccacaccagtgggtgcggggatggct

SEQ ID NO: 3 - DNA, 6700 bp, Homo sapiens
  misc_feature (1)..(6700): DMR1:1530801
cctgggcgacagagcgagactccgtctcaaaaaaaaaaaaaaaaaaaaaaaaaaactaagaataatttggaacgagtgcggtggctcactcctgtaatcccagcacgttgggaggctgaagtgagaatatcatacacctgaggtcaggagtttgagagcagcctggccaacaaggccaatctcacctccactaaaaatacaaaaattaccccggcacatttgtggtgtatgcctgtagtcccagctactcaggaggctgagccaggagaatctcttgaatccaggaggcggaggatgcggtgagctgagatggtgccactgccctccagcctgagcaatagcgtgagactccatcttaaaaaaatagtaataggccaggtgcagtggctcacacctgtaatcctagcactttgggaggccaaggcgggcagatcacgaggtcaagagatggagaccatctggccaaatggtgaaaccccatctctactaaaaatacaaaaattagctgggtgtggtggcgcatgcctgtaatcccagctacttgggagaatgaggcaggagaatcacttgaacccgggaggcggaggttgcaaagagccgagattgcaccactgcactccagcctggcaacacagtgagactccatcccaaaaaacgaaaacgaaaactaaaaataataataactggggctggacgggcgcggtggctcatgcctgtaatcccagcactttgggaggccgagatgggcggatcatgaagtcaggaaatcaagaccatcctggctaacacggtggaaccccatctctaataaaaaatacaaaaaaaaaattagccagatgtggtggcgggtgcctgtagtcccagctacttgggaggctgaggcaggagaatggcatgaacccgggaggcagagcttgcagtgagccgagatcgcaccactgcactccagcctgggcgacagagcaagactctgtctcaaaaataaaaaaataaaaaataaaataataatttgggctgggcacggtggctcacacctgtaaccacagcactttgggaggctgaggcagtggatctccttgagttcaggtgatctgccccctttgtcctcccaaagtgctgggattacaggtgtgagccaccatgcacggcatcttgaattcttttctcataaaagggttttgaatttggtcgaatgcttttcctgcatcagatgagagggtcatgtagtttccttcctccactcggctaatattgattgatttttgtatgttgaacattttttatgtggaacattgattgatttttgtacgttgaactatccttgcattccaggaataaatcctgcttggtcagggtgtataatttttttattatactcctgaattggttttgctggcattttgttgaggacttttccaacgatgcttatcagggatattggcatgtcatttttcttgtggtgtctttgtctggctttgatatgagggtaatgctggcctcttaggatgagtgaggaaatgttcttcaatttgtccaagagtttgaggagtgatactgattcttcttaatgttttgtgaattcacatgtgaagacatcaggtccaggtcttgtctttcaacttttatagtttgaagattttaggttcccagaaaagttgcaagagtagcacagagacttcctgggcctgggaccttgccacgtggtgaacatcatgtgtcactgttggacccacctgtgactgggttttgccccagaatcccacccaggacgccacgtgacatttagctgtcacttctggtgggctcctgccaggtcccgtgcttcctggaggggtggccccgtgagcatctgcatagcccctttcctctgctgggccctgggtggggtgcagccactcgggtggaccctgagggtccctgcacctgtttgccctctcttgggtgcgctcaagaccaaaaatgatgttgagcagtcctgggccccggacccacagtggtggtgcggctctggtcagtgtctcctgcgctcccaggcccctgacccacagtggcggtgcggctctggtcagtgtctcctgcactccggggcccctgacccacagtggcggtgcggctccggtcagtgtctcctgcgctcccgggcccccgacccacagtggtggtccggctccggtcagtgtctccccacacagtggctcttggtgaggggtgggcgcttgcagaggggacgggcaccacgtggtcatccccatggcaggttccgtcgtggcgacggtgttgtgggaggatggtgtgctgctgcccctgcaccccgtgagatgaatcctgcctctgggaggtacagctgggacggggcgagggacccactcagctgtccaggaagggtcccctgccctgtgcttcctccaggtgtcctggtgcgctcctgagcacggtgcccagtgggggtccccacaccctgaccctgaccctgacccacgggtgcctccccttggggactccacgcccttcgctggcattgggatggagagtgacccgttcattgcagaagggctggacctgaggctgcctgaagccacaccaagggccacagccccagcagctccagccttcacgtgccagatgccaagccctgtgctcaggaggacagggaggtgggggcagaggtggccttggtgccaccactcatgtgcctcaaggtgggcagtggctgcctctgccctggaggcctgtgagggtcagggtctgagggtctgaggtgcactatgacccgggggcactgcctggccacggctgagactcgcagagggtctgcagttcccacctgcctctcggaagctgccctgggtcggcggtcagtgaggctccgccttgggctttctattattagaaagtcattgagcaacagcagtgctgaggacgcaggcagggctgtgggcactgcaggggctgctcccggtgtccacacacgtgctgggctctgccgaggtgcgggaagcctgtgtttcacgctcaggccatcctggagcccctggtttggtccctccccacctcggggccctggcgtgcatttggggtggggggttcccatggcggcctccctcagctgcctctctccccactaggccacggcgtatgcctccgaggacggggtcctgaccgaggccatgatggacacccgcgtgcaagatgctgtccagcagcaccagcagaagatgtgctggctgaaggcggaagggcctgggcgtggggacgagccctccccatcctgagtccacagggagatccacagctcacggagcctggccgcggacccctcccacccctgccttgccggcccctgcacatttaggatatgctcctgggtggggactgggctgtgcccagggcctctgtcccccaggatgtcttgtggtgcgggtcggccgttctgccccccagggcaccccctgttgtaggcactggctagggaggggcaggcctccttcctgcccctcgagacactcttgggagatgcattttccgtctggctcacagggggagggtgaggctttgcaccccagcccctgcccaggccactgtgagggtgggtgctggctgagcccccggggcagcaggagccaggcaggtgatgtctttgttctcggctcccacagcagagccaggtgagggggcgcctgccagggccagacccaggtggggcagcctgaaccctgcttccccctgtggccggcatgccccgatctttcacacactggtgaccctgagagaggagggaggagggaacctggcgggggtgtctgaggccgcactgtcagctggccggtccaagcctgtggctggagctggggtctgtttacctaataaagtcccacaggtgcctcattgccctgtctgtctcttggctggcacggggtggggttttgggggcctcctagcgtccccctggggtcaaaggtgacagaagaggcggaggctggcgctttctggagaatttactgaccacagaggggtgggcttcacatgagtgcccgccactgcggggccaggggcctgaatgctgcctgggcccagccacctgcaccccaccctgtggctgtgcacacgcgggtgctcccctcgcccccctcccctccgcccaagctggctggggccagacagacggtggacgcagcgcacgggaaacagcgccttcaaacagatgctggcccgggccgcgcgcctcgccgcccctgcccccacctgccccccaggaccctccctgccccccaggaccctccctgccccccagcaccgctggggatgagtccgcccttgtgtcctgccccccaactgcagggtctcccctaacccaacccccaccctagcccacaccccaaccccctttataaaaagaagagacagcaccttccactggactctcccggccggccacagccccggacaacctgggcccagggctgctgtccagtcccgccggcccgggcgtccacgaggtcccttttacatctgtacagcagccggttggctcggtggccccggtaagtccccgtgcggctcacaggtgccgcgggctggggtggccattgtggtagagtttctgcttcacgtgtaccatgttcccggcggcctcctcgaagggcctgtgcggccgccggcccagctcccgcaggctgcacagcttgggcagccaggtccacgagccatctgcggggggacaggggcggtcaggcggctggggccggccagggcggcagcactcccgggcggcgggcacgaggcactcaccgtagcgccgtccggctctccaggcgcgcacggcgcagtgcaggacgccgtccatccacaccaggaaccagctgatgcaaaagcccagcagcagccccagcatgaggtcgatctcctgcttggtcacactgtccgtcacaaagtagttctcggaggcgtccaccaccgactggtccccgtcgtacgggatcacgtagtggatatggtgcctgggggcggcagggcgggctggcacctctcccgccacccccggcctggccttcccccggggcgcctaccccgtggtgggggtgtgaccgcgtcaggccgccctgggggttctctgaagcagcctcttgggcgggcgggtcgggaagggggcaccagactcaacgaggcccaggtcacaggccagagggagtgggaggtcagtggccatgggctgtggaggccgagcgtgaagtccgggcagacagcgggaccagctgccggcgagggtgtcggccctcactcagcacctcctccctgaggcctggagctcacgggaaggtgctgcaggtggaagaggcctcccccggagggggctcaggacggcggtccccacggccagggtcacagctcacccgcccgccccggggccgcggaggccacttggagcagagctggacacagggagccctgctggccccagaccagccactcccatgcacccttccccccgctgctgtgccctttcctccacggctgccaccgcgcctgccaggcccactgcccctggtgtttcttctgctcctctatccctgggaggtgctgtcggaggccacgggggctctacccagcaccccatcctctccccttcctgggggacgcccccttgcccttgcctggcacagacccgccccgctcctctcaggatggacggcgtccaggctccagggccctttcgtcctcagtgcctgcgcgcctccatgtccctcggcctcccctccccgggctcttgggggaactgcccaggctcaggccacaacagcctctggcctcttgctgctggggcaacacaagctccccaaggagctcgccccagcagctcaccctgtcccaggaaggtctccgggccttgactctgccgatcggactggcatcccagacagtcaactctgggatccctagtccaacaggagggcctgggagtggagcccgcgggccccacgcgccttgcggtccacactcctggctgcctcccacatctccgccgagctccagctgcctgtgtctccacgtgggatccgcagacaccttaaacttgtgcctaaaaatagctcctctctccccagacctgcttctcccccaccttcccctcggtgacgtagcagcgcctcagcctggttttcagccgagacccagagaccaccccaccctccacaccccaaccagaagtacttcccacactgaaagcccagcctgtccgtccaacccagggtcttgcagccctctccaggccatccctgtgcccagcggggaccacacaggtgccttccctcagtgagatctggggggtcctggggcccgagcccaggaacagggaggaggtgtcccctgccccacgctccccttgaagccctcctgctcttctggggttcccggaggtcagtcccctcagcatatccggaaagtggccgctttcagtggcagggctctcggtgaggagtgaccatgaccgtggctgattcctggtggccaccgatcacctggtgacgagcctgtccacagccatcgtccatcgtcaccaatgggcagctgctgaccactgcccagaatgtgcagctgccagaggccctcaggggaggaagctgttcctgaccccttagagagtcctcacccaccccaggggctcagtaactttgggggtcagaggtcacagcctgtgtccccc

SEQ ID NO: 4 - DNA, 800 bp, Homo sapiens
  misc_feature (1)..(800): DMR1:3170401
cagccccatcaccatgtgggtgggaattagggagcagagccgagtggattaggaccaggtgctgggcaatgagtttatccagggagggtcctcctggccccgagagccggagcccaaggtggcaccagtttccctaggagcatctgggtggcccccagaccctgccctggctgcgaggggcggggagtcaggcctcaaaggcctcagcctccgcagctccccacccccactctggtgggaggccaggccagggcagtgagccagcccgcctctgtgcccagaggaggcggggcccgggggagcaggggaagggagggcctgcacccaccattggcaacaaagctgtcctggccgctcccgtcaccagggctggaggcacacggacatggacagtgccctccccaccccatgatgcaaacccccagttttcatcccagcagccagggctgtcgggagcccatggccttctctgtctgcagcagccacggtggaggcaggccaccggggaaacgtgtgtttcagctcccagagctcgggctgatggcgccagcccaaacgaggctgtcctccccagcccgtcttggctagagagcccacacagcctcgctgcagtccctaagggaaggctgggataggggcacccctgtcccagcgggaccccgcacccctcagcgccccacggagacctgcaccttccagactgacagtgctcggggccctctctccctcttgcgatttttatttcggggccacgtttgtttacttgcggcgtgacttgctctggcctgtgcacggcagcc

SEQ ID NO: 5 - DNA, 2500 bp, Homo sapiens
  misc_feature (1)..(2500): DMR1:3329501
caacacttagtaacttaacaggaggaccgtggggcacactctctagaggcgtcctgacctcatcatcatcacaggaaaaccaggcagaggaaggggctatgggctcacaaggagctggccccacaggtgccagagccctccagcccagggcgagccttcacacccctctcttccagctgcctggcccaatgagttgagtgtgattctggctgtgggaagaaaaacattcacaggagagtgggcaggggcaccccaggccgtgcggcttctggagagaggggcacgcctgggagaggcccccactgccacccactggttatggtgggctgtgttctccggcctcccatgcagtccctgccttacccacaggtgcccatggctgagcttgtgttgggctgagccgagtcccgccagctgggaagaagtgcacccaggaggtgggtcaggggaaaggacagttgtctctggaaggaggcttggagatcactgtccctttaagaatgcaggtcctctgccagggctctgattgcgatcacaagtgatgatggcagagtctgcccagagaacagcagcagagccctccgccaagaggggttaaggatgcctttgagacttctggtcacccacttcaccttgggcttgtcaaatcaaatggtggagtttaactctcgcctggccagagccgagcagcaaagctagaggcggggaatgaggctgggtgggcctcagacccaaacacttctgagagctcagcagggaggccctggctggcagacagagcaggaggccccggactcttcagaaactgaaattggaaattggagatgctttttgtgtctaagtcttcatcctttaattgtcacttggcaaggcgtccgctcaaggccttctctggtggccttgtaagaatgcagggacaaaataatgccaatgacagtggccctgaacagagagcagaggcctcacatggcgcccattctcttctgctcttcttcccatctgcccctcgctccctaggcatccccaccacatcccctctcagctcagcgggggctgcctggctgctgcctcagcaggggccacttttctaatcctggggtctcagacacacccttgtgcctccacctcaaatcccaaggcaatatctgccccacagcctcaggacccacttgccagtccaatggcagaacaaacagcccagagaggttgttggggagggtgggtttttgagaagctcttgcagtcatcacgacagagcctcctaagcgagggcgagtcagaccccagaaaccttggatctctggccgagtggaggtgcccctggttcatacaggcccgagctgccctcagggccctcctccctctgcctccagccagagactttctcacctgctgctctggggcagaaatcggagccacctggagtgtgcctgccagggtcagggggtgaggagataagggcctggctttcagctcacaggaagtgggcctgaatgcggagaatagcagcaattccatctgataaggccccgctaaaccccacattgacaggccccaccgcccacccgggctccaggggccaagggaggggccgccagcccactcagccctgcaagctgctcctgcccttcggcctgggagggggccttcctctgccctggcctccatacctccagcacttgggtgggctttgatcacctgtggattgcaggggggaagctgcgcaacttctccactgccccttccccctgccagcctggggggggcgcatactgggagtctggagaaaggcagcccccccccggcacacttggaggtggggggcattcctagcaacccccttcatccccgagtccattgatgaatggaccctctctgcagagaacacagcccaccagggaatcccccagatcaggaccccaggtacagaggggttcaaagcacgtttgttgaatgaatgaatgaatgaatgaacagatgagcgaatagcccaggctccacttccaggctgagtaactactacaaagggacacacatgggacgggggctgccaggagggacttctctgagcctcgttcttcaaggagccagatcccggaaaggaaacacattcgtccaaatcctctaatttgctgcccagaggaatcctggtgcccagggccgctgacagccccttctgtgggaatgggcagagaacagccttcctccccgttgcctggcacccggacccagggctcctgggctgcgtcctgggctcaccgtggctctgctgtgggttaagcaaccccttgttagtaggctccccgctcgggtggaatggctgtgagctgtggcccggccccgtctgtggccagatctgcacacagccccggggggcctcagggactccgggctcatgacacagacatctccacctctcaggatgagggagggtcacctctctgcccaggcagtggctctatcatgcccctaaaacatagactctggccctgggactggg

SEQ ID NO: 6 - DNA, 2600 bp, Homo sapiens
  misc_feature (1)..(2600): DMR1:3474501
gttcccactcaacctggcctgacctggcagagctccaggtggtgcagaggccgttcaggggctgtacgtgctgtggggccctgcaggagccccctgggggcagctgttgaccaccctgcagccccacacggggtctggcgttggtgggagcctccacacctgggatgccagaggggactttctgtcccatgtctgttgtccatccagacgctctgcctcaagacccagggccactccgaaaggtacaaggctgccagccgtgcactgaaggccatcagcaaggtaagatggggcctggccccagccctacccgagtcctgtaccccgaccctgtccccacccaaccccaccctacccgatggcatagggctggcttcccctaccttccagggcagcgagtgttctcagattatccatcccaagcctttcacagcgctgacagggaaactgaggcccagaggttcccagattatccatcccaagcctttcacagcgctgacagggaaactgaggcccagaggttcccagattatccatcccaagcctttcacagcgctgacagggaaactgaggcccagaggttcccagattatccatcccaggcctttcacggcgctgacagggaaactgaggcccagaggttcccagattatccatcccaggcctttcacggcgctgacagggaaactgaggcccagaggttcccagattatccatcccaggcctttcacggcgctgacagggaaactgaggcccagaggttcccagattatccatcccaggcctttcacggcgctgacagggaaactgaggcccagaggttcccagattatccatcccaggcctttcacggcgctgacagggaaactgaggcccagaggttcccagattatccatcccaggcctttcacagcgctgacagggaaactgaggcccagaggttcccagattatccatcccaggcctttcacagcgctgacagggaaactgaggcccagaggttcccagattatccatcccaggcctttcacagcgctgacagggaaactgaggcccagaggttcccagattatccatcccaggcctttcacagcgctgacagggaaactgaggcccagaggttcccagattatccatcccaggcctttcacagcgctgacagggaaactgaggcccagaggttcccagattatccatcccaggcctttcacagcgctgacagggaaactgaggcccagaggttcccagattatccatcccaagcctttcacagtgctgacagggaaactgaggcctagagccagtggagctctcacacagttgatgagcccgtggcacggctggtccagggcaggcactgtgggcagccagaggctggctgggcaggtgtcctgggcacactgtgggccgtgtgggctgtgccagggccctgtagcaccagcctctcacacgggaaccatgccctgcagctggtgaggcagtgcaacgagggggcccacaggatggagcgcatggagcagatgtacacgctgcacacacagctggacttcagcaaggtcaaggtaggtggccccggacatcagggccactcggaccacttcccactcagccctccctgctggcctgcgtgtgaggtcacacccctgagcctgagggctggagagtgggtgcctgccctcatgaggcctgggggctgggcctcctagggctggtggctctggtctctccaggcctcagtctcccgatctgggagcgccccttgtggacccctcccctaatcccactgggtgggcctctgtggcccttgccccatccccaggactgcaccggcaaagggtagaccctaggccctgagtgaccaagcccagggggcaacaggagtggccctgtcagtgcacttgcctggggccagcgctccttgctggcccctcaggggctgggcagggcctgaggacagagcggaggggacagggtgatttcagggccagcccagattccatgtttcccagtgaggcttggattctgggtagggtgaaatatttccagcccaggcccgggcagccctagtccctgccacaaacgggcagggctcatacctctccctccagagccccccacccacgatcccacacactggccgcatcctctgttgtcctgggacagcccagggcccctcccctaaggcgggcccaggtgggtctcctgtcctggtgccccatccagggggtgtccttcagggtggagcaagaagtgggtgacaggccaccagccaccctcactcagggccacggacaaccaagtaagggtgcggggtcccagctgggggagggggctcccggggtgggtcagggcgggctgcctggggcaggcgtcagggcggtgacttcgcgccgctgtcgctgagcccacacccgtgcagccctcacgcttgtctccctgatcctctcgagtctggggtgtaacgcctgcccctgccagagcaaggaccccctcccaggcctggtccacccctgagtggggctctcacccccacatggtcttgaagttggtcttggaaacgggtgtgggggtggggagaacaggcccatccaggagggagg

SEQ ID NO: 7 - DNA, 400 bp, Homo sapiens
  misc_feature (1)..(400): DMR1:4263501
aataggctgtccatgtctaacttaaaagcattggcaaagctttatccagacaacatcagtttccactctcacagatgatgtatgcatgaattcccttcactccaacttcaaaaaggcttcttcatcctttatgttgtagagggataatggctatgcagagaaagaaagtgaaatcagggtacagagggaggcaggaatactattttgaaaaggcttgtgagggagacccgagggaacaagggagggaaccctgcagatatcctgggaggcatgtcaggaaagaaaacagaagtgcaaaggccctggcacaggagtgtgcctgggcagcaggggtggagagagagaggaagggaagggaccagctggagacatggtgggagcagatgggggtgggccctgg

SEQ ID NO: 8 - DNA, 1000 bp, Homo sapiens
  misc_feature (1)..(1000): DMR1:5619501
aggaccattgagataggcacagggatcacagcaataggatttgcagtgggagaaagagattgggctccactctgaacacagcccaggcaggggaggatttatagccaaagagcagggcggggtccatggatggaaaactgctaagaggaaacattagaggtaagggggattctggctaaacccacctaataggattcttgctcaaggcaggccagggtgaccagatattgctggggcatgatggagagtgaggaactccatcagacatagttgaggtggtcagatatcaaggtgtagggggcttttgttaaactgacacagcatggttctttgctaaaactggattttacaagaaagtgtacagaggggcctaggagatggttcggggacctggctaaagtttggtcaagcaaagaatctatgtcggtggacatgaatttgagagggacattacattaatccactacagggagccacaggagggctttggggacaggcaggacatgagctgacttgggttttagaaggatccctctggctgctgcagaacaagcatggaagcagagaggcagaagttcagacactgctgcagtgacccagacaagggagggtgcagcctgggcggggcgctcgccatggaagtgggagaaacagttggattctagcacaaacttgaaggcagaaacaagaaggcttgctaatgtgcgggactccttcacctgctagccaggctcccccagaccctcccccagacccatttctgtgctttagtttcaaattatcccccgctgcagcctggccctcctccatgtatattgtaatgcccttagccctgacccatcttcaggctgctgtggtctgggagagctatttccagccacaacggcctgtggcccacatggccccaacccctcactctctttggggtgtgtgtggtggtggtggggtgggggacagcttctattggtcaggccaaggcaaaaaaaaaaaaaaaaagcgg

SEQ ID NO: 9 - DNA, 1100 bp, Homo sapiens
  misc_feature (1)..(1100): DMR1:7144801
gtttaaagtagagccattgagaatgttccctataatttgaacaaccctaagaattcaactttaagctggtcatttgtcctccacaactacctggtgaggcagcacttgctttttcttcccatgttacaaatgcagacaggaaggccgagtaacctctcaagctctgcagcggttgggaggctgagctggccttgacctggattcgctttcttctagaattgggtccctttcggtgcctcactctgctctgggggaagtaagggagtgaggttcaatgacgtggccaagatctttcaggggacgaggggcagactgagtcctctatccagggcccttctcaaagccatcatggatctcttggaagtattaaccccaaggggtggagatgccgcctctgagctcctgtcaccttcccaggcccgggagggagagcatctttccgcaccgctcctctgcggcttatgtgggattccacgtgcctctttatcttgcattaaataatggttttagtgggctgccagcttattcatctattgtatttatggaaactactaaagacttcaaaaaagggtttaattcaatgtgaggttctatctttgaagaaatttgtttaatagtgcagggaaaattgggcttttaatacaggaggagcagaacctgctctgtaacttcagagagaaaatggaaatcgagacgggaagtaccagagaagccactgggcttggaaggagggtgacttgggaatgagctggagctgggcccaagtaaagcccttcctagccttccctcgtctctgtctgtgtagggaaggcaaagacacaggaaaatgacagcttagtgtccggaaccctggggtcactgcaggagctggactccagtctgattgcatagagctgtagtaacccatgagtctgtgagcacagaggggccgggacgattgcagtcatccgtgtctcccgaaagcacagtgcctgtggcttctaggctgcaagcatgaagcctcccattgcagaggggaagaggctgcccttcagcgaaatgtggagtgggctgaggggatcttgggtacggggttttaaaaaacgtaatcctgggttcaa

SEQ ID NO: 10 - DNA, 2500 bp, Homo sapiens
  misc_feature (1)..(2500): DMR1:8412201
gggaacaaagcgacaatggcagcagctgcaaatacataagcgaagcatcactgaagaaagtctccagcttaatattgctcccgacaccctctgtggtggttcactcatacagcaaagacacgggataaaaaattccacagactgttttcaagataataaaatggcatatgatgatgactcactaacagactaaaaggaaaaaatatccgtcaacagtcataggaagcttacaaagctgcagagatctggcaccactaaagctcctccacctcccctggctctcacctccagtacacacatgtatgtgggacatacaaagtgtgtgtgttcatgtgcacaccctttagggattaatttgaagccaagttgcaattggctaatggcttactctactgcttaagacagtattttattcttgactggctcaataaacctgctgagaaaaataaacaatggatttcaatcttataaataatctagaacacagaaccgctgcgcaaacaggagagttgatttactgcgcacaataaacagaacaggaaggaccagtgtggcagagtgaaccccaagtcctagtcccattgtcctgggacagtagagttcacaggggttttctgtctattacacaaagtctaaggcctgggatatccaggtttcaaactggtcttaaaaagagcatttcaaagcagatcaggtggagaagctttggtggtgccagatctccgaagctttgtaagcttcctatgactgttgatggatttttttttcctttggtctgttagattttgctcacactgaagagcaaaagatgaggaaaatgttcgtttaaaaacaatgaagagttttcacgtcttaggaccattaattatctacccatgattacaatgtatttcgaacctattatttatacatgcgtgaacacacacacacatacttcattttaagcaaataaaaagtaagggctgttacaggactctaagggtgccataaagaggtattaaaatgaggtccctgcccagaaggctttatattctatataaatacatatatgcattcatgcacacatgtgtgcagagtaaaaatgcatggaaaagaggaatcagagtcaagtccaagaataaaataaaataaattttaattttgttttttgttgttgttgttgtttttgagactactctgttgcccaggctggagcatagcagcgtgatcttggctcactgcagcctcgacctcctgggctcaagtgatcctcccacctcagcctcccgagtagctgtaactacaggtgcgtgtcaccatacccagctaattttttgtattttttgtagagatggggtttcaccatgttgcctaggctagacttgaactcctgggctcaagtgatcctcccacctcaacctcccaaagtgctgggattacagacatgagccactgtacctgcccaatcttaatttgaagagggtggaacaaaacccaactctgctgagatgaaatgggccctttgtgtaacagcaaccagcctggggaggagcagaggcagccccagcaagaccgttagaaatgagggaactttagcagggcaccatggctcatgcctgtgatcccagcactttgggaggccaaggtgggtgtatcatctgaggtcgggagttcaagaccagcctggccaacacagtgaaacctcatctctactaaaaatacaaaattagccaggcatggtggcgcatgcctataatcccagccattcgggaggaagagggaggagaattgcttgaacccgggagacggaggctgtggtgagctgagattgtgccattgcactccagcctgggcaacaagagtgaaactccatctcaaaaaaaaaaaaaaaaaagaaatgaggggactcagatacctttcagagaagacccctggcccacctggccccttcactaggggccatgaaggtaagcacccttattcacctcagacatcccatcctagacagcacaggcctggggttaccaaaagctcccccaaaatcccaactttgtcaactgggatagtttagatatttcaatagtcggccgggcgtggtggctcacacctgtaatcccagcactttgggaggcagaggcgggcgaatcatgaggtcaagagatcaagagcatgctggccaacatggtgaaaccccatctctactaaaactctactaaaaatacaaaactcagctgggcatggtggcgcatgcctgtagtcctagctacttgggaggctgaggcaggagaatcacttgaacccgggaggtggaggttgcggtgagctgagatcgcgccactgcactccagcctgggcaacagagggagattccgtctctaaataaataaataacatttcaatagtcaaatcctggggattatgataccacaattgagaggattcagaagaaggatttaagacacttgagcagaacaaagaattatatttccaaagtgggggggtcggtggggggaagaaacat

SEQ ID NO: 11 - DNA, 500 bp, Homo sapiens
  misc_feature (1)..(500): DMR1:8680601
tcttagttcttaagcatgagaatcagaactgtgggcttcagggtaaaaaggaaagagagactgaaaagtaacatctatgtttaaatgggtcctttagagaaaagaaagcactcagctaggattaaaggaaaagaattgtacctcctcaactccgtttcagagtataataaaccttaccaatttagaagctacacaccctttcacagttcacattcagctcagactgggagtcggaaattgaaaaacactatagcccgggagaaagagacaggtaaacatacaaaggactgagacaactgcttaccactaatatgggtcaatctcgcaggaatacttgcaaaaataaaaattaccaagtgccctctacgaatgctaaatacaggtcaaaatttccaatggctcaaccacctgagtggagagccggagaatgggagtcagaaagcatgtaaaaccatcgaggtcccgggaaacaaatttcctaggcttttaaaaccattcgt

SEQ ID NO: 12 - DNA, 900 bp, Homo sapiens
  misc_feature (1)..(900): DMR1:9979601
ccatcctggctaacatggtgaaaccctgtctctactaaaaatacagaaaaaattagccgggcgtggtggtgggcgcctgtagtcccagctactcgggaggctgaagcaggagaatggcgtgaacctaggagacggaggttgcagtgagctgagatcgtgccactgcactccagcctgggcgacagagtgagactccatctcaaaaaaaaaaaaaaaaattgttattgaatgcctcctcatagactctgctaggagctggagtagcaactgtaagcctcctttctccttcccttacggagataataatatttatgatataggatgttgagaagattttttttttcttttgaggcggagttttgctcttgttgcccaggctggagtgcaatagcgcaatcatggctcactgcaacctccacctcctgggttcaagcgattctcctgcctcagcctcccgagtagctgggattataggcatgtgccaccacacccggctaattttctatttttagcagagacagggtttctccatgttggtcaggctgtgtctcgaactcctgacctcaggtgatccacccgccttggcctcccaaagtgctgggattacaggtgtgagccaccacgcccagtcgagaagatttttaattttttttagtcttccacaacagtcatcttatgttgagaagacttaatcagataatccatgtaaaggattcagtgtaatgtgtggcatatgataaataatgttggccaggcacctataatcccagcactttgggaggctgaggcgggcagatcgcttgaggtcagaagttcaagaccagcctggccaacatgatgaaaccccgtcactactaaaaatacaaaaaaaaattggctgagcgtggtggtgcgcccctg

SEQ ID NO: 13 - DNA, 1000 bp, Homo sapiens
  misc_feature (1)..(1000): DMR1:10278201
taaaataaacttcaagttaaggagcatgatgaagctaaatggtagtgaaaatgttttgttttgttttgttttctttttccttaaaaaacccaatggaaatgatctctagattcctttatgtaatgtgtaccagactatccatttgaactcaggaaattagttttaaatcgcaaatatgtcactagtatttttgttagaattctgttttagatcagcaatgaagtttatttggaacgttaaacctgttatcactgagcaattaattacttcatagaaatgttatttgaaattttgagttttgtttcatgggttgctctggattagtgtcgtggcagtaatataagaaacgcaccattcaagcctaccttcagataagattcacctttgaatggccccctcctcctgtaaaatgctggagtgccccgtgctgcctatgaacatatgaaggggaaaagttcaattcctatgaagttcaagaactacacttccagagagtattgttttacaatgttgtattaaaatttatcttaaaaaatctccgtgatgtgcctatccagtggcttattcagaagttctcttaagtgagtaaaatggattcatataggaatagaatatggtagaatatgggttagtttagtaaagcatttttttttagtgtaaagttaaacttatattccttgaagttctaataagattttcaaggcctcttctagtttaattcttcttattgattagagtccgagtttagatgaataccgtttgtaaaaatgataccgtattctaagtattaacttttccatctccccaaatgccaaaaactgctctgttccctctctgtgtcactgctgaacctgaactttgacccttctcgtattttccctcctgcttaccttcagttgatccattgatcgatgattactctggaagtggaagcaaatgtgtgtatttcacatattggttatttccagtactctgacttgctaatctgcctctgctggat

SEQ ID NO: 14 - DNA, 2000 bp, Homo sapiens
  misc_feature (1)..(2000): DMR1:10973501
tgcatactctgtatgtattgtcactcatcgctgctgagagaagctggccccgtctgtacaaccccacgaggaaagggcacctagaagtggtggcagtggctgctgccatcacactggctgcagcagggaggtgtggctggggtcgaacactctatggagctggtgggagccccgccccttctgagttgggacgggaactccttgggtgcctcggcaacctcccaaaccgcagctgcagatccaggcctcctgctctgtggagcaggcaggagccccaccctcctggatggggctacagctgcccaaactgcagctgtggatcggagcctccttgtgctcttgggggagggctaggagcaggcaggatctgccttcccgggtgcagcggcagctgccttcccaggcccaggagctgggtgtctctgcagcctgcaccctcggggaccccaggaaggaccccccccaccaagtctctgcaagctcaggggtgtcttctgctgcctggcctctctccactctaggggcctgctcagagctcttagggggtttggggccaagcctgtgagccatgaatggcagtgggaggctgattgattcctgggtggaatggggcaggtccccagtaaggccccacctgtgggccagggagggccagggctgcgggccgggctgccagtcccctggactggagtagggactcgtggtgcctctttctggctggcccatagctgcccatggaccaatcagcacacactttctcccctttgaggtccataaaagcccagggcacagccaaagtcaggcagaggacggccacaggaagacgagcgcagagaggcgatgggatgagttgagtaccctctctgctgagagcagtagagggtgggacgaccagtgggcagagaaaagctaaccgctctgctgacagctgcagagacctgcagagacgtccgaaagacttgcctgtggagagaagccaccctctccagggcctcctctctgctgagagctgaacactccgtgggaagacctgcctacagagaggagctacccactcctctgagctgttctaacgctaaataaaactcttccccttcttcactcttcacttgtctgtgtacctcattcttcctggacacaggacaagaactccaagaactcaggcaaaggtgccagcggccacagaggtttccggccagaaaaatgacaccccagagatcccgtaacagaagtttgcccctgggtatctcctgtactgcaccccgtacacctcttcccttggctgattttaacccatggcatttaaccataagtaacacagcttttctgagctctatgggtccttctggtaaattatcaaacctgaaggtggtattgggctcccttgaacttgaagttgctgtcaatagtgaagatagtgttggagactcttgaaccttgtagcacaaaaatagcccccccttcactgacatcaagaagatgaaatgagggctgggcatggtggctcacgcctgtcatcccagcactttgggaagcaaaggcaggcagatcactggaggtcaagagttcaagatcagcctggccaacatgatgaaaccccgcctctactaaaaatacaaaaattgggccgggcgcggtggctcatgcctgtaatcccagcactctggtaggccgaggcgggtggatcacaaggtcaggagttcgaggccagcctggctaacatggcgaaaccccgtctctactaaaaatgcaaaaattagccaggcgtggtggctcatgcctataatcccagctactcgggaggctgaggcaggagaatcgcttcaacccgggagcagaggttgtggtgagccgaagttgtgccactgcactccagcctgggcgacaagagctaagctctgtctcagaaaaaaaaaaaaaaaaaaaaaaaacacaaaaattagccaggtgtggtggtgcacacctgtagtcccagccactcaggaggctgaggctggaga

SEQ ID NO: 15 - DNA, 2700 bp, Homo sapiens
  misc_feature (1)..(2700): DMR1:11005101
atcctattttaagaaaatacaggctgggcgcagggactcacacctgtaatcccagcacttttggaggccgaggcgggcagatcacttgaccccaggagtttgagaccagcctgggcaacatggtgaaacctcatctctataaaaaatacaaaaaaaatatcctggtgtggtgggatgcacctgtagccccagctatccaggagactgaggtgggaggatcatctgagtcccggaggtcgaggctgcagtgagccaggattgtgtcactgcactccagccttggtgacagagtgagacctgtttcaaaaaaaaaaaaaaaaagaaaaggaaagaaagaaagaaaagaaaaagaaaacagctataaaagacatttgaggggaacaattgtagaaatttgaatgtggaccaggtattagatgatagcaggaaataattattcattttctcttatgattatcattgtggttatgaaggacaatattcttgttcttaggagaagcaggatgaagaatttaggagtgaaatgctgtgatgtctgcaatttactttctttttggtgggtaattgggggagatggggtctcactctgttgcccaggctggagtgcaatagtgcagtcttggctcactacaacctctacctcttggcaccacagcctcctgagtagctggaactacaggtgcatgccaccacacctggctaatttttgtagagacaggtctcgttatgttgtccaggctggtctccaactgcaatccgcccacctcggcctctcaaagtgctgggattacaggcatgagccacagcgccctgcaaatgtactttcttttctttcttttttttttttttgaaacggagtctcactctgtcacccagactggagtgcaatggcacgatctcggcccactgcaacctctaacttgcgggttcaagtgattctcctgcctcagctcccgagtagctgggattacagtcgcctaccactgcacgtgcccagctaatttttgtatttttagtagagacggggtttcactgtgttagccaggatggtctcgatctcctgaccctgtgatctgcctgcctcggcctctcaaagtgctgggattacaggtgtgagccactgcgcccggccaaacacttataatctgaatcaaatcatgaggaaacatcaggcaaccccaaattgagggacattccaaaaacaaagcaagcctgaactcttcaaaagtgccaatggcatgaaagacaaagaaaggctgagaaagtgttctagattgaaggagttgaaagagccacaatgatggaatacaatgttcctggattggatcctagatcagagagaaaaattactcaaaggcactttgggaggccgaggcgggctgatcacaaggtcaggagatgaagaccatcctggctaacacgatgaaaccctgtctctactaaaaataaaacaaaaaaattagccgggcgtggtggcaggcgcctgtagtcccagctactcaggaggctgaggcaggagattggcgtgaacccgagaggcggagcttgcagtgagccaagatcgcgccactgccctccagcctgggcgacagagcgagactccatctcaaaaaaaaaaagaaaaattattcaaaggacatgttttgtttttgtttctttcttttttttttttttcttgagacagggtctcactcttgtcacccaggctggagtgcagtgatgtgatcactgctcactgcagcctcgacctccccaggctcaggtgattctcccacctcaaccacccaaggagctgggactacaggtgtgaaccaccatgcccggcttatttttttttttttttttttgtagagatggggtttcaccatgttgcccaggctaggcctctaactcctgggctcaagggatctgcccacccacctcagccttctaaagtgctgggattacaggtgtgagccaccacagcaacctgtttttgtttctttttctgcgggggcgggaagggccaaattttaaaatggttgtatattagaaaagagtgttacattaatgttaaaatcccgaatttgataacagtattgtgattgtgtaagagaatgtctttgtccttaggaaagacaaactttttagaggcaaaggggcacgcagtctgtcattaatctcaatggataagtaagaacatatatgttattaattaattttttttttgagatggagtctcgttttgttgccccggctggagtgcagtggcgtcatctcagctcattgcaacctttgcctcctgggttcaagtgattctcccacttcagcctcccaagtagctgggaatacaggcatgagccaccatgcccagataatttttgtatttttagtagagatggggtttcaccatgttggccaggctgatcttgaactcctagacctgaggtgatttgcccaccttggtctcccaaagtgcgggattacaggcgtgagccactgcgcccagccatgttattaatttacatgtctagagagagtgagtgatagaccaaatgtgacataatgtaatcagttgatgaatctggatgaagggaacacagcagtgctttgcactattcttggaactctatcataaattttaaattatttcaatgtaaaaaatttgtttttaaaatctaaattagacctagactatttgggaaggcagcttctaatttt

SEQ ID NO: 16 - DNA, 1300 bp, Homo sapiens
  misc_feature (1)..(1300): DMR1:11578201
tcaggggtggagaatggctgtgtgtcactgctggaactagtgaatggccgttcacatccaacacgtgcccaaagagagtcaggatgaaagaggacggccaggagagagagcagaaaaagaagataaagcctttggaactcattttcattgcccctacaccacagccagagtaatcgaaatggaaggttaaaaaaaaatcacccacagtcctgattctcaacaaatcatgctgtgacacttttacttgtgattagaggccttcggcagagggcacagtcagaggctcctgggacacagaacagggacggggttccagagcccctcccagggttcccaggttcactgccgactccaccggatgagccagaatagaagctgagcccacttcggcttaggtccctgcctggtacggtggctcacacctgtaatctcagcactttgggaggccgatgtaggcggatcacttgaggtcaggagttcgagacaagcctggccaatatggtaaaatcctgtctctactaaaattacaaaaattagccaggcatggtggtgcaggcctcccagatactccagaggctgaggtgggacgatcgctggaatctgggaggcggaggttgcagtgagccgtgatcgcgccattggattccagcctgggagacagagtgagaccctgtctcaaaaaacaacaaaaacaacaacttaggtcccatctggaaaatggaatggagtatgcagggctactggggagtggggttagagggaggcaaagtggggagtggttagaagcgaaggctttgacaccaggcagctgggagtggacctcatgcccaccctttcctggctatgtgaacctaggcaaataacttcatctcttgagcctcagtttcagcctctgcaaaatggtcaggtactcatctcacagtgttgttgtggagattaagtaatataatacttatatatttatacttacatatttagatatacataaatatatatttatatattacatatatatcattttgcatatacagtaagccctctgtcaataaccgctattactactgctactattattccatagaaggaaataacaaatgaagaggtaaagaaaatcaagaatgaaaatacttttcttctcctgtgcttgactgagatttttgaacccaatagacagaggagggaatgcctttagaatatatcattcaaagcacaagaaatggttgttttccaaccaaaacccccagaaaagtattctaagaaatctcacatacacatatttgctttaatcaaaatccaacta

SEQ ID NO: 17 - DNA, 1400 bp, Homo sapiens
  misc_feature (1)..(1400): DMR1:12173801
tggggctctgatgctcaggacccacctctctgggacccacagtctttttccactgtggcgtgtagtgatgtcacaggtggcagtgatgtcactgtggtttgaggtacttggctgtgagccccggaggaggaagtgtctgttcgctgatggggggttggaagagatcattgacttctgccccaagcgtgagccccaagtgtgcaggggggagtgcggggggagggctgttggcggcgcatcccagggctctggctctgcccttgcatctagcctgtctttcctgtgggctgtgacaagccactctgcatctctgagactccatttcttcttcttcttcttcttcttcttcttcttcttcttcttctccttctccttctccttctccttctccttctccttctccttctccttctccttctccttctccttctccttctccttctccttctccttctccttcttcttctgatggagtctgactccgttgcccaggctggagtgcagtggcgtgatcttggctcactgcaacctctgcctcccaggttcaagctattctccagcctcaaccttccaagtaactgggattacaggcatgcaccaccacacccggctagtttttgtatttttagtagagatggggtttcaccatgttggccaggctggtctcgaactcctgacctcaagtgatctgcccgccttggcctcccaaagtgctggaattacaggcgtgagccactgcgcccagcttccatttcttctttgaaaagtaggaggggttggaattgtcaccctggaggttcatggttgctagattattgattctgttgctggattcaggagacctgttagctggctagttcacagcaagtattgggtgtttggaggggggctgcagagccccttctcaggccccaggagggccagctgccctccctaccccctcttttggacactagtgggcatgttctgctgggaaaacagacagtgtaacctgacttcgagggctgcaggctgaatctctttcagatgtactggctccttgagaggcctagcagatctctactctgtgggtccctttcggagctggggctcaggtttgacccagccactctgaccggagacagcgcagaaatcaccaggagcatttgtttgttttcctttgctgtccagacagtggcccaccgtctgcttcagtctgagcgtggccctgcactagtgagactgatgtggccacaggttcagagaatcagtgcgcctgagtgggagagcagagcgggaggggatttggaggcaggcgggctgtggacagggaggggggaggacatcttccgagctgtcagcgggaggccttcttgaaggtctttcaggagcaaggccagaggccgtgggagtgggcgggg

SEQ ID NO: 18 - DNA, 4600 bp, Homo sapiens
  misc_feature (1)..(4600): DMR1:12188501
gatatctgtcccatgcagtgttaggggtcacccagcactggagaaggccagcagagtcagtgcttctgcctgcagacatgactagggtacactgaggtggggaggcaggggaggtaaaagaaggcacgagctctccttcctgtaccctgctccagggggagaaacctccccagccatcatcagtgcagactggcagggggagggccaaacatttgcagggcggggacctgggcatcaggcatggcagaacccaggggcggccctgttgatggcagtcttcccttcttccttccaggtggcatttacaccctacgccccggagcccgggagcacatgccggctcagagaatactatgaccagacagctcagatgtgctgcagcaaatgctcgccgggtgagggcagccacgggggcactcggggcccatgccctggaggagcgtgtgtgtacaggggctggggcgcaagagcatagcccttgattcttactgaactcctagttctatgcactggcccatgctccctgctgcttctgggcctgtgaacatgctgttccctcttcctggcacacttcccaactccctttccctgattaactccaacttgccctttagacctcagctgaagatgtcccctcttccaggaaggctgcctgccccatactgcccagccggtggaggagggggaggaggagcctaaattagctcctgggggagtcagggagggctgcctggaggaggcagcactcagcttgaaagacaagtgctgcctcctttgagctctcactggcctctgatgttcccatggaagctctttccttgctgtgggattatagcccggtcctgcttcctgttgcctccactgtgtgctcctctagggcagagattgtggcttgttttctgctgaatccccagcacgtggcgcaatgccatgtaggtgctcagtgcatatttgactgactctgtgaatgcttacccatttcacagatggtagacctgaggcccagccacagttggtggagctaggtagcctgactcctggtgccctccatctattcatttgtgtctgtattcattcatgtcatgattataaggtatctgctgtgtgttctaagtgctgggaatacacagagagcagggcagacaaaacccttgccctcgtggagtctgcattttaacggtggatgcagacagatacattaggagatgtgtggtcctgtctatctgtaagtgctgtagaaagacaaggtcaggtaaggcgggggagacagaacgggacatactgttttacacagggtggtctgggaaggtctctctgaggaggtgacatttgggcagagccctgcaggaggtgagggagcaggtcatgcatgtatacagggaacagtgtgccaggaggaagcaacagcatgtgcgaaggccttgaagtcggagcctgtttggtgagttggaggaacagcagggccagcatgtgtggcccaggatgagcgaaggcgagtacggtaggggaggaggaggaaggagtgagcagggaccatggtaaggagtttagattttattctgtctgggagccaatggagggctttgagccgttaccttgagatgtaggtgggcatatgagtacctgtcaccgtccctagccattttaagacatcctagggaaagtgactctcttctttcttttattaactggaagggtctctttaagaagttactagagaggctgaggtgggcggaccaccggaggccaggagtttgagaccagcctggccaacatggtggaacccgtctctactaagaatacaaaaaaatagctgggcataatggcaggcacctgtaatcccagctacttgggaggctgaggcaggagaattgcttgagcctgagaggcagaggttgcagtgagccgagattgtgccactgcactctagcctgggccacagagtgagattctgtctcaaaaaaaaaaaaaaaaaaaaaagcagctactgagtcaacttttttttaaggtttccgttggtgttctctgtccctggaatgcctgctttccaggcccatgcccttgtccttgataggataccagggactacattcttactacctgttccccctatcattcatgcccctagctggagaatattagccatctatcaagaaggaagaaactggcaagctagttcttactaaagtgtgattgactgataatagggctccagtggtggaggttcaagcatctggaaagagcagagaggaatctatttttgagcagaaggggttcagaaatgacgtgatagctggtacaatactagatgggagatgattctgaggaattggaactccacagaatagccttcccagctgggctttagaactctggactttgtggggacagtggatgagcccagggtcctggcagaaggctcgcccagctgagacctctggcccttgtttcctcaggccaacatgcaaaagtcttctgtaccaagacctcggacaccgtgtgtgactcctgtgaggacagcacatacacccagctctggaactgggttcccgagtgcttgagctgtggctcccgctgtagctctggtgagtaggttcagagaaaaagggggcccttacacccctgcctccaacttcccccggcaactccagcctctttggcttccagctgtctggagttaccccaggctggttgttggaagtggcacaggtgcagctgtttacccctaccactggcattttcctcctctgtctcaccaaagcctcttcacagccccacggggcaggcggtgggagaactgtgcccacgtgagggttgaggaggtggtgcgtgggagagtggtgcgcatgctcgtgctgcgaggagcaggactgcggggaggagcgaaactgctgggaagagcgggactgcggggaagagcgggacttcggggaggagcggcactgcggggaggagcaggactgcagggaggagcgggactgtggggaggagcgggacttcggggaggagcgggactgcgggggacgagcgcgactgcgggggacgagcaggactgcggagagtagcgggactgcggagagtagcgggactgcggagagtagcaggactgccggtcctgcccctggactctggccggtgttgtgtgtgccccatgctgaggcggtccgccagcctcctggagatccgctgtctgagagtgctgggctgtctgggagggcagcgtgggtgtggcggaggcaggcgtgaccgtttgccgccctctcgctgctctagaccaggtggaaactcaagcctgcactcgggaacagaaccgcatctgcacctgcaggcccggctggtactgcgcgctgagcaagcaggaggggtgccggctgtgcgcgccgctgcgcaagtgccgcccgggcttcggcgtggccagaccaggtacggggtggggctcaggtccttggggacgcccatgggcctctcctttgtagacatccttgcagtgtcacgggcatcaacccattaattagtccagcagggagcactgttagtggtggccaggtgcctgctacccatccgtctgtccacctgtccaccgttcattcttcctgccagcactcccgattaggcacctcttatgtactggaaccaggagacccagagatggatcagaccaagccctaagctaggaaagttatgtgatgctgcaagatgaactcacataactctacagcccaatcccgtgcatgtgtgtacaggaatctgtgtgtgtgcatgtgtgtacaggcatctgtgtgtgtgtgtgtgtgtgtgtgtgtgtgtaaggggtggaggtgcagacagagctccttgggcccctcagacctctcctagggctctagtgccaaggcccagctgtcccgcagagtgtctgagtggttgacaagttcggattgttccctgaaggaactgaaacatcagacgtggtgtgcaagccctgtgccccggggacgttctccaacacgacttcatccacggatatttgcaggccccaccagatgtgagtagctgagtcctttggttctggaggagcagggaggggctgtccctgggtgactgtgggtccaggacacagagcagctcaccaaccaccattgtccagactgctttatctgagggtggctcccaggataaatggcatggtgggcaggaccttgccctggaaggcaggactgggtgggtgcatggggaggtgggggagggctaggagggggtggtcctcagagagggcacacatcgtcactctcctatcctgcctgctggggcccgtgaatgagcccagccaccccagccactctgtcccctgctgcctcctgaccaagcctcctcctcctccagctgtaacgtggtggccatccctgggaatgcaagcatggatgcagtctgcacgtccacgtcccccacccggagtatggccccaggggcagtacacttaccccagccagtgtccacacgatcccaacacacgcagccaactccagaacccagcactgctccaagcacctccttcctgctcccaatgggccccagccccccagctgaagggagcactggcgacttcgctcttccagttggt

SEQ ID NO: 19 - DNA, 200 bp, Homo sapiens
  misc_feature (1)..(200): DMR1:12715301
ctcactccataggcatttgctgagcacctacaaagtaccaagccccaatccagcctctggtgataaaatggcacaaaaagaaaattcctgtcctcccagacaataaacagacaagtgaggcaggtgatgataaaggtcacagggaaaaaccaagcagtgggggggtgaggaaggtgggggatggggaagatgggggatgg

SEQ ID NO: 20 - DNA, 3300 bp, Homo sapiens
  misc_feature (1)..(3300): DMR1:12949801
caaggaatatgttttattcttttatcttgtcatctaaagccaatgattgtaacctctgtattgtctcttccaatggaaaaaacgaaaacaaaaactcaactctatttgagccttgtcaggtcaataaaacaaaagaaaatttaaaaaaataattgataggaggagtcccattcccagcctgggcaatagagtgagactccatctcaaaagaaaaaaaaaaaaaggccgggcacggtggtggctcacacctgttatcccagcacttcaggaggccaaggcaggtagatcccgatgccaaaaaattgagaccatcctagccaacatggtgaaaccctgtctctgctaaaaatacaaaaattagctgagcatggtggcgcccacccatagtcctagctactcgagagactgaggcaggagagtcgcttgatctcaggaggaggaggttgcagtcagccaagatttcaccactgtactccaacttggtgacagagcgagactccatctcaaaacaaacaaacaacgaaacaaacacaaatgaacaaacaaaggaaaaagctggaaaaataaattctgaaagaatttccatctctatgaattcatcttcagaagtgatagcatttcctgcttggcatttttcgcctacatttttggcataagatctatcaacaaaaaagtatgaacccaggtttgtgtaatggaatatcttaaacatcaataggaggagtcaatagttctgatgccacacacacatatatggtcttctccatcatcagaaaatggcaacaaagtggtagagttatgcagagtgtagcatttgaaatggagatttgaaggtgacaaggaaaggattttgtaagacattagtgtacaagttgagcaatgttggttcctgtcacagtatttttagttatttttttatttattttattcatttattttttgagatggagtctcactgtgtcaccaggctggaatgcagtggcacgatctcagctcatttcaacctctgcctccccggttcaagcaattttcctgccttagcctcctaaatagccgggactacaggtacatgccactacacctggctaattttttgtatttttagtaaagacggggtttcaccatattaactaggatggtctcaatctcctgacttcgtggtctgcctgcctcggcctcccaaagtgctggattacaggcctcagccaccatgcctggtcggttcacatcaaaatttaagaggtattcaattgcatatgaaacttgtaggcaaaatttatttcttttttctttaaagcattaatttatttatttataatgtatttatttattaatttttttttgagatggagttttattcttgttttccaggctagagttcaatggtgcgatctcagctcactgcaacctctgcctcccggttcaagtgattctcctgcctcagtctcccagttagctggaattacaggcacaggccaccacacacagctagtttttgtatttttagtagagacagagtttcaccatgttgcccaggctggtctggaactcctgaccacaggtgatgcacccacctcggcctctgaaagtgctgagattacaggtgtgaaccaccgtgcccggcctacactcatcacttttaatactttctacatcacatgaggaagaagagcagaaacacttgagtacttcatgaaggtcaaggttggtatgagtttgggttctaatatgatcaatttctgcttctagggaaccaagcagctcaggttaaggaaggtcaggaaactctagggttttctctcccttcaaagaaagctttacgtatcaccttaatggagaaagcaaatctcatccccatgttgtcacctaataaaaagccatactttcctaaaaatggtccaaatgtcatttggactgctttgaacacaggaattttctgagcttcatgtgaagctttcagtgaatttcatgtgaattcactcctggtccaatgaagccatttcctggcatggccaaagatcaggaacggattcctctggatctgtccattaggagtgagcagggtctcagtatctggggagcagtgagggcccctgagaagagggtaggtttcagtggctcatcatcactgcccacacagaatgttccaggccccaagtgtgcatcctttgtgaatgaacccagtgaacaggcatgggagaaattaaggaagaaacagatgactgaaaggaagcaaaaaatgagtgagaactaatcaaaatgatcacatttcagttttgatgccttgatttgctgcagctgaacctcaatcacagatgacgtagtacctctcatcagtaactagagatttctgatatataaatggctaaaacaggttgatcaatcatggaagacaccagaaagtttccattcaggttccatttatttttgacatttttaaataaccatccttgcgagggtaactcctgcatcattctagaacttcaggttccatttccgagtctaggaaacaggtccctgaaggctttattgatgccaagtcagcattttcaccaagtcctgcccccagctgagtcacctttgtttttccactcacagtcagcacgtgcctgaaacacatgaccgtgtgcttcctttaagatgcacctgaccgggccaggctgctcatgcctgtaaacccggcactgtggaagtccaaggtagtcagatcacttgaggtcaggagtttgaggccagcctcctccaacatcgtgaaaccctgtctctactaaaaatacaaaaattacactttgggaggccgaggcgggtggatcacgaggtcaggagatcgagaccatcttggctaacttggtgaaaccctgactctactaaaaataccaaaaattagctgggtgtggtggtgggcacctgtagtcccagctactctgaaggctgaggcaggagaatggcgtgaaccctggaggcggaggttgcagtgagccgaaatcgtgccagtgcactccagcctgggtgacagagcgagactctgtctcaaaaaaaaaagaaaaaaaatacaaaattagctggatgtggtggtgcatgccagtaacaccagctactagggaggctgaggcaggagaatcacttgaacctgggaggtggaagttgcagtgagctgagattgtgccagtgcacttcagcctgagggacagagtgagactccatcaaaaaaaaaaagcacctgtgtcctagattttagtgcccaagggtccagaagaaaacgtgtccatcccactagccaggccttccctaagagcaaag

SEQ ID NO: 21 - DNA, 2900 bp, Homo sapiens
  misc_feature (1)..(2900): DMR1:13546201
aaggcctccttccttgacatgtgggtttctctctagggatgctcatgatatgagttcaggcttccccaaagcaggtgatgggagaaggagggggtggagagagagagagagaacccagcagtgacatactatcatttttgccatatgctaatgatcacatagaccatgcctcatacagtgtggcactatacaagggcatgagtaccgggagcctggaattattgggcaccatcttggaggttgcctaccacatggacagaaaagttgtaaagatagagaacacaatgaaacacggctttaaaactgaaaaagcctgtaatcccagcactttgggaggatcacgaggtcaggagatcgagaccatcctggctaacacggtgaaaccccatctctactaaaaatacaaaaaattatctgggcgtggtggtgggcgcctgtagtcccagctacttgggaggctgaggcaggagaatggcgtgaacccgcgaggtggagcttgcagtgaaccgagatcgcaccactgcactccaggctgggtgacagagcgagactccgtctaaaaaaaaaaaaaaaaaaaaaagaaaaaattgaaatagctgcattaaaggaagtggcataagaagtgtgggcacaggggcttcttagtacttcatctctgaagtagagacacttagccacctggccacaggtggggctggaaaaccaaagcctctcctgcaggagcacagcagccaggttaggcttaaggtgtggagcagtagagaacctccactgaggaccagacattctgcaaagagaatgcactgagctggacaggctcagcaacgtctcccaagggccaaactcgggtcatgccactcctctcccggcaggctggtaatgcttctcttgaagacatgcccaacatatggcaagtgaatggatttctccctccaccatccctggcccaatccactctctgttccaacaaggactgctacatctgatggatgttttatggacccctgtgggcaaggactgtttctcattgatgtgggtgtccccagaacctatcatggggcatgacatgtgccatcttcctcctccccctcttccatcattgagtgcctagcatgtgctaagcagtgtactaattcctccacaggaatgatctcattcgatcatcatcactttctcttatgtggcaggtaccaatactatccccattgaaaggataagtcagcattagagaagttaatgtgccaatggccacaagttagcaggtggcagaggtgggatctggtaccagccagtctgactccactgccacgctcttaaactccatgccagagaggctgttcagtaaatatttgttgaaatagattcatttaaaaaaaaccattgacttaaaaaaggaaagaaaatctaagcaagtaaaattgttggaccatagcaagttctagacagaagctaatccccacagttctttttccaggtcccaagaataaacttaaaatggaaaagaggaacatcctgcaaataaatcattagtttccaaaaggcaaaagcatgagccaggaaaccacttcattttcagaatagaccttcttctcattcccatatacttctgtagatgctgcctccatgattaaaagaagggctgctggccaggcgcagtggctcatgcctgtaatcccagcactttgggaggccgaggtgggtggatcacctgaggtcaggagtttgagaccagcctcaacatggagaaaccccatctctactaaaaatacaaaattagccgggcgtggtggtgcatgcctgtaatcccagctactcgggaggctgaggtaggagaattgcttgaacccgggaggttcactgcactccagcctgggcaacaagagcgcaactctgtctcaaaaaaaaaacaaataaataaataaataaaagaagggctgctgatgagaccttagcaggcaggagtacgtgagagccttactccccgctaagtccccaccagaagttcagcacgatggtcagtgctgatggcttgttggctctgagcaccaggaagtggggatgggtttatactccacttcccaagaaacacaatttcagagtttatgagacaaacaaatgaaaggccaagagccaggctgctcaaggcattagtgcctctactcaacttgttggcttgtctggaaacaacaactcatttgctggtatgcagtggtgcccggcctgctgcttagatgctccccacaaccccacccactcgtctaattatgtcaattcatgtcacagttcccacaccagagcggaccaactgccacatgtgcaccaactatgagtaaggcataaggcaaagtttcacggggacacaaggtctcatggggagctatgaggagataagatttcatgaaaatacaggccaggcgcggtagctcacaactgtaatctcagcactttgggaggccaaggagggtggatcataaggtcaggagttcgagaccagcctggccaacatggtgaaaccccatctctactaaacatacaaaaattagccaggtgtggtggcacgcgtctgcaatcccagctactcgggaggctgaggcaggagaatcgcttgaacccgggaggcagaggttgcagtgagccgagatcgtgccattgcactccagcctgggtgacaagagcaagactccatctcaaaaagaaaaaaaaaaaaaatttcatgaaaatacaaggtcacatgggggagacaaggtcctgtggggatacatgggcagacaaggtcacatgaagatacatggggagccaaggtctcatagggagacctgagaagacaaggtcatgtggggagacatgaggacataaggtcatgttaggagacgaggtctcataaggacacataagggaac

SEQ ID NO: 22 - DNA, 900 bp, Homo sapiens
  misc_feature (1)..(900): DMR1:14192301
tcatcctttatatgcaatactgtcccattgatattccatacttggttagccacaggacagggtgggagctctccctgagcagaggtgtctggtcacttgaaattaagctccagggacccactcatttctacacttgtgcagtcaagcacagagcttgaattcaaagacctgtataaagctacagtcatttaaaaccataacttactaagaagaaacttgaatatatacgtggaggtggcataagaagttttattcctggtctggaaaaaaacttgttctagaagcacaagctgtacactagtgttcgtaagtgatgtgtaccatagttgagtgtatgtgatgacttttaaatatattttcaaagaaaatttgaatcagtgttttcagaatctttgaaatacctctacaaaacacagttatgcagaacacagtttgcaaatggatgccctacactgcattttcccagctgcatcaaaaagaaataattcctttgttatgagttgaattgcatcttcaagaatagctatgttgaagtcctagctcccagaacctaagaatgtgacattatttggacattgggtctttacagagttaatcatgttaaggccattagagtgggtgctaatccattatgactgatgtgatatggttaagctttgtatccccacccaaatccccataatccctgtgtgtcaaaagagagaccagatgaaggtgattggatcatgggggcagttcccccatgctgttctcatgataatgagcgagttctcaaaagatctgatggttttataaggcgttcttccccctgtacttctccttcctgccgccttgtgaagaaggtgccttgcttccgcttcaccttccaccatgattgtaagtttcctgaggcctccccag

SEQ ID NO: 23 - DNA, 2000 bp, Homo sapiens
  misc_feature (1)..(2000): DMR1:15597801
tatgtattgtacaaagtataagttgaccatagtctgctcctactcctgctcaaggttgtttgtttgttttgttttgttttgttttgtttgagatggagtcttgctgtgttgccctgcctggagggcagtggtgcaatcttggctcactgcaaccctccgcctcctggattcaagcaattcttctgcctcagccttctgagtaattgggattacaggtgcccaccaccacagccagctaatttttgtatttttagtagagaaggggttttgccatgttggccaggctggtctcgaactcctggcctcaagtgatctgcccacctcagcatccaaaagtgctgggaaaaaagtgtggggattacaggcacctggcctcaaggttgtactttaattcatatgagactttggaaaaagtacaggtttctcctgtacaaattgttggcaatgtgtccttttttcaccttaaaatgcctggaaatctttcagataagctttttaaaaaagcttttttttaggtgtaatttacataccacaaaattcacccatttttaagtgtacaagttaatgatttttcgtccccttgtgcaaccatcacaactcagttttagaacatttctatcacccccaaaagttccttcatgcctatcaaagctttttaaagggtgcgtttttgtggataattacaatcatgagtaacaagtcccagaaatgtccattttgcctggcttccttttgctgccggcaggcaaaaagaaaattgcaaaagcccatcaacaaatgttggaagaaaacaccataagctgatcaacagctgtctgctaaaaatagtttattcatgctctccagcttttagtgaatgtcagccaagtgccaggcattggttaagtctgttagggatatcaagacaggataatagcttcccctggaagtaattggatatgagttcaatagtatacaacctcacttaaaacagtttccatattcaatggtttggggtggtaaaagtgtgccaggtgggtgtgatatttggacttccacttccagaactgaagataaacaggggctagatttactttcccacataaacaaccaaaatacggatccccaaaatgtaacaaatggtctttaagacaccggatatcacgcaacaaaggacagaaatccctgaaaaaagtacaaatggctgggcgcggtggctcacgccggtaatcccagcactttcggagcccgaggcgggcggatcacgaggacaggagtccgagaccagtctggccaatatggtgaaaccccgtctctactaaaaatacaaaaattagccgggtgtggtggtacacgcctgtagtcccagctactcgggaggctgaggcagaagaatcgcttgaaccctggaggtggaggtggcagtgagctgagatcgcgccactgcactccagcctgggcaacagtgccagactccgtctcaaaaaaaaaaaagtacaagtgaagtgagccctattattgctccagcttactgccttgagggtttccaggctctactgcaagaagagcaaagtgaggaagggcctggtggaatcccggagctgaggagacagagctgagtccagggagaccaaggtagccagatggaaaggacagagtaccagagaaagagagttgttcagacagaaccccagagatctgtaaaaggtccccgcctctagcattcagcagagtactgttcaggatacatatgtaagaaaactacacaaggctggggaaagaaccacgtaaaaggattactacagcgattcctaacctttttggagtttcgggatgaaactcttccacctcagttcatcagacgttcgttagattctcataaggagtgggcaacctagatccctcacgtgcacagttcacaatagggtttgtgctgctatgagaatggaatactgctgctgatctgactggagacagaactcaggcagtaatgctcgctcgcctgccactcacctcctgct

SEQ ID NO: 24 - DNA, 2700 bp, Homo sapiens
  misc_feature (1)..(2700): DMR1:16087101
gccactgcactccagcctgggcaaaaagagcaaaactcagtctcaaaaaaaaaaaaaaaaagaaacaaaatggtccaggtacagtggctcacacctgtaatcccagcactttgggagaccgaggtgggtgggtcacctgaggccaggagtttgagaccagcctggccaacgtagtgaaaccctgtctctacaaaaaatacaaaaaaaaaaaaaaaaactagccaggcctggtgtccggtgccagtaatcacagctactcaggaggctgaggcagaagaatcacttgaacctgggaggtagaggctgcagtgagctgagatcgtgccactgcactccagcctgggcaacaagaatgagactccatctcaaaagaaaaaaaaaaaagaaacaaaatgatcagtcaaaccagaattgtttttgtcaaggtagttttttataggtggatagttttctctaaagacaaaagaggttgtgcacgtatttctaaatggtaacaataatatttgcaaataacagttttccagtgctccaacttggggttaattcagcttgacccaggacttgggaatggagcccatcaacatggctttaaattggggaggcacaatgaggtcgtgagaacttggggagtcctctctgcctagggccgctcgttgatatgtcctggggcggtgtcactgtggggagggtagccctcctcctcaccattgagaggccctgggtcccaggctttagatggaagagaagtaagaggttgttggggctgagggcggaagcaggagggtgaggaggcaggaacagaaccctgcagggccactgactctcagcctctgaacctccccagtccctctccctcctccctgtgcctccccacacagtctctctccccgcagctcccaaaccttctccttcctgccagccagctggggcgggcagaccaggaccaccttggtccaggtgccccctgatctaatttgtactttctaacacttcctcccatttccccaccccagcccgggctgggcacctcctgggaggaagagggggaggtagggcaggggtggggacagggagagcagattcctaaacaggagacaggaagaagctctgagatgttggacagaaaaaggaggttcggctgtgaccaaatgaataaacctcactctgtcccagccccgcaggctggcggtgaggacatggggattgtgggcctggcgtaggtttggtgctcagggaaagatggctgttactactggagagtggcctcccatgacctcgcctcacctcctcacttctctgtagggaaaccaaggctcagagagggcgtgggcccagtcctgggtcacacagcgctcacagcccgctggggtggcgcctcccctgggtggctcccttggggtgggctccattgtgctctccccagcaggaaaccgctgtgctcagcagcctgggcagtaggagaagaggaacgagtttggctacgtgaccggcaggccctggaggctgagccaggcccagccgggaaaacaacctgctggaggccgcctgggcagggccaggagggtgggcaccagggtggagacctcactgcccagagagggggaagtgggccgagctgtgggcttcccctgggacagagttgggaggagtccttggggacctgtgccccgaacctgcctgtgaggggtagctgggctcgttacttccctgatacgcatggccccggggagcagcaggtgggcaggtgggcagcggggccaatgggcacacacagcactgagggtgatttgcacagaatgccacccactcttcacctctgatttatgaggattcgagaagccaacagggcaggaggagggttcagccttacccatgggccacttggctcccaggggcccagtgcctgcaggggcaagacccaggggaaaggggcagggcctctgctgagcttccccaccataggacttggagcatgggacttgaggcccctctcggggcctcagttcccctcagcgactcgtgcaaccgttgcctccctcacctccacacacagggctgactcagcgcctggacactggctatcaggggaaggccccgcaggcccacgtacttcaccgcttggccagtttccgcagggcaggcactgaatgccagagccactagtcaggactgcatcaggaagcaaaggggagctgttgaaggattcagcactggggcaggaggtgatcagatgagagtgcaggaaggggccaggctggaggctagagggaggtgggtagagtccaggtgaaaggaggaggccacagcttggacctcagtgaaatgatagaagaggggtgacagaataaggtttaatggatgcctgtgaaagatggcaggggaaagaaaaagaaagaaattggaggccggacacagtggctcacacctgtcatcccagcactttgggaggccaaggcacaagactcgcttgaacccaggaggtggaggctgcagtaagccgagatcgcaccactgcactccagcctgggtgacaaagcaagactctgtctcaaaaaataaaaaagaaagggaaggggaggggaagggagggggagggggtggtggctcccagcacgttgggaagctgaggcacaagaatctcttgaacccaggaggcagaggttgcggtgagccaagatcgcaccactgcactccagcctg

SEQ ID NO: 25 - DNA, 2000 bp, Homo sapiens
  misc_feature (1)..(2000): DMR1:16327201
cggttgcaaagtatactcttgaggtgttcagtgttgaaagacttcactgaaccgtactttcacatggccttgcttatgaccaaaagcacaaagccatctgtaagacagttcatcttagttgggagtagagcataaaatgtatttttcttcactgacgaattaactgaaataaaaacaaatcttaagcaaaggcataattacacttttatgtaaatgtgcaatactgtcagaagcctagctgaaaaaccaaaaagtaaaacaaaacaaaaatgctaacttttaatcgtggtaagtcccagaagaaaaacattaaaaggagttcaaaattagaaagataaatagattcagagttaaagatagagcctaaactattttgcccaaaccattcaattctttaaagcattttaaaatccaagtaacacagaaaagtgaccatcctaagagtagagcttgatgaattactgcaaagtaaacacaatctcatttattttaagatgggaaagtttttgttttgttttttaagacggagtctcgctctgttgcccaggctggagtgcaatggtgcaatctctgctcactgcaacctctgcctccaggttcaagcgattctctcacctctgcctcccaagtagctgggactacaggcacacaccaccacacccagctaattttcgtattttagtagagactgggtttcaccatgttggccaggctggtctcaaactcctgacctcaagtgatccgcccaccttggtctcccaaagtgctgggattacgtgtgtgacccactttgcccagccaggacagtctgaaacaatcaaaatgatagacatatccaagtcacgcagcttatactgacaagtgccactgtgagaaattccaaggttttctataaaactggtaagactcaaagctcacaacccacatttgtcaaaacccacagcatcaaagagtgaaatttaatacatgtaaatttttaaaaaaaaccacttactcaggaggctgggggatcctagattatgataaaacaatccaactatattacaaatatatgagaccaccttgggtggaggaaaaggtgtaacctaagtaactttggaaataaggggcatctataaaactaaaggcaaaagaaacttcatataagcactagtctctacttgacaaagttgtttctcacaaaagcagaggctaacaatactaatctagctatacatgtatattggcattgaacgattaagtaaatagttggcagatggctagaccaaattttcttattggagtgggaatttacaaatagtcaaggaaggaagatagaatgatcctgtgataatggattagagtgggagacaggatgaactcatgtttaaatagatacagatggttacatataaatatttacaattggtgcataatatacacacacacacatatatacatgtgttagtatacactcatctaccaccttgttctgttaactgcaagggcctacaagtaataagcatacctagcacccagaagttctttctaataccgttctccaataaaagaaaccagggctccttggtgaaacggcagaatctaggaggacaggaaatatataagatgagcctggagaatccagtactgccacaaagtaaggaagtgccctaaaaacaaaacaaaagaaaattgatgggattggccgggtgcggtggctcacgcctgtaatcccagcactttgggaggctgaggcgggtgaatcacaaggtcaggggttcgagacaagcctgaccaacatggtgaaaccccatctctactaaaaatacaaaaattagctggccatggtggcgggtgcctgtaatcccagctactcaggaggctgaggcacgagaattgcttgaacccaggaggcggaggttgcagtgagctgagattgtgccactgcactccagcctgggcaacagagtgagactctgtctcaaaaaaaaaaaaaaaaaaaagaaaattgatgggattgt

SEQ ID NO: 26 - DNA, 2300 bp, Homo sapiens
  misc_feature (1)..(2300): DMR1:17637901
cggccccccacgcctcttccaggagctgcaggacctgcagaaggacctggccgtggtggagcagatcacgcttctcatcagcacgctgcacggcacctaccaggtacgtggcctggcctgacctttttggcctgagctccccagtgtgggcagtgcctggattcagaaagctgagtagggaggggctcctctcctggcccatgtccccgatgtgctcctagcttctgagctcctgttggcaactgtcgctgctgaagctccatgtccctgcctggaagtctcttttgcggccgctggttcgggcgcatcctctggtttgggttgagtggagcctggctgtggggcctttgtttgttctctgcacagtggccattccgttatgtggcccctcctgggcctctacccagtgtggaggggaagctggctgcgacggcatgtccctctcagaggagggctccaggtgggatctgagcccagggctgggaagcctggggcatggcgagttggcctcctgcgtggggctaaatgtgcagcctcagtgaggctccaggacttcttcagtttctcttcctctggggtgctgtgattcctataggatctggtgtggcttttggggagccagtgtgctgtgtggtgacctcattggcctcctgaaccctagaacctgaacatgactgtggctcaagactggtgcctggccctgcagaggctgatgcgggtgaaggaggaagagatccactcggccaacaagtgccgtctcaggctcctgcttcctgggaaacccgacaagtgagaggagggggtcttggagggagggctgctgcctctgctgggcttccagtggagcaggggatccggagagggtacctggagccctcttatttgtcgagatgccatggtgggagtggatatgtaggcatcgtgggccatgtctgggatagcatctggcacgcagtaggtgctcatgaaaagactgtggaatgaatgaatgaattaatgaacagcctggtcatgtcctggataagcctggcccactgttaggatactcagacactctgccattggtcagttccatttgcgctgtgtccttttcagtcacttcagcctatctaggcccccaggccaggccctgggtttcctctctctggacccagcctccccccagcaccaccttagccccagaatgcccaccacaggagctgtgcacagtagaccccaactgaggtttgtggaactgatgacagccatagctgctcggcctggcagagacagggaacgggatctttctggtcctcctgaggctttgtaagttgggtctttttatttccattttacagatgaggaaggtgaggctcagagtttcaggagaggctgaaggccacatcgtgagagacagagctgggtcctgatgaggtctgactctgaagcccaggccagtgcaatgagggggctcaatgcccaggttttggcctccagggtggggtgaaggtggggatagagtgtcacaagcacagtggctgcaaggaagagaaggttggagcactatcatttgaggtaggaccatgggctcagtcccccaggggaccatgtgtaggagtcagcagctttgaatctgccgcctccctgttgagtggcctgtccgtctcccttcctccatctcccttctctctgcctctcattctccacgtgcaccctagaggcttgtgacactgccctgcccacctcccaaagggctgggaaggcccccactgctctgaggtgagaggacagcgtggtgacaacagcaacctctggttgccccaagctggtgcttaacctgattcattcatttcttcattcattcctgtgtccactcagcaaacatttactgagcaactgtcccatgccaggtgctgggaacagacccaagtgagacccattcctccctctagaggcacgtggtcagacatgtaaggtgtctaagacctgtggacagctgaccgctgaccaggtggagtcacagcctgcagaggctctgccgggcacaaagccagaggctcctggagccaggctggggagcgtggctcagccaccctggccaggtacctccctctgggggtcattgtgggcggagggattcctcccccaggggaccgaggctttgccaagccactgacctctttggccacgttttggggatgctctgaccagacctccttgatctccagggcgcgtgggttggaggaagtactacgtgacagctgggggagcctggcccttgtgtgggtactcacacatccactctaacccttctcaccaca

SEQ ID NO: 27 - DNA, 1200 bp, Homo sapiens
  misc_feature (1)..(1200): DMR1:18700701
aaccagctggcggcgttcaaccaccttctgccaggaggcttcccacccaccggcatgcccacgctgcccccctaccagctgccggactccacctaccccaccaccaccatctcccaaggtgagtgtcttggccccgtcctgccatctcagtggtgccccttcccttctttctttactttcacttacaaaggctcttcttttttttatgaccatttcttactttcatgtaagcaggctattgagagcaaaaagatgcaatcctgcccttgaaattcttggccctgacacagagcagccaggtgggatccccaaggcagcccctgtgcacctgtttagaactgagcttctcaaatggtaccagggatctcccaggaatgttactaaaatgctggtctgggtgaggcctgagattctgcacttctaaaaatccccctgggaatgcccaagctggtggagcatggaccaggctttgagcagcgaggatttggaggagaggacactgggctgacctgctttggagggaaaggaacggattctgcagggactttgggaccatgcatagtcacagtctttgagtttttaaagtgagagagtgacatgagtacaaatgtgcgtgtgagtgcgtgcatgagtgtgtgcgtgtgagtgcatgagtgtgtgcgtatgagtgagtgaatgagtgtgtgtgggtgtgtgcatgagtgtgtgcgtatgagtgagtgaatgagtgtgtgagtgtgtgcatgagtgtgtgcatgtgcacgtgtgtgtgtacttgttgggaagatgttggaatcatgttggaatcatttttttttttagattatgttggtctccaacctatgacaaaaaaaaaatttacaaaggggcttaaataatttgctgggacctcattttcttgcctctctctggaaagatccattttcagagatggaataaaggtcagggtctcctttgaggacctgagaaagctccctatgagggattccccccactctggggtgaacagccctaggccaggctgggctgagaggggtcagagccctcaggtcctcctgggaaggaggcctcacttgagcccagttctcccagtggcttgaagtataagattcccttctagcgctggaaagggataggcagagggaagaaggtgagtgggtgagagaggataggggatcagggggccttgggagaggaaag

SEQ ID NO: 28 - DNA, 100 bp, Homo sapiens
  misc_feature (1)..(100): DMR1:19986601
ttatttattgcttttgagggtatgtgaagccttcccatgtgaaacaaggtgaaagccatactaaaaagtatactcagaggtgttgcttctcactcatgcc

SEQ ID NO: 29 - DNA, 1000 bp, Homo sapiens
  misc_feature (1)..(1000): DMR1:20754601
taagacagtgcagtattagcatgaaggatacacctacagaacaaaagagaactcagaatccggaaataaacccttatatttatggtcaattgattttcataagatgctacggcaattcaatagggaagggacagtcttttcaataaaaggtgctggaataatcacacacccacatgcaaaaagataaattatacccttacctctcactataaacaaaacaatatagatcacagacctaaatgtaggagccaaaattataaaactcttaaaacgtacgagtaaattttcattacctttaattaggcaatgtttcttagataaccataaaactgcaaaagcaatttttaaaaatgataaataggacttcatcaaaaagtaaacgcttcaaaagatactactgagaaagtcacagaataggagaaaaaatctgatgagactttatgtctagagtaatgaattcttgttaacgaataaccaacccccttttaaaaatgggcaaaagatttgaataaacatttcactacagacaataaacaaatggccttaagcacaagagatgctcaacatcagtaattattagggaaatgccaatcaaaactacaacgagataccctatatccactagtatggctataataaaaaagagtaacaaacgttgaggaggatatggagaaactcgagccctggtcaggtgtggtggatcacacctgtaattccaacactttgggaagctgaggcaggcagactacttcactgaacccaggagttcaagagtagcctgggcaacacggcgaaaccccatttctacaaaaaatacaaaaattaatcaggcatggtggtggtgcacgcctataatcccagctattagggaggctaagatgggaggattgcttgagccagggaggtggaggttgcagtgagccaagatcacaccactgcactctagcctgggtgacagagtgagaccctatctcaaaacaaaacaaaacgacttgagccc

SEQ ID NO: 30 - DNA, 4400 bp, Homo sapiens
  misc_feature (1)..(4400): DMR1:21594401
ggtatgcacactctcttctttgagcccaccacgtgctggggctgcacccagaactttatgaggtgtcacctcatttaatcctcatgccagggtgccagcgagggcagggctgttagcacccccactgcacagatgaggaaactgaggcccagggagccaaaatcgtgtctgcatggtcatagcgcgaggaggcgaagcagctcagagctgattctgaagaagctcttaaccgtggtgctgaactgtgatgccggccctgtggaggtggggcaggaggagagagggcagaggactgcggcggagggatagggagcaggggtgcggctgatgggtgggcagttcacaggggactcactgggcccagagcagcctagagccaaaccgagttgggtggggctggggtttgggtgtgagtcaccacccatgggtggcctgaggcatcagagggtcacagaagggccctgtcgggaaaagtgtggcactccctggacaaacccctggggttccttcagcatcatcctgggaagggggcagggccagcaggggatagggggcactgccaagctgtcagggaggccaaggcacggctcatcccttcggggcccaatttggtgcctactcccaaatgtccccaaagccaccccgcagacctgctctcctccgtggtcctgccccagagggagagtcccctcattcacccaacacccagcctgtacccccgggagccacccgattccccccttagccccacagcccatcaggcgcttggtccccctgctcaggcccacctggtgtccttctcagcgtcctcctggccaccctcttaccccagcaacaacctcgttggtcccctcctccctccactggtgcagcctccaccagcaactaccgctcctgcctggggctccccctgcccttggcgcagagccctggcctctccgtcgggagttcaaggccacattgcctctggcctcatccctgcccatctccctgtcccctccattgtcaccttcccaccattcagagctggctgccaccttcctggttccaggggtgctctgcctccccgccctttactcgaggccccctcctgcagcgtccctcctccctaggccttctcaggaacggggagcaactccaggaactttccctgacgcctctctccccaggccctgcttgtgcacacctctcctgtccccggctgcccctcatcacccttcgtcctactgtcccagctgtgagatcctggtagagggacttggactcatccccgtctcctgggtccccatcgggtcccgtaagtggtcccttggcgccgccttgtggccatatcaggggattcactgaatatgagaacagggagaaggaagtaattaattgagcacctaatgtgtgccagacactgtgctgtatgtttgatacgcaccagctcattgaatcctcacaacaaacccttgggagaaacactaccactcctattttacaaaaggaaacactgaggctcacggaagctagtaagtttctcaacgccacccacccagctaacaagagacggtcccaggactcaaacctaggtctgcctgacagcacagccatgttcttcctgcagtggggaaggggcccaggatgcagggaaggacagcaccccggggaggaaaccacgggcggtgctcacagagctggtggcttggctttggaggtgtccccaggcccagcagctctgatggggacaggcttgctccctgccaccttgacatccctggacatctgtctggggtcaatctggccacggttcacacaaagccaggcccaactctgggtacaatagcgataaatagaatttattttatacaactgttaccgacatccacacggccacaggggcttccaaaatgggtattggggccaggaggctggcctttggcgtgacgcctaaaaagtgtgaccagacacacaagggctcccagcagctgtgccgggctgccccctccatggcggtcgggggaggcaaggcctggactctcggccagctgagactcttggcctggagggcccagcatgggatggcaggggttaagctgggtgctggctgaggagccaggtaggtccccatcccccatgagggggttacttgtctgtcatgtgtaggcagtggacagggcatcggcagacctgtggcagaactggagggtccaggaggcatactgggcacagccggctccctgcccctcagcccacctggggctccagggacctcaagaagcagggtagggtgataggaggtccctgggaagaaaatcctaccttctaaggcaggtgcatgtaatcacagtcttcagtgacctctgaaataatcttgtccatttgtagcagacatgcccagagagggagagtgacttgcccagagtcacacagcagaacccaaattggaaaccaggacccggctcccaacccagtgctcactcccccacatatcacatcctccttgtgctgcctccaggggctaagctctccacacggagctgtctcaaactctctctcccaccttgttccctctgagtccagagggatgctcaggggtgatggaggcccagggagggggcaagccagacccccagtcctgcttccactgagcaatccctgccccagcccagacccccaggctgggggtggggacgatgccagcagcttccctgatcccaggtctggacggctctgccctgcagagacagcccagatgggtgggccatggggagggtggggaggcagggggcagcccacgggctggtgttggtcttcagggcagaggtctcgtctgcctgggcttgacacggcaccttccccttgtgcttctgtggcctcatctgcagggcaaagggggatggagacaccatgaaacatggcatggtgggtggctggcaccagtgtgccccaactctgccaagtccctgcctcagagaaccccaccctgggaggggcccacccttggaattccaggctccaggtctttccatcccattgggaacccctgaaacttctccccacctggcaactgccaagtccctttcacactcccatcaaatcctccaacaatgcaagggcagaggtcacggggaagggccgtggcctgcccaagtcacccagcaactgaggaccagggggctcaaacccagatacatagctcccaccccagagaggtgacagaagaacagggaggaatcagctcagccctctacacacccccaccctctcccaccaaacacaagctgaggggctgggtctaacctgctcagtttcaccttcagagggggtggcccggctaacagccctgcagacagacagtggtggtgaggcaggtggcaagacgggagaagcaacggggcgggagacacaggtgcacaaagtcactggctgtgtccaggccgggcaagccccacccctcctggcctagcggggcctagggggacctcttggtcgagcctcagctcccagcctccccgccagctcatcccctcccgggtggggctccctcagcaccagccccaggaggctgcacgtaccagctggggcatgtgctgctcagatgcttccagctggatcttgatctcgggacacgcagggtcccccaacttgccggcgtctgggtggggtgatcgagaggggcctggggaggggggcaggagggagccacctcactggccgcggggaggcaccagggagacgggggcataggtgggcggtcggcaccagtgcgctccaaccccacccttaactttcttccttgccatcccccattatcctccgagacccttccggaagaaaccagccctccaatccacccagccaccctaggctggacaatgacctgcccgctgtcctccaagtcaggggcagtcacatcacatccactgcatggggcatgggaactggtgcccagccctgtccccctcctaccccaaggtagccctgctttgtggggaagctgccttgtcctggtacctggggagctgcccccactagtggtgctgacactgtcctccagccacgtgctatagatgaaggagtcccgcttgtggggtgttcctgaggatgacacgctctcctggggagggggtggaaagagggagggaggttagcctatgcccttggcactggctagggctccctcccagcccctctccctcactgcattccacaaccccccacccgtaccctctgcgaggaggacgggcctagccatgtctgccccagggagaccacaggagggcagagtcagggcaggcacagacccaggcacacgccacccactgccactcactcactcaacaaacattcactgatgttctccagggcttgccactgacataaatcaggcatgggccctgccctcaggagcctga

SEQ ID NO: 31 - DNA, 300 bp, Homo sapiens
  misc_feature (1)..(300): DMR1:21993901
tgcccccaccctggttacctggagaacctctgcagaacccacactagcctccctgatggcattctggctcctcttcaaaccgtttcccactcagcagccagagacatgcttcaagacataagctggatcatgttctcctgtggaaaacccttcaaaggcctcctgtggccttgtgtgcctgccctgcaggaatctccagccccacttctctgctcccatcccagagaagctccagtccttagatttattccttgctgtatcgtggctgggcaggggcaggctggatttcccaggcaccta

SEQ ID NO: 32 - DNA, 100 bp, Homo sapiens
  misc_feature (1)..(100): DMR1:23298701
tttttgtttttgttttttgagatgatgtctcactgtattgccaaggctggtctccagggatcctcctgcaatcttttccaaacaagtattaagtttacct

SEQ ID NO: 33 - DNA, 1800 bp, Homo sapiens
  misc_feature (1)..(1800): DMR1:23685101
gtggcagtgagccgagatcgcaccactgcactccagcctgggtgacagagcaagattccatctcaaaacaaaaaacaaaaaacaaaaaacaaaaaaaaaggggtaacatgatggcacatgtgcaggccagacatgccaactgcaggttccccacatgcctcaaatagggaagagatctatgcacatcactcactgtgtttttttaattattattttctgttccgtggtgtaaagatattgttgaaagtgtaaagaaaggcctgcagatacccctacgagtaatagtgataaggaaaagaggaagcaggccaggcaaggtggctcacgtctgcaatctcaacactttgggaggccgaggcgggtggatcacttgaggtcaggagttcaagaccagcctggccaacatggtgaaacccctgtctctaccaaaaatacaaaaattagctgggtgtagtggcaggcgcctgtaatcagctactcgggaggctgaggcaggagaatcgcttgaacccgggaggcagaggttgcagtgagcctatatggcaccactgcactccagcctgggcaacagagtgagactccatctcaaaaaaaaaaaaaaaaaaaagaaaaagaggaagcagttatgtttatagcacagaaagtcaagttgctggagaaatgggacagaagtgtaggtgtgaaatatcctacagaagagtatggtgttggcataaacaccgtagatgacctaaagaaacagaaggatggccaggcgtggtggctcatgcctgtaatcccagcactttgggaggccaaggtgggcggatcacctgaggtcaggagttcgagaccagcctggccaacatggcgaaaccccgtctctactaaaagtacaaaaaacttgccgggtgtggtggtgcatgcctgtagtcccagctacttgggaggctgaggcaggagaatcgcgtgaactcaggaggcggaggttgcagtgagccaagattgtgccactgtactccagcctgggcaacagagggagactccaactcaaaaaatgaaaaaaatgaaaaaaaaaaagagtacaaaaaaattagccgtgtgcggtggcaggcgcctgtaatcccagctactcaggaggctgaggcaagggaattgctgaggcaagagaattgaaacctgggaggcagaggttgcagtgagccgagatcgcgcctctgcactccagcctggacaacaagagcaagaatccatctcaaaaaaaaaaaaaaagaaagaaaaaaacagaaggataaactgatgaagttctatatgctgaaaatgatgaacagaagttaatgaaaaagagaaaaacaatgcataaagcaaaaaaaatgaagatcttcattgtgtattgaaagagtagatccatctggctgggcacgatggctcacacctgtagtcccagaactttgggaggctgaggtgggtggatcacttgaggtcaggtgttcaagaccagctggccaacatggtgaaaccccatctctactaaaactacaaaaattagctgggcgtggtggcaggtgcctgtaatcccagctacacaggaggctgaggcaggagaatttcttgaaccccggagatggaggttgcagtgacttgagatcatgccactgcactccagcctggatgacagagcaagactctgtctcaacaaaaaagaagagtagatccatcagcattgcactgatggatccatccaacatgtgccgcttaatggtatactgaaggtgaaacaagcaagatctatcacgatgaacagaaaatttaaggaaactg

SEQ ID NO: 34 - DNA, 300 bp, Homo sapiens
  misc_feature (1)..(300): DMR1:25234601
gcgccactgcactccagcctgggcaacagagcgagactctgtctcaaaaaaccaaaaaaaaaaagaaaagtaatccctaaaatgaaaagatacctaggtacaaaatttaaatggtaacataaaaataaaagataatttgaagtaaattaaatctgaataaatggtggataacctattttctggttggaagacttaatattataaaaacaatatcacaaaggagtatcgcaaatgagtttataaatgtcatgttattcccatcagaacctcagtgggtcattgtttttgttttttggaact

SEQ ID NO: 35 - DNA, 800 bp, Homo sapiens
  misc_feature (1)..(800): DMR1:26300401
ccagatcccgcccagcactctgcagggctcatccctgcctgcccatgtctccccttttctcagacctgctaaatccccactctgggaagccaccctgattagccccatcccactttaggtgcctccatgagctcagcattgccacagccctctgccaagctaagcagactgtctaggcgactttgggccttgccagagccctgcagaagcaggaagctgagctctaccctcagacttcatccctctctgaccctgaatcctgagcccactgatatcacacctggtaactatagccacagcctggcctggggctggggctggggctgggcctcggcctcctgagctaagggtggggcttgtgtggctttatgccaagccaggtccctgccacaatcagccaggagtggaagcagctgcctcagaccaaacaggcgagaggaagggccatgcctccctaggccttgccccgtctctggggccccctcctgcagccaggacccagacccttcaggcctctgctctcaccttgccgactcacaggggcacctatgccgccatagcaggaagggactgagatcttttcttctgagccacacccatcactcaacatgtccacctcatcttctgcagacagggatgcctaggtcaccgctctggggcggagacccagaggaaactcaggccctgggccctcgccagtgtgacgcggcctatgcactgtgccccagggagtttgaggagagagaattcacaaggctggggagcaaggatccaaccagaatggggctgttttggagttc

SEQ ID NO: 36 - DNA, 1400 bp, Homo sapiens
  misc_feature (1)..(1400): DMR1:27069101
cactttgggaggctgaggagggaggctcacttgagcctggcagtttgagaccaggctgggcaacatagcaagatcccatctctacaaaagaatttttttttttttttaagacagagtctggctgtcgcccaggctggagtgcagtggcgccatctcagctcactgcaatctccacctcccaggttcaagtgattctcctgcctcagcctcccaagtagctatgattacagatgcacgccaccacatgcttggctactttttttcgttgttgttcatttgttttttttgagacggagtcttgctctgtcgtccaggctggagtgcagtggcgtgatctcggctcactacaaccttcacctcctgggttcaagcagttctctgcctcagcctcccaagtagctgggattatagacacccgccaccacgcccagctaatttttgtatttttagtagtgatgaggtttcaccatcttggccaggctggtcttgatctcctgacctcgtgatccacccacctcggtctcccaaagtgctgggattacaggcatgaaccactgcgcccagcctttttttgtatttttagtagagacggggtttcaccatgttggccaggctggtctcgaactcctgacctcaagtgatctgtctgctttggcctcccagagtgctgggattacaggagtaagccactatgtccagcccctacacaaattttttaattagctaggcatggtggcgcacacctctctacagtcccagctactcgggaggctgaggcaggaggatcacttgagcccaggagtttggggttgaagtgagtgccactgcattccagcctgggtgacagaagtagaccctgtctctaaaaaaaataaataaaataaaatgtctattctggtataccactcagctctgctgaattagactctctagagctgggacctgggcagttctcctttaaccacgttctccatgcagaggacttcaaggcacactcaagttggagaccacagggcttcattctgtgtcctcatgtaactcttaagaaaatcaggagtccattccgaacccttgggtgaactgaaggcaggtggagatcaggggacttgggggaggcagtgagggtggagggcaggggtcaagcacccagggcctcaggtcatctgtgtccatcccctgaggcaggctctgggcagccctccctgaggaggtagccctgtccccagggccctggatggtgaggatgacccagccttcgtaaccctgccctcacacacagcgctcactccaaagcttgctggaatcatctgaggctaccagtgtctacagcacatcgagctacccttatggagcctgggaccagccccaggaagccaatctcagctcaggagccaggattt

SEQ ID NO: 37 - DNA, 3000 bp, Homo sapiens
  misc_feature (1)..(3000): DMR1:28583001
gggaggcggagcttgcagagagccgagatcgcgtcactgcactctagcctgggcaacagaacgagactctgtctcaaaaaaataaaataaaataaaaagtaagtactactttagcaggtcgtgggggcgcatgcctgtggtcctggactcctctctttctctaacatcacatgtccaagccatcagcaactcctgtgtgctctacctttaaaatgtatcaataatctgactgtttcttaccccttccactgatgttaccctaatcgttgacccagatgatagcaatagtctcttatctcccagatcctgctgttgctcccgacagtctggtctccacacgccagccagcctgctaaaagttttttaatttttatgaagtctaagagtcaatttttttttttgtagtttatgcttttttttttttttcttgagacggagctgctctgtcgcccaggctggagtgcagtggcgccatctcagctcactgcaagctcccgctcccgggttcacgccattctcctgcctcagcctcccaagtagctgggattacaggcgcccgccaccacgcccggctaattttttgtatttttagtagagacagggtttccccatgttgggcaggatggtctcgatttcctgacctcgtgatccacccgcctcggcctcccaaagtgctgggattacaggcacgagccaccgcgcccggccgtttgtttacgctttaaaagcttaataattatgctgggcgcggtggctcccacctgtaattccagcactttgggagtccgagggggcagataacctgaggtcaggatttcaagtccagcctagccaacatggtgaaaacccgtttctactaaaaatacaaaaattagctgggcgtggtggcaggcgcctgtaatcccagctacttgggaggctgaggcaggagaatcgtttgaacctgggaagcggaggttgaagtgagctaagatggagccattacactccagcctgggcgacaagagcgagactccgtctcaaaaaaaaaagaaaaaaagtaaaattattaaacttttttttttttttttggagatgaagtctcgctttttcgcccaggcttgtgcagtttattctgtgtcaattatgcctcaataaagctgtcaaaaaaccattaagaaaaaatgtatatctcccaggcgcagtagctcccaccaattcgggaggccaaggcaggtggattacctgacatcaggaactagagaccagcctggccaacatgacaaaaccccatctctactaaaaatacaaaaaaaaaaaattacccaggcatggtgacactcatctacagtcccagctacttgggaggctaaggcataagaatcgctcgaacctgggaggcagaggttgcagtgagccaagatcatgccactgcactccagcctgggtgatacagcgagactccctctcaaaaaatatatctatatatatctatctatatctatgtgtgtgtatatatagatagatagatatacatattatattaaggcagatgcagtggatcacctgtagtccagctacttgggaagctgaaacaggaggatcacttctgtccaggagctggaggtcagcctgggcaacaaagtgagaccctgcctttaaaaataaataaggccaggcacagtaactcatgcctgtaatcccagcactttgggaggccaaggcgggtgggtcacgagatcaggagttcaagaccagcctggccaagatggtgaaaccccgtctctactaaaaatataaaaaattaaccagacatggtggcgggcgcctataatcccagctactcgggaggctgaggcagaggttgcagtgaaccgagatcgtgccactgcattccagtctgggcaacagatcaatattccatctcaaaagtaataataaaataaaagtaaataaataagtaacatgtattttttaaaactttttttttttgagacggagtttccctcttgttgccaggctggagtgcaatggcacgatctcggctcactgcaacctgtacctcccaggttcaagtgattctcctgcctcagcctcctgagtagctgggattacagcacctgccccaggcccggctaattttttgtatttttagtagagacggggcttctccatgttggtcaggctggtcttgaactcccgaccccaggtgacctacctgcttggcctcccaaagtgctgggattacaggcatgagccaggcctaaaaaacatttatatcatgttattcacttgctcagaaatctcccatgacttcccaacacacttagaataaaaacggcaatctccataatggtctccaaggtcatacgtgatcaggctcctcctccttcctgccctcatcacgcaccacttgctccctcactcagtcagctccatcttcctggactctttgctcttcttgaagcaccccagggcctttgctcttgcctggaactcgccccacctgaatatcacagacaatcacacttcttaagcctcacttcccctgggtttctgtccacacgtcacctcctcaggccatcctattttgatacagcacccctccatcctccaaccttcaagtcactgcctccttgattgttatttacagcacttagtgcttcctgacatggtattatatatgtattttgttttctgttttccctattagaatgtgagcatcccaagagagctggaattttgtcttttttcccccctactgctgtataaatgcctggtacataaaagatggccagcattcttgaaataatcaccaagtgggccgggcgcggtggctcacacctgtaatcccagcactttgggaggccaaggcgggcagaacacgaggtcaggagagcgagactatcctggctaacacagtgaaaccctgtctctactaaaaaacaaacaaacaaaaaaaaaaaacaggctgggcgcagtggctcaggcctgtaatcccagcactttgggaggccaagg

SEQ ID NO: 38 - DNA, 200 bp, Homo sapiens
  misc_feature (1)..(200): DMR1:28617101
caacagcgaaactccgtctcaaaaaaaaaagaatattataaaattaatgggtcaaagagtatctttttaagtatattacttagaaatatagaagaatgttacagaaacagctaaaattgttgaaagtgattgcctgtgagcaacagactatgccgtttttaacaggcaaaagtagcagcagttattgggtataaagcaaa

SEQ ID NO: 39 - DNA, 1700 bp, Homo sapiens
  misc_feature (1)..(1700): DMR1:30868501
tagaagaaatatttgtaggacatgtagagctttccctcgaaggagggaattttgtgactgttacacccatacctgggggctgtcccattgcaaggggcagaacaatctcgtgtgcccccagggcgtacgagcactggagatgggcaacactggaaagacagatttcagctgaaattagtaagtacttccaaataggcagggtggcctactggccatcgggacacacccagctggctgggacaggacttatgccaagtgggggctggaaaagggatttctacaccaaggagggccccaaggctggcccagctctatgaccctgtgatgtcaggagtcggcctgtgatgattctgggtcacattctcccatcccaaggttctattctgttccaacgccatcatcagagcccctgtgagctacgtgttgactgtggcaggtgccgtgctgagcattctacctcatgcagtcctcacaacattccacgtaggggatattctgaccccatttgacagatggggaaactgagactcacagaggtcaagtggcttgtccagagtcagcgctaggaaatgtcaacacctggacttgaaaacagacttcagacttaaaagccatctcgtctcgtctcggctgctctgattctggtatcctgtggtaccaagattttctctgtggcctaaagccagagttcccctgggggtgaaccacaggcccctctcaccactgcctggcccctcccaaccacagcccccatcccagcctcaccgcagcggctccgtggtttcctggacactctcaaccaacagcagcttttaccataatggttcccacaaggggctgttggtcaattttccctgcttggttctcaatttctttgatgggggaagatggctggggcccagggtgcggccatgggctgccctccccaaatgaccatatttatctcatactctggacacggcacatcatttcagcttaattttatttcctcttataaatgggcacagcacaggaagtgttaaaaaaacaaacaaacaaaaaaaaaaaaaaaaaaaaaaaaacaaaaacaaaaccagttccttcacaaggctggaacaggagagtacccgcagtggggcaggcgccttggtctcttttttccactgtctttttcttttgtttttcttatttaaggttttggccatgaactcaggacaggtatggttaataaacaggttacaggggagagaaggggcagggaaggcctgggggagggaatggcagacccccacccaccccaggcaggttctgtacaggagaaaggactcacaggagggagggacactgtcttcagggggctctctggagccacgctgcctacgaaaaatatttacatgcatttgccacgctgaggccagggtcactgtggtgccaggcaggcacctgggggatgctggggccatcggctctcagatggcaactcccagggcccagtctcgatgcctctgtaaatctgtacagtttgcgggcttctatttacaggcaagaggcctggggaggcaagtccagggttgtagttgttgggagaagaaatccagagaacacaggaggcagccactcctaccccatgaggcagagggtctgctccctgtgtccaggggcccccaccaggaggcctgacaggcggctttgccaaccccaggggggtttggcccacacac

SEQ ID NO: 40 - DNA, 1200 bp, Homo sapiens
  misc_feature (1)..(1200): DMR1:31391601
tcgtaccatgacacccagatcatttaaacagtttttttgtttgtttgttttgttttgttttgttttttagacaaggtcttgctatgttgcccaggctgtcctcaaactcctaaccccaagcaaacctctcacatgggtctccaaagcactagcattatggatgggaggcaccatgctggtccatatacaaacacttgatagtaaattccatacagccaattgattctggcagaatggtttcattaatttttgccaaactcatatctgtagccatcctatggttgcaattcaaccaaaatttgaaattgaattgcatagataccaatctgctaattattttcctaataaatttattgtcattaaatgtgctacaggatctactgttaaaatatttttctttttttttttgagacggagtctcgctctgtcacccaggcggcaatggcttgatctcggctcactgcaacctccacctcccgggttcaagtgattctcatgcctcagcctcccgagtagctgggattataggcgtgcatcaccacccccagctaattttttttgtatttttagtagagacagggtttcaccatcttggctaggctgctctcgaactcctgacctcaagtgatctacccgccttgtcctcccaaaatgctgggattacaggcgtgagccactgcacccaacctactgttataatatttttcacccttctacagatatattcattaaacagaaacttctttcagctttagcaccagacttgacaaactattaagtttaatttgcacttttaacattttgtctatcactttctttagtcttgaaagtcaacaaaacaacaaatcagttccttatttgtacctatcaggactcagacaacaataccccaaaatgaaggcctcagaagcaaaagtttttctttgaccttctcctgtcctcttgtctttctgttccattctcccctgaggctagccatagaaactagaatctctcttccccaaggctagcatcccttttccccaagacatttcacggaaaacaaaccccttttcccccgaagccagccgtaaaacctaaaagcattactctggattttcctccacctttctgtgtgaaaagaagttatcttacctaccttgactctaggtcataagatcctcattctagagtgggtcctgccccatattcagaaggaag

SEQ ID NO: 41 - DNA, 200 bp, Homo sapiens
  misc_feature (1)..(200): DMR1:31652501
agttttgtttctttattatttaaaaaatattaacagcaattaaaaacaacaacaacaacaaaaaaaacattcacaacctgtcacagagtcctataagctttggccatttattcccaacggagtctttcatccaaaggcaggtggggaatttcagccaaaaggccccttcatggttttcatgggtgggtactgctgctcca

SEQ ID NO: 42 - DNA, 800 bp, Homo sapiens
  misc_feature (1)..(800): DMR1:33706301
gagaaattctcaaatttatcttttaataaactgatttcatttttctgtggtttaccatcttccgttcattgcctccattccattttttaattgggtgatcatgtttttcatctctattcaatctctcctcatctcagattgctctgttttcattattgcctatttttgtgtcataaatataatattctctcaaattctcttaagaatacaaattaggagcttttaaagtatgtctctgttcttcgttgcctacagaggggcaattagctctgattccgaagacatgtcttcttcttctgatctactgaatatttacacatatccagttaattttcttgttggcacaccacaacagagggaaaatggaaattgggaatggaaacactcagcagtctctaagggagagcagaggagctaaactcaaagaggccgtagcaggagcatttcctaccctggtgctaaagagtgtgtgtgtgtgtgcatgtacgtgtgtgtgtgtgcgcgtgcatgtgtttgtgcgtgcgtgtgtatgtgtgtgtgcgtgtgtgcattgtgtgcgtgtgcatgtgtgtgcatgtgtttgtgtatgcgtgtgtgtgtgcacgtatgtgtgtgcactacctgggctcctgcatcctctgttagtcctccctgaactctgacctaggttttatgccccatgtccctcctcctttcttaccctgaccacctcagaaagactctctctgcttatctactgagctgcccacctgaccctgaagccagaaccctgacggtgccgttgagtgtgcacacctgct

SEQ ID NO: 43 - DNA, 800 bp, Homo sapiens
  misc_feature (1)..(800): DMR1:33801701
gttaggaaggcttctcagaagaggggttgtttggactgtctctcaaagggggataggaatttgcctggaggagaagggaaggcacactgggaccagatgtgcccagacaggtcttaaagggccaggtgtgtctgtgaacctgagttcagtgtggctgaagctggggctgcccaaagggagagatggggcagagagaccactgtgtgctttgctggaagaaggaattgcattgttgacagaagtttagctggtcagaaccaccagggtcgtctttaaaaataagttctggtacctaccctagacccactgaatcagatctttggggaaaagagcttgggaatctgtggttttaaagtgtctccaaggcatttctgatgaaatttgggaaaaattattgtaggcagatgttaatgtcagattaatattataaggactgagataacccaaatgcccaaggtgaggtcaacattgcccgaggacatcccagtcgaagggagggcatggaggctgcatgtggagtaggcctgcatcacttgctctgagccttctttcctctgttccttgaatctatgaagtttccaggaggatgcactggggtgtttttatttcccttactcctagtttattgagtacagacatatccttaacttgcctctccaataagactgtaagttcttcctgttcccacagtgcagaggcgcacagcccatagatgctcagttaatgctggtgtcttgatgtaggttcttagccattcccacaccacagcatccctgcttctctctttgggccttctcatt

SEQ ID NO: 44 - DNA, 1700 bp, Homo sapiens
  misc_feature (1)..(1700): DMR1:34962301
agaacatctttcactggctttgttcataggatttgtgtgtgtgtgtgtgtttgtgcgtatgagtgcatacactatagtgactgatactattttattttatttcctaattatatgcttcaataccattgtttttgcacattgatcttatatccagtggccttggtaaattcatttttaaattctaatagtcaattctttggatttgtacacaattatctacaagtattgatagttttatttcttcctttcccatctttttaatatttatttctttttctttctttattgcaccaagcaacgaaactaaacctcataggcacataatagtcaaacagccgaaatccaaagacagtaggaagtcttaaaatcatacagaagaaaagacacatttcagtcaaaggagtaacaagactgataaatatttttccaaaggaaatatgcaagccagaagacaatataatgacatctttaaagtgttgaggggggaaaaaactggaaacctagaaaaaattcttcaaaaataaagttaaaaaggtaaggtgagatggttcatgcttgtaatcccaacactctgggaggctgaggcaggaggactgcttgaggccaggagttcaagatcaatctgggaaacataacgagacctcatctctatagaaaatttaaaaattagccagggggataacacatacctgtagtcccagctgctcaggaggctgaggcagaaggattgctcctgcccaggagtttgggtgggattgggcaatgatcacaccactgcactccagcctgggtaacacagtaagtgagactctgtctctaaataaataaataattaaggtgaaataagaaatttttcagagctaggttgggtgctgtggctcacgcctgtaatcccagcactttgggaggctaaggcaggcagatcacaaggtcaggaattcgagaccagcctggccaatatggtgaaaccctgtctctactaaaaatacaaaaattagctgggcgtggtggtgcacacctgtagtcccagctacttgggaggttgaggcagaagaattgcttgaacctgggaggcggaggttgtagtgagctgagatcgtgccactgcactccagcctggctgacagagcaagactctatctcaaaaacaaaaaatttcagagctaagaatagtcttcattaatagatctgtaacacaataaaaactaaggtagaccataataagtcaatattgtaatctctagggtaaacattaaaggaattataaaagaatatataacaaaagagttaatagaagtgaaaaaaattaagaatatctgattaattcaaaagaaggcaagaaaaatacataaaacaacaacaaaaaggtgagacgaagagaaaacaaatagcaagatggtagatttaaaccaaagcatattagtaattacactaagtgtaaatgaactgaacaatcaaattaagagataatgttgatctaattagataaaaaacaaaaaccaactatttggtttttatgagattcactttacataaaatgaggcagaaagattgaaaataaaccatggaaaggatctacattataaagtatattgcttccagcaagggctttcatactgctttttcataacatggcagaaaatcagaatgggaagcgaacacatgcacagtagaccaaacatgagaggcagcctcactct

SEQ ID NO: 45 - DNA, 500 bp, Homo sapiens
  misc_feature (1)..(500): DMR1:46940001
tacttaagtgtgttcaattcatagcaccttggtgagtccctctccatgcagccgtttacctgctctgttcctacccgcccccctccccttgtagggatagcagtgcacaggggatgggctgtgtccctcctcagccctcttgctgctcctttctcttcttcctctgttcctctacacctggtgtgtccaatcttttggctttcctaggccacattggaagaaaaataattgtcttgagccatgcataaaatacactaacactaatgatagctgatgaactcaaaaaaattgcaaaataatctcataacgttttaagaaagtttacgaatttgtgttgggccacattcaaagccatcctgagctacatgcagccccatggggcgtgggttggacaagcttgctctacacacctgagctgatcatcaagctgtgccaggattttgctgattgccggggcacaggaaggggatgacatgctcaccgccagggagctcacagtc

SEQ ID NO: 46 - DNA, 1200 bp, Homo sapiens
  misc_feature (1)..(1200): DMR1:47050901
aagagcttctgcacagcaaaacaaactaccatcacactgaatgggcagcctacagaatgggagaaaatttttgcaacctactcatctgacaaaggcctaatatccagaatctacaatgaactcaaacaaatgtacaagaaaaaaacaaccccatcaaaaagtgggtgaaggatatgaacagacacttctcaaaagaagacatttacgcagccaaaagacacatgaaaaaatgcctatcgtcactggccatcagagaaatgcaaatcaaaaccacaatgagataccatctcacaccagttagaatggcaatcattaaaaagtcaggaaacaacaggtgctggagaggatgtggagaaataggaagacttttacactgttggtggcaggagaatcacttgaacccgggagggggaggttgcagtgagccgaggtggcgccactgcactccagcctgggcgacagagcgagactccatctcaaaaaaaaaaaaaaggacaccaaacttctcaatcttaatgttgtcatctatgtggtatcttccataatctctctcagacagagtcatcttttgctgatatgatcttacagtattttttgtttataccattataatctcattaattgcagcaacacaaatgacaaaagacaactgatttctccccttggatgacctaatttgctttcactcttccatcatcacttataacatgatgattctcaaattcatctacctaaaatctatatataaaaaaatccctcccttgaattccagatccttggagacaaacacccacgtctaaaaccaaatttgtttaacactggaccagtcgtcctgtgtgactttccattttgtcactattttgtcagctggtataccaatatccacccagttaaacaatatttccttgtttttttctggtacaaacccaaataaattacaaacatcaataaaagtaaaattctaaaataactcactttctctatatatctccttcttgctggaaaaatgggttaggttagttctttaaaagcatgcatgataaattgtactgaatacaatattcaggtctggacatactaggtataattttctgtgtctctggggtcttacctatttggggtcaaaataaacaagtttattaagcttattaatattcaatttcattatcttctttaacaattatgttccctggtagtttc

SEQ ID NO: 47 - DNA, 800 bp, Homo sapiens
  misc_feature (1)..(800): DMR1:47322801
acagggaaggcacaattttataggctgtgtaataagaggtaattacccaaagcaaatatgaataattgttagatgacaggccagtttaaatagactgaagagataccatgctagtctttgatctctgtttatatatatttatgtgtcatttctttttttttctcttttttttttttttttttgagatggagtcttgctctgtcacccaggctggaatgcaatggcgccacctcggctcactgcaacgttcgcctcccgggttcaagcaattctcctgcctcagcctcctgagtaactggaattacaggcacccaccaccatgcccagttaatttttgtattttcagtagagacggggtttcaccatgttggtcaggctggtctcaaactcctgacctcaggtgacccacccacctcggcctcccgaagtgctgggattacaggcgtgagccacaccgcacctggccattcatgtgtcatttcaagacactgtggaattgctattacttttggcccttacagagaaaagctactggttttattttttaaatttccaagttctttagtttgcttcacagataaccatttccagtttgtcatttttttaaaagtatgaatttgttgcataaacaatgttataacaagaaaaaaattgtaaaaggaaaaattcatccagaattctatattctaactgctgtagactgaatatttgtgttccccacaaaattcatatgttgaagtcctaacctctaatatgatagtaagtagctggagcctttgggaggtgattaggtcatgatg

SEQ ID NO: 48 - DNA, 1500 bp, Homo sapiens
  misc_feature (1)..(1500): DMR1:50265301
ctgcaatccattctctatgcctaaccacataaattgagctaacaatcaggactcttcctcagaggagatataacaacctgacctggaaggccctctggataccagcactgccaacccctctgccggtccagcctcatctctccaccctgatggctccagccattccctctcttatctccaaacctcccacctgctatttcctccacctggaaaacactttctcctcctcatccccctttcccagatcacttcttttcagctttcaagtctaaggtgccagtgtcaccttctctagaaagcctttcctgaccctcctcaggctgaattaggcctcctcctgccttcactcggtctctcccttagacaatggacatttgtcagataagagggaaggtgctcgggtagtcagagataacattgtggggagggagagagtctccagtagggcttgctcttttctggtttattttactcttggggcagctctaagaaggtctcccccaccagcacatctgtggggacttggccagagtgggtgaagctgctggagcaacagcagcttcctcctgaccttctgcctctgcatgttcccctgactcactgatggaaaacatccacccttctgggcctcttccttatttcatcactttaataaattaagaacagattgaaaagcagaaaacattgtctcccgggccccagcacccacattccaactcaattacatgatttgtttttgggtctggccagacgcagaagcaactgagatgcagcagaaagagtgagacaaagaggtgagatcaagagaccagagaaagtaattcctatcccagctcagtcactgaccagtggcctcaggcaaatccattcacctccctgagcctccccatctctccttatctggaaagtgagtggtaacaatgacacatgcttcacagggtgatgggagcatgtcaaatgaagtagaggatataaaactgctatgtaaattgtcaagtcctagaccacgtgagaaatagattatttctattctaccaattctcttggtcagagatgacatggcaccaggccctccctcccttctaatagcttagtcttggaactttgaacaaaactcttgtattccttgaggtcagatcttcattctctcactccttgtagcaactaacactggaaagagggactctgtggatcttcagttatatatgcaacagttgtcgttgttgttggtggtggtgttgctgctgctgctgctgctgctgctgttttcagttgacagccagagtgctctattggaaaacaaaaaaaaagagtataggtctggatgcgagctgtgagacatagttttgttcctggctgcaccacttgatttcttgccaattgcatcatttctgtggcttgcagtttcagtttctccatgtataaaatgagggcagaggggcaatgagttaatcatccttatcttgataacctcatagggtggcaattaagatcgaatta

SEQ ID NO: 49 - DNA, 5200 bp, Homo sapiens
  misc_feature (1)..(5200): DMR1:50949001
aacatccaaaccatgtcataaaacgttttgctaagtcacagaaatggaacagtacttaagatcacaaaatcaaagaatcacaggaatggacggaatttcaaaagtcatctagctcagcaattctcaagtgtagtccttggatcagaagcatcagcataaccaggaaacctggtaaaacatgcaaatttgcagaccctacaccagacccactgagtcagaaactctgaggtgggggtccagcaacctgtggtttaacaagccctccaaattattctgatgcaaactaaagtttgagaaccattagtttaaatcaggattctccaatactgtcaacattttgagccagaaaattctttactatcgggcgatgcctgtgcattatagaatgtgtagcagcatcgtttgcttctgtgcactaaatgctagtagcagcccgaagctgtgacaaccaaagtgtttccagacattgcccaatgtcccctgggggacagaaatcacccttggttgaaaaccactgatctagatcaaggatcagcaaactctcctaaaaggagcagggtaaatattttaggctttgcaggacatgcagtcaactactcaactctgctattaaggacaaaaataaccagagacaacatgtaaacatacgtgcacgactatattccagtaagactttatttacaaaaaaaggtggtggtttggccctcaggctgtaatattctgacccctaatctaggtcagttatctgaattacaattgattgtcctcagtcccacggctgccaagtgattctctggattctatttggcctgacctagtccagtcttctgcttacaggtacatatagctctacacagattaccattctttttttttcgagacagggtctctctgtcacccacccaggctggtgtgcagcggtgcaatcatatcctcttacctcagcctcctgagtagctaggactacaagcacatgctatcacacccagctaatttaaaaaaaaaaaatttatttttttttgtagagacacgatcttgttatgttgcccaagctgatctcaaactcctggcctcaagtgatcccgtgcctcttcttctcaaagtgctgggaatacaggtgggagccaccacacctgtcccagatcaccattttatagactgaataaatgaagcctacaaaaggcaaatgactttctcaaagaaccacagctaagaaaacctaaaacaaaacaaaaagacaacagctacagccagtctacctaagtacaatgttctaacaactgccccttatggaggtgtaaccacatattgccacctagcaggcattcaaacactccagccctctgaatttactaaaacctagaaaagtactgatttcatggggggagcggagaaataactttaccttaaatgcccagacagtaaatattttaggcttgtaaggccattaaaatctctgtctcaactactcatctctgtcactctagcaagaaaaccaccacagataaaggtaaatgaacgggtatggctgtgttgcaataaatccttatttataaaaacaggcagctggcctgcaagatatagtttgctgacccctgatctacaaggtccataaaaccagtcaggcaaacaacaggcatcaactctatcatactcagctaatctagagacactatgtgcattccaaggcttctgaacacctgtgaacacagaagcatggcactaaatggtaaacaaggaatagacaaagtgccacctttctcttccttccttccttcctgaagatctactacatgacagccaagcactgctaatttattttatacgtaagtttcctcatttgtagaaatttctaaagagcagtttttgttttcttcaagaactccaagctgacaaattagctggaaaatgaacactcttatatgtacctggataaaatatttgtttcagccaggcaaagtgactcatgcctgaaatcccagcactttgggaggccgaggcgggcagaccacttgaggtcaggagttcgagaccagactggccaacatggtgaaaccccatctccactaaaaatatttaaaaagttagctggatgtggtggcacacgcctgtaatcccagctactcaggaggctaaggcaggagaactgcctgaaccggggagatggaggttgcactgagccaagatcacgccactgcactccagcctgggtggccgaatgagaccctgtctcaaacgaacaaacaaacaaaatttgtttcaaaccaacctatgaccttgtacaagtcatttctcttttctgggtctcaatttccacaaagggaaaactggtaagcttcaaatagatgatctctgaagttcccaacagagaacaagtacataccttaaaactgtcaaaaataacagctaaaatttattgaacactttctatgtcagacaccttttctaatcactttacatgtgctatcttatttttcatatggggaaactgaggcagaggggtgtgaggtgattggtcaaagatcaccagaagagtcagtggtagggctgtgatttaaatacaagtggtctgaatccaaagtccatgtccttaaccaccaaccattaaatttaattctacatgcaaaaaccttattttcccaatgacctacaacccaaatactaaaacaacatgatttgtctctttaataaataaagaggacagaggagaaaggaaagaaaggacaggtaacaagattacttgctcccaggaatgaaaaaatatgatgttccatggatacttagtttggtccctaatccgcaacatcacaaaagatatctgtttggatcaataccatttctgctcacacagtctggtattgtcttttgtagacaatatttctttgtgtcaaactaaaaaagaaagaagtgggattcacaactccatttagaaagagaaaatattataaacggacagaaactacttatgtgtcactcaacgtaagtgacttaccagtatgcaacagaaaagtccatatttcaaagaggagctcatatgcaaagtttcaaagacccatggtgataacccaatataagaaaatttggccctctccctctcccctttctacggtctccatctccctcatctcccgtttccacagtctccctctgatgcccagccgaggctggactggactgccgccatctcggctcactgcaacctccctgcctgattctcctgcctcagcctgccgagtgcctgggattgcaggcgcgcgccgccacgcctgactggttttcgtatctttttggtggagacgggttttcgccgtgttggccgggctggtttccagctcctgaccgcgagtgatctgccagcctcggcctcccgaggtgtcaagattgcagacggagtctcgctcactcagtgctcaatgttgcccaggctggagtgcagtggcgtgatctcggctcgctacaacctccacctcccagccgcctgccttggcctcccaaagtgccgagattgcagcctctgcctggccgccactccatctgggaagtgaggagcgtctctgcctggccacccatcgtctgggatgtgaggagcccctctgcccagccgcccagtctgggaagtgaggagcgcctcttcccggccgccatcccgtctaggaagtgaggagcatctctgcccggccgcccatcgtctgagatgtggggagcgcctctgccccgccaccccgtctgggaactgaggagcgtctctgcccgaccgccaccccgtctgggaggtgaggagcatctctgcccggccgccccgtctgggaagcgaggagcccctccgcccggcagccgccccgtctgggaagtgaggagcccctctgcccggccgccaccccgtctgggaggtatacccaacagctcattgagaacgggccatgatgacgatggcggttttgtcgaatagaaaagggggaaatgtggggaaaagaaagagagatgggattgttgctgtgtctgtgtagaaagaagtagacataggagactccattttgttctgtactaagaaaaattcttctgccttgggaggctgttaatctataaccttacccccaatcccgtgctctctgaaacatgtgctgtgtccactcagggttaaatggattaagggcggtgcaagatgtgctttgttaaacagatgcttgaaggcagcatgctccttaagagtcatcaccactccctaatctcaagtacccagggacacaaacactgcggaaggccccagggtcctctgcctaggaaaaccagagacccttgttcacatgtttatctgctgaccttccctccactattgtcctatgaccctgccaaatccccctctccgagaaacacccaagaataatcaataaatactataaaaataaataaataaataaataaatttttaaaaaaagaaaaaaaagaaaatttggccagacgcagtggctcacagcgcctgtaatcccagcactttgggaagccacagtgggtggatcaactgaggtcaggagtttgggaccagcctggccaagatggcgaaaccccatttctactaaaagtacaaaaattagccaggcgtagttggttctcgcctgtaatcccagctacttgggaggctgagggaggagaatcgcttgaacccaggaggcagaggttgcagtgagccaagatcacgccactgcactacagcctgggcaacaaaagcgaaactctgtctcaaacaaaaaaaaagaaagaaaagaaaattcatcaagcaatttaggcagcaaaaagtattactagctgaaaagactaggggtgaaaaacaaaagcacatttgtgtgttacagaaaacataactgaaaataacatcaaatcaatgccaaattagagaagaaataaagggactcttaatctatgaccaatggaactaaattcagaaagaatacattttttttttttatttgagacggagtctccctctgtcgcccaggctggagtgcagtggcgcgatctcggctcactgcaagctctgcctcccgggtttatgccattctcctgcctcagcctcccgagtagctgggactacaggtgcccgccaccatgcccagctaattttttgttttttagtagagacagagtttcaccatgttagccaggatggtctcaatctcctgacctcgtgatccacctgcctcag

SEQ ID NO: 50 - DNA, 2500 bp, Homo sapiens
  misc_feature (1)..(2500): DMR1:51732901
ttacccacggcatccactgtgaactgtttctcattgagaacatgccatagcctctcacagttatttgtcttttcacagcctttccttcttgcttagattaccccactgtatctcaagtggtaagcctccagttcttccttagcatacagctcctgtgttaaccttttctatgatgccttccttcaggcagggtgagtttgttactcttgtgtgtgctactacagcactttgctcatatctccatatcacagccttcactaagttgtattgtaaatttttaaacatatgtgattcttgcattaaaccctgatttcctagagatctggggttctcactcatctttgtatccccggggcctttgtccctagtttagtgcatggcacatagtaggtgttcagtaagtgcttaagtgatcaaaatatgtgacgataatagcttaagtgtgtaaacctttgactcagttttactggagttaggtttttccctgtgagttaaaaatgcttcctaggtcaccaagctccctggttgctaccagacatgagaaacgggggattggaaaaatgtttagaaacagtgctaaaaatggtgagcagggccgggtgcggtggctcacgctgtaatcctagcactttgggaggcccaggctggcagatcacctgaggtcaggagttggagagcagcctggccaacatggtaaaacctcatctctaataaacgtacaaaaattagctgggtgtggtggtgggcatctgtaagcccagccacttggggggctgaggcaggagaattgcttgaacctgggaggaggaggttgcagtgagccgaggtcacaccattgcaccccagcctgggtgacagagcgagactctgtctcaaaaacaaacaaaaaaaaaagtgggcagacttccaggactccccaccttcccctacccaatctataggacctctaacatgattaaaataatactaatagtagtacgagtactaattggttctggagtattgttagtatcataggaaaaagcatgtaggctagctagaatgtcagggaaactgctttaaaggtgaaatttgagctcattccagatgattaggtaatgcttaattatatttgctattaatattatctctattgtccttaaagacatcctttgaagatgatgatagtacctggccataatagacattaaataaatatatgtgtcatgaatgaatggtttggttgctctgtatgtgtgtgtatacatgtgcgcacgcaggagagagagaagagaactgtagttcctgccatattggagttcatttatttctggagacacctttaggaacttggcttctttgctgtattgactgaacaactcgtttttcccaaaatgtgccacttcaattaagttattctgcttactccgttgtttctttgcattctctgcattccagagcatgttttaaaatctggttgtgttagtctttctcactcagtttcaaggttacactaaatgacagagtttgcttgtgttttgacatattttgtcataccgtggaggacttggctgcagttggaacctgtaaattcttactgtgtttatttaaatgaaattaatttttattaaggtgaatacacgggccccaggttttccaatatggttaggaatttatcctcctggtgaacctagttgtttacctggaagtattggcatcacacaatcctagagctggagagaattttcaaattctaattccatttctacctttttaaaaatttttattattgtggagaaatcagtctcaaagcagctaaacgacttgcccatggccacatagctagagagtaaatgactagggccagagcctagatgactcttgctcttttattttctccagagagactcagggtgctgccctggtagtctccaccccttggtcgcctttcccccccaaaccctagtacttattcccatttttagccactaattttggtttccttgagattcagcatccagatccaaaaaatatacattcttctgtaacagaatattgttcctcagttggcctccttgtgcttctcagctcctcagtttgggaatatgccttttctggttattctccattttcttgcagatttgttctctggccttctctcttccgtgctctaggaggctgacttttacagctttcagcatctgggatcctttatcccttggcttctggttggggtttagcaaatgggaagcagtgacagaaaatggaagggaaaaaaggcctttggagtatttgttccttctgctccttccatgctttgaggcaattctggcagtgactgttttacagccgtccatgtccactggccggtgggaaccttgtttgtttccttgccccttcaggctacttgcagctcttaattcctgagtacctcagcatctcttgttagttttcttagccctactctcacttctgtgggtactgtagtcacttgattaaagaaaagttcaaacattgtatc

SEQ ID NO: 51 - DNA, 1300 bp, Homo sapiens
  misc_feature (1)..(1300): DMR1:52182201
gggaagtgaggagcccctctgcccggccaccaccccgtctgggaggtgtgcccaacagctcattgagaaggggccatgatgacagtggcggttttgtggaatagaaaagggggaaaggtggggaaaagattgagaaatcagatggttgctgtgtctgtgtagaaagaagtagacatgggagacttttcattttgttctgtactaagaaaaattcttctgccttgggatcctgttgatctatgaccttaccccgaaccctgtgctctctgaaacatgtgctgtgtccactcagggttaaatggattaagggcggtgcaagatgtgctttgttaaacagatgcttgaaggcagcatgcttgttaagagtcatcaccactccctaatctcaagtacccagggacacaaacactgcggaaggctgcagggtcctctgcgtaggaaaaccagagacctttgttcacttgttaatctgctgaccttccctccactattgtcctgtgacccagccaaatccccctctgcgagaaacacccaagaatgatcaataaaaaataaaataaaaaataaaaaaaaataaatattttggaactcttttttaaattatagtatttcctttaaaaaaaaaataaaaccagctattggtatggcacatgtgtattttcctcatttatattttaagtaagccataaaacctagtcactattttttgacatataactataaaaagaatatttagttttaaatgtgaataaattaaaaaaaataaggtgtctattaggattggcaattagaaagtcattgatgaccttaggtagagcagttttagtagattgaaagtaagaattgaaagtaagtaaaggtcagtaatttttttcttttaaaagaatgtggctgtgaaaagaaggcgaaagggcagtaattagagggaaatgtagggttgaaggagaggttttaatgtttgttatcaaaagatgttgaggatgtttacagaccgtaaaagggaaaggttgaaaagacagaggacacaggcacttagagtatgttgtaaagtagattgtttcaaaattaattaacgtatatattgggaagtaaaccagttaagtagactatgaatgtttgggatatatgtttgttgtaacttatagcaatcaccaacatatagaatactcaaactcaattttagaagtcataggaaactaagagattttctagaccagtttctttattaaacatatgaggaaattgagacctgtgtttgtacttttgccttttgagttattaattttattcaaaattattt

SEQ ID NO: 52 - DNA, 600 bp, Homo sapiens
  misc_feature (1)..(600): DMR1:52469801
aaatggctggaacccaggaggcggagcttgcagtgagctgagatggcgccactgcactccagcctgggcgacagagcgagactcagtctccaaaaaaaaaaaaaaaaaaagacggctacatatagaaatctttatagtaagtttatatacataggttagtatatacacacatattttgttgctctgagatggcctcaaagcagtgacagcccagtaacagcaagcacatctagtgttcaggtcttggtttctaatctcattctccaataaaaggaaccacagctccttggacaaatgcctaattctaggagtagggcacaaaatatacatgcagtgccaggagcatcttgtagtgccagaaagtatggaagtgttaaaacccaaacaaacaaaaaaaaccacacactgatggatatatataaaagggaccaggtagtcaagtaaaagagttcccaatggccaaagctagaataatctgaacaaaagaaaattatattcaattataacccaaggcatcaaatatctatgagcccacattgaggtaaataaattactaagtaaaaataaatgtaaattgtatcttaataaagctgctaaaaa

SEQ ID NO: 53 - DNA, 5800 bp, Homo sapiens
  misc_feature (1)..(5800): DMR1:54604601
tggagtcgagaacccctagattcttctctcctgcctgccccccttcctgttctcaaccactcaggtctgctgctgtctgaccaggcacttcctccctctctgttcttctgcagtgatcactgcagggatcggggcagccagcaggcacgcgcttacaggagacctaagctctgccagctgcctgttcccctagacaagccacttcctgcctgtgccactggggcttggatgggcacctggctgacaggaaccaccacatgttgccttagtcactgttgtcttaagccaccttcctgtccatttgtgctgaattcataattcgtggggatgcagctgagactcagagaggttgagctgcgtgttcacattcacacagcaagtcagctgtagccctgagcttccagtctcagcctccagcatccccatcagtccactccaccacccagcaaatgaggctgccctctatcccatgcaggtccgcctgtacactctggaggatgacaagttcctctccttccacatggagatggtggtgcatgtggatgcagcccaggccttcctgctgctctcggacctgcgtcagaggccagagtgggacaagcactaccggtgaggggccagggtgagggcagggcagtgtcccttctccggcctgatgagggagagagtgtctccttctgcgggtcatcctccatgatgctctgccctgctggggctgggggtgggttggagttccatgctgggtgggggttcagggtcatgggtattttgagcccttagggaagagactgagcacggaattagagctggaggcttgagttgaagtcctgcttctgtcccaaccagctgtgtgacattggataagtcaaagtcacttcctttctggcctcagtttctctcttcttaaaatggatgcttggatggcgggtcatggattcacactcagagatactgattttcaaaccatgtgctgtggagttctgtgttcccaaaggggcttccggaactgctgggggtggagttggaaggatgaagggtgatcgggacatagcatggccagtttgttgaacttaccaagtttgctgattttcctcacaaatatattatttttgaatataatgaatgattatgaatagaaatatgttattcctttacatacatttgttcctccaaatttattgattgttcacatgactatcttcttctcgaatttagtcaaggaagataaatatgttcttaggaaaatagcaaaatttgtgtttttcaagtccccttaaagtcattttctgttctgccatcaccggggctcgagggggttctttgataattgcttgttatgaggagcctacattctggagaatttccgtaaggaggttctgtgtgtttggaaattcagtccgctggtcacttggtgaattgtattttgacaaactggctttccccttcccaccccatctattttctccagagcaggcttgtagctctttatacatgggcttcctgctgaaggtgtctttgcaaaaagggccatgttgccttaaaaagccctggcccagctgactcaggcctgctggttgtccccttccagaaggcagagaggtgatttggtggtggatgtcgtgtagggggagggcggttgtgcatgtggtaggtgggcttcttggagggaggctggggtgggccttgaaggccagaccaaatcttgatacttgatgggatttgtgggggagtggcctgaggggaaagagagcccctagtttcttccccataccctgcctactgctgagtgcaggcaggggagtggggaggaggaggtgggtctggacatggccatgcctgcctctgtgtgggtgtccttgtgtgggtgcacgtgttggtatgaacctgtgtatgcccatgcatgtatgtgtcaggtgcctgggcctggggatacatctctgccacctgatagcctggacacaccccagccctgcttccttattagctctgtggccgtgggcaggttatcttcctcatctatgagataggaatactaaaagcgtctacagcatggggctgttatggagattaagtgacacatgtaaagcatttagaacagcacctggcactcagtgggcgctcagtaaatattaagaacaactgctaaatcatcacacatccttgtggtgtctgcacctgcgcagacatgtatagacacacgtgggtctctgtgtacactgatgtctgtccatgtgcctgtgcacatatgaccacatgtgtgcatgtatgtgcacatctttgttcccatgtctgtgtgtatgtgttcatttacttgcatgcatgtctacatgtgcctgtgtgtgcacacgcacatgtgtgtccatcttggctgggctttgctgccttcctgctggcccttgctgagcagtacagggggtgacatcccatcacagaagctgctcaggcactgcagtgtggcagggcccgggcagacccgctgcttgcatgggagctggaagcttcctggggcactgagatcccggcctccccacaggagcgtggagctagtgcagcaggtagacgaggacgacgccatctaccacgtcaccagccctgccctcggaggtcacacaaagccccaggacttcgtgatcctggcctcgaggcggaagccttgtgacaatgggtgtgtgcctatctgctgtggggtgggggacacaactggacagggtggtagggtggccgcttctccctcccagggaagggcatcagcctggagccagagctctgcttcccattggctgtggggccccaggcaccactagacttttctgggctgctgtggctttactatgggtaaaatgagggataggggcacacatttcccctcttgtcgcattccctagagcagggccacccttacccagggtggctcaggctgcctcgatgcaggccttgggcaggatatttctcacgtggccacctccttggcctcctccctctgacagccctgtgtgggctggagggcctaaacatctcttttgctggagagacagggacagaaaaaaaatcccaaagcccacgagtcttcccctgagcgttgaagtggagtggcttttccagaaagtccacagtgaagtcaggttggctcctggtgaattcagtgctaacccacaggtacctcctccctccagcctggccctgagccccgcattggggctttaagagtcgatgtgccttgcatccccctggtgaggaatctgtgctagagggggcagggtctcggccttggttgggcagaacaggcccccactttcttctgtggctgacccctgtccccttgctacccttccttcactcagggacccctatgtcatcgcgctgaggtcggtcacgctgcccacacaccgagagacgccagagtacagacgcggagagaccctctgctcaggcttctgcctctggcgcgagggggaccagctgaccaaggtgaggccggtccccccaaccacgcccccagcctggctccaccccaacaccacacgtgtattgagctcagcactgctgggctaggatagtctcagagctggccccccagcaggctcccccttccagcctgggggagcctgagagtgtcaggggctgaaaatgatctaatctgtgtacaggtaagtcagaggccactgcatggtcttggaaaaagctctgggtgctgaaggcagaaggcctgggttctgaactgaaattccatctcactcgtcattcacttggatagcccttctcatctaggaaggctttatatgactctgagggcccataaaacccagcagcgcagtccgtgttgatggaaaacatggggaggaggctgagggaaagcgagggtggggtactgcagcctcccccctcacagcttctattagggccctgcagcctgggtctggccttgagactcacccagcagagactcagccggtgtttgctgaattcatatgcttgaacccatgagcgcctcagaaccatccctgggctaatgtctaatgtgtctctatggccgagattcagagctgggccctggagatgcagcccctgccctccagggcctctggctggcggggaagatgcatgatgacaatgtggtgtgtggtgtgggaagccagggttgtcagtgcccgaggaagggttgggggagatcagctggaggaggtcatgctgggcaactgtgtaatctaagaccctggggagttgggttgaatattctgccctcccagaaggccagcaaggctgactcaccaccagcctcgtgcccactgggctcccaccccttcccaggaccctcccctagcttggtccccctgagcttggcttcccaccctgcaggtatcctactacaaccaggccaccccaggtgttctcaactatgtgaccaccaacgtggccggcctctcctctgagttctacaccaccttcaaggcttgtgagcagtttctcttggacaaccggaatgatctggcccccagcctccagaccctctagatgccctcagtggccacatcatgcccactcccactccatcctgtccccaaggactcacatacagtgcctggagaaagccaaagacctttatttcttcctgcctccccgtgggaagcctccgccctgaggtccgctggcccaccacccctgggtgctcagtttctaccaacatgagccagcaagtccttgtggtagccctggggtagcctgtagtagactcgggtcctgtccacagccctagctgccagcaatgctgtcctcacagaggcatagtcgcccccagctgggttgtgctccactgtgacggtggcccggggggaggatgccagcagcctgcctatggctccagctgtgctgtggcccagcagcatggcctgcatctggaaggacacaggttgccagagcccctggcacaactctagcatatctgtgagcagctgttccctgtagccactgcccagcacctcctcaggccagcctggtgccacagtcacgtgggggaagacctcagccacagctgtaagcagctctctgccagccacatggccggggaccgaaaaactcccgtgggagattttggccccaacccacacaggccaatgcaagaggccaaggctggagaggcgtgccagcaaggccagggatggccggagggctgcgggctccgctatttgcaaatggatgccccagtgtccgggatgtgtggccagctgctgcaggcaggactccagcgtcaggatgttgccacttggagtatgaacaatgggcacggggttttcagccacagttccctcgaggccagtgttcagcaggatcatgccttctgtgtctggaagaggcggcagaggcaacagtgtttaggatttgggttatcataaggtgttaagagtcccttgttaaaggggcagtgggagttatggggtcatcaaggaccttgcctctctggaatctgtcaacccagttttgggctccaggtggatgggttgctttataaatgtgcctggtgcatgagaaactcttgtttcagctcttggcctttacccatgactcagcctgggggctggtgccggccttgcctgcagcaatgtagctgaggactggtctgaaggccaggagccctgtgctcttgacatcactgtactccctctccctccccgcaaccctgccccaccttgcatccagggtatggtgtaaataaacctgtgttgccatggcaacagagaccggcggtacctgccccaagcaaaggacacccctgcagatgagctgggagcaccggggctgaagg

SEQ ID NO: 54 - DNA, 2200 bp, Homo sapiens
  misc_feature (1)..(2200): DMR1:54626801
tttggaactgctgcttatttagtgtttgtgacactcttatgaaggaggcattcttttatttatttatttatttttgaggcagagtcttgctctgttgcccaggctggagtgcagtggcacaatcttggctcactgtgacctctgccccctgggttcaagtgattttcctgcctcagtctccaagtagctgggattacaggtgcgcaccaccacgctcagctaatttttgtatttttagtaaagacggggtttcaccatgttggccaggctggtctcgaactcctgacctcaaatgatccactcacctcagcctcccaaagtgctgggattataggcgtgagccactgtacccagccgaggaaggcattcttatgcccctttttcacagaagggagccagagtcagtttgcagcagaaagggatgcccatgccctgtcattccaactccgcgggccgtgtgtcacctgtcctccctgggaaagaggccggcgagccgagctctgaggcacagagcttcgccactctcttggttccaaagagctctgcaggatgtctgggaggaaagagacttcatctggctctggtttttggcaggaggaacagccctggaaccgactccaagctgtgaagactcctccattgtctgtgacacttctcgtggggcataaattactaaacaagttactgagcatgcattctgtgccaggcactgtgctaggctctggggatccaccccgtggcatactgtgggagagaagaaagcaggggctgtcagggggctccagcatttcagatgtgaaacagccattttattaatagagctggtgcacatcaaaaacacagagcaggcttatagcctgtaaggatgtcagacatggaaagtggcagtgggcccaggttggggcatgcaggatggagaagacacaggttagaaaccccaaactcctgggtgggccaggaggctttcagaagaggcttggctgactcggagaaccatcagggacgggggctagggaagaccttccagacaaagggtgcagtgtgtgtgggagagggcacaggcatgagggagaagagcctgtttgggagcgtgagtggtgtggctggagcagcaggtgggaaatgtggggaggcggagggggagagaaatgagactggggagccccggaggcctgggtcaccctgataaagaatttggcttcaacctggatgggttggggagcccttacccatgggataagcagggagcgccacactcagcttgcatttgggaggtggctggaggctggagttgagaaatggttctggaggcctgactgcctctgcatccaggctgtcctgtttcagcactgctcacccctgcaccccggcagagccacaggacttcccacactgcattgcttagaacagcaaatggcccagggaagtgtgtgcctcaggctgtgttatgtgggttactctgatactctccccactcccataccattgcatgttacaggggaggtgaaaccaggggtggttcagaggctccaacatttcagacatggagctgtcatttttagaactggtggctcacacctgtgatcccagcactttgcggggctgaggtgggaggattgcttgagcccaggagctcgagaccagcctgggcaatgcagagggatctcatctctacaaaataaaaaaataaattagcgagacatggtggtgcatgcctatagtcccagctacccaggaggtgggaggatggtgccactgtactctatcctgggcatcagagcaagaccccatcgccccccccccccaaaaaaggaaaaaagaaacccatttgcctattttgacactgtcatgaatttgtactgcttaggtggtctcagcactctaaatggtggaattttatttaaagtagtttcatgtcggtagtgccccaagataactactacaagcaaaaacatgttttattaagaggaagatagaggctgggtgcagtggctcatgcctgtaatcccaacactttgggaggctaaggcgggcggatcactcaagatcaggcattcgagaacagcctggccaacatgacgaaatcccgtctctactaaaaatacaaaattagcggggtgtggtggctcatgcctgtgatcgcagctatttgggaggctgagggaggagaatcacttgaaccggggaggcagaggttgca

SEQ ID NO: 55 - DNA, 2000 bp, Homo sapiens
  misc_feature (1)..(2000): DMR1:56809601
agtccccaaggaaactttccatcagggatgcagtgaggggtggccactccctgtgctcctagagctcctgtccctgctccattgcagtgtttattacactctaattgtttttttacattttttccccttcctccctagactaggagcaacttcaagtgcagcaatagggttaagaacatgggctttggatttaaaagtcttaaggtgaaatcctacctctccgaattctgactctttcacctttacaaagctatttcacttctctcttttcctacctcctgatcagtgaagtggggatacagcttttcacatcctaggaatgccatagacattaaccttggcctggtgcctgacacaaagcaaacccacgataatgatattttgttgaagatagttgtgatatggataaagagagaggagagaaagaaggaggaggaaggggagaaggaagagaaagaggagggggaagagggaaagaaggaagaagaggaagacagtgattatcatgatgatcatggtgatttttagtgatgaaatgactgtggcagagtacatgttcagtaaatatgttcagaattaatcaacctgatggtttcagatggaaaaattgtatcagttctgttaggtggcattttagtttccagtaatagaaatgctccaattttgcctccttcttctgcactcacggacatgaactcattccatgaagttttcttggagttttcactccagtctgtaccccttggctctagtcattctgtgaaactaccctatgaagtaccctcttcccctcactcccctgtttcccaccgaggcagctaacaatgctagtacagaacaaggggcatgggacccactctgtaaacatttagttctgctctgtttagacttagactcaattcacacacccattttccactccctcccagaggctacctttttctctcagcaaaatctgaaagatatcaaagagaattttagcaagatttttctttaaataaagggctaaggaaaccaaatggagatggccttgagttggtcatatgggcactgggtcagactttgttacttagctgagagatgccagtttcatgtaaagagccagaataattgaagggcaaaatgcatcaggcactgctgcctggaacgcacagcttaatggaactttaacagagatttttctttgggttaattaacaagaggaaataataagactctaatgtcaggtgatgttgtcatttttctgattttttggaagggagttgtatttggaatacattgcccctttccacgatccttcacatcctctgtgtttctctatcactgtatttaccatcttttattatcaatatctgtttacttttctgtttctcagtagatggtgaactccttcagtggatatcatcatcatcaacagcaacagcagcaagagctaacactcactgagcgcaggtatgcaccgggcatgattctaaatgttctctatatattaaatcatagatgctctaggggagggaccgtcatcaggcaggtagaatcagagaggtcaaataacttgccaaagttcacacagccaaaaagtggtagcactgggattcaaacccagaagctgaaggtttaaagcacacattctatacgagtttctctctctcagaaactctagaatagtggtattgtaaccaagaaatttagcttcaaaatgcattttaaaagtttttcctttcttgctttcagccttgaaacacactttaaaactttctttccctcccttcccacctgacactcccttgcactgccagcttatctaattatgtgcttacttagaaattccaggggctaatcttgaaacaaaccagcccatggcgacccagctgtgaaattccagagattacctccaggcagtttgtcaacaacccagccattgttgagatgatgccagcccttgctccaggtggaccatgactcaagacagtcactggaacaagacagggttgtcacag

SEQ ID NO: 56 - DNA, 3500 bp, Homo sapiens
  misc_feature (1)..(3500): DMR1:57580501
cagcacttccagcatttgaaatcaggatcttctccatccttgggtttgccagcaggtctttatttaacaggaattcaagtctcctctcctctttttccttctccttgatctcccttgtctgagcagggaagggtaaaggcttgagaagatgctaagaccatacagggacttagccatggaatttggactaatgataattataataattgcagctactcgtcacggagcaacaatcacacttcaagcatcagatcagtgctttacagacaactaatctcatcctcataataatcttataatttgggtatgattgtatccagtatacaaatgggttagttgaggttcagggtggaggtgaacagacttgcccatggtcacttggccagtaccccaagaactggcactggaatgcagggctgcctggctgagttcagataagggtacctgccatttcccaacccagccctattgggcaccaagaggacaggaatgagaaaattagatgctaagccaaagcaagaggcctgtctactgacctgtgtgtggggccctctctgggcctcctctttggagatgcctcagagactcaaatacctgctggttttatctgtgaggctggtggaactccttgtcaaacatccaggcatatttttgtcactttaagaaatcaagacaatttcttcacttgacaaaggtaaaatcttttaaagctttggaggattgggaaagggaataagaaagacattaatagaatgacatatttttagtgtaacacttcagagaaaaactctaggggaacaaaaaataaaatgagcgacctaaatatggttctttaaaatttttttaaaaatactatgagcttcaaaggagtgggctgtgctggatatttgcatgccccaaatctgtaaaggatttgaatacaatggaaagtccatgggtgaagactctcctttagtctggtaaattgtgccacccctaatgttgggttgactacttgcgagctgagtgaccggacaaaatactaaacctctctcgttctcagtttcataatctgtaagataaagatggtggcactgacctcattgaattgtggtgagatatacatgaaatcatttatgtgtgaaatacacgaaatatttatacacaactataataatatggtcctatataccacattatatattatataacatatactatataataaatctaatatattattatataatatatattatatgtgttagattaattattatgtattttcaggttattttatttgaaaatagaacacatggctcatttaggaagattattaaaatatcttctgctgcttttgctaagtttctgagaaataggccgtcttagcctgagctgctataacaacataccatagactgggcagcttaaacaggaatttatttctcatagtttttgaggctgggaagtccaagatcaagatgccagcagatttggttcctggtgaggactgtcttcttggcttgtagacaatcaccttcttgtgtagcctcccatggaacagagagaggaagctctggtctcttcctactcttaaaagggcactaatcttaccatgggactctaccctcaatgacctcatttaaagctattcacctcctgtattagtccattttcacactgatataaagataccacctgagcctggatagtttataaacaaaagagggttaattgactcacagttccatgtggctgcggaggcttcacaatcatggaagaaggcaaacgggaagcaaggcacatcttacagagtggcaggagagagagaaaaatcagaaggaagctccagacatttatcaaacaaccaggtcttgtgagaactcactatcatgagaacagcaagggagaaatccgctcccatgatccaatcacctcccaccaggtccctcccttgacacgtggggattacaattcaagatgagatttgggtggggacatggagctaaactagatcacttcccaaagacatttccaaacatcatcacactggggattagagcttcaacatatgaatttagggaacaggaggatacacaaactttcaatccatagcatgggcaaataggttcacaaacaactgttatgagctgataggagcctcctcctcatgggtgctggatgtggcagctgaggattcaggagagctggatcctgtttcccgctccacagggtccgatgccactccaacagcatcacagtccctgtctcatgacaagatcctgacttggtttagataacctataacaacatgctcagggaaggtgggttcaacccacagggtggatcatgattggccaaagcaaccaggatagtctcattccttcttgcaggtgactggttaagcagtgcgcctatgacccagttttggtcattgagacaaaatggggcttcaggaaaagacttccagttctgatgaaaatcccttttcttccctatatgctggaatgtgaggacggaatgtgaagcagggctgcctttttgtgactatgagaggaaaaacaaagagaattggagaagtgaactcagagcactgaaattattgaactgctgagttagcagaagctggaactgcctaccctacagttctagttatgtttacataataaaccccagtgttttcagctacttttatccaggtcatttgttaccaggagccaaaagcatcctaaagcatacatgtacaaacttactttgggactctagacacatgccctctctgagcctcggtttcttgttttttttcttttcttttttttttttttttgatggaatctcgccctgtagcccaggctggagtgcagtggtgcgatctcagctcactgacacctctgcctcccaggttcaagcaattctcctgcctcagcctcccaagtagctgggactacacgcgcgcgccaatatgcccagctaatttttgtatttttagtacagatggggtttcaccacgttggccaagagggtctccatctcctgaccttgtgatccgcctgcctcagcctcccaaagtgctgggattacaggcctgagccaccacgcccggcccagtttcctcttacattaaatgatgggattggatttctgttggcaaaccagtagcccatgggccagattcagcttagcagtgatgtttgggtttccctgtgcatcaaacaaatcatatgtatctagaaaatgtgactcctgtactttccaaatttcttccaattgccctcatgagcctcacatgggatagtggtggaaaaatgaatcttgtcaggtaatcatatctccatcttctctggtacaagaatctcttagagaccttggttcttctctggaaatgctcctggttaggggtgaagaagtggggcttacatgccattgcggccttagggctatgctgttttctctagatctgctatagaatctgttaaagtgaactaaatatggcctgagaaggactccgtacttctctattt

SEQ ID NO: 57 - DNA, 1700 bp, Homo sapiens
  misc_feature (1)..(1700): DMR1:57715601
taaaatcaacatataatattggtagcatttcaatatgccaataatgaactatctagaaaagaaatcaagaaaagcaatcccatttataatagttaccaaaaaatacctagaaataatttagccaaagaggtaaaaaaagaatccctacaattaaaactataaaatcatgaaaaaaaattgaagtagacacaaataaatcgaaagataggccacgttcatgaattgggaaaattaatattgttaacaatgtccatattacccaaatcaatctacagactcaatgcaattcctatcaaagtaccaatgacattctttttttcttttcttttcgagacagtcttgccttgttgcccaggctagaatgcaatggcatgaactcggctcactgcaacctctgctcctgcattcaaacgattctcctgcctcagcctcctgagaagctgggattacaggcacctgccaccacacccagttattttttgtatttttagtagagatggggtttcaccatgttggtcaggctggtctcgaactcctgaccttgtgatccacccgccttggccttcaaaagtgctgggattacaggtgtaagccaccgcgcccagcccatgacattcttcacagaaatagaaataaaaagaaccttaaaattcatgcgaaaatgcaaaagaccctggatagccaaagcaatcttgaggaaaaataaagctggggcatcatattacctgacttcaaaatatattacaaaactatagtgccaaaatagcaagctattggcataaaaactgagatatagaccagtggaacagtgtacagaacccagaaataaatccatgtatttatagccagctgatttttaacaaaggtgcgaaaatacacattggggaaaggccagtcttggaataagtggggctgagaaaactagacatccacatgcagaagaaagaaaaccttatctctcaccatacacaaaaatcaactctaagtggattaaagacttaaatgtaaaaatcccagactatgaaactactagaagaaaacacaggggaaatatttcataaaatcaaacagggcaaggattgttaaaatacgacttcaaaagcaaaggcaacaaaagcaataatagacaaattcgattatatcaaactaatgagcttctgcacagcaaagaaaacaatcagtaaagtgaagagaccaacctacagaatgggagaaagtatctgcaagctatatgtctgacaggggttaatacgtagaatttataaggaacttcaactcaatagccaaaaagcaactaatcaggtttaaaatggggaaaagacttaaatagacattttccaaaagaagacatacaaatgggccagacactgtggctcatgcctgtaatcccagcactttgggaggttgaggtgggtggatcacgaggtcaggagttcaagaccaggctggtcaacatagtgaaaccccatctctactaaaaatacaaaaattagctgggtgtggtggtgggcgcctgtaatcccagctactctggaaggctgagggaggagaattacttgaacccgggaggcatatgtggtgagccgagaccgcaccattgcactccagcctgggcgacagagcgagactgtctcaaaaatttaaaagaataaataaaaataaaaataaaaaaaaaagaaagaaagaagacatacaaatgc

SEQ ID NO: 58 - DNA, 1200 bp, Homo sapiens
  misc_feature (1)..(1200): DMR1:57930201
atgtgggtccatttctgggctttctattctgttccattgatctgtctaatctttcaccagtaccatactgtcttgattactgtagcattatagtaagactggaagttgacaagtgtcagtacttcactttgttctccaccaatattgtgttggctattctgggtcttttgcctcaccatataaatgttagaattcatttgtcaatatccacaaaataacttgctgggattttgattgggattgcactgaatctgtagatcatattaggaagatctgacatcttgacagcattgagtcttcctagccatgaacatgaagtatctcttcatttatttactctttgatttctttcatcagagttttatagtttttcttatatagattttgttattttttgtcagatttacaactaagtattttttaggtgtgctaattgatattgtgtttttaatttcaaattctgtttgttcactgctggtacatagaagagtaattcacttcatatattaacttagatcctgcaacctggctataattcttcattccagaagattttttgtcaattcttttggattttctacatagattattacataatctccaaacaaagacagttctttctttcttcccaatcagtttaccttttgttctttcttttcttattgcatcagctaggacttctaatatgatgttgaaagagagtggtgaaaagggacatccttgtcttgttcctgatcttagtgagaaggcttctagattctcaccattaagtatcatgttagttgtaggtttttcatggatattctttctcaaattgagggagtttctgtctattggtagctgacagtttttatccttaatagacattggattttgtcaaatgctttttctgtattgattaatatgaccatgtaatttttcttctttagctagctgatgtgatggattatgttatttcattttggaatgttaaatcagctttgcatacttaggataaatcttacttgattgcggtgtgtgattctttttaaacattgttgggttctgtttgctaatattttgttgaggatttttacatctcatcatgctcatgagtgatattggtctatagttttcttttcttgtaatctctttgtctaattttggtgttggggtaatggtgacttcataaaatgagttgggaaatatatcctctggttc

SEQ ID NO: 59 - DNA, 800 bp, Homo sapiens
  misc_feature (1)..(800): DMR1:58721701
agaacacagatgcagccaagagctgggccatgctgggatcatggtgttgagggcagctcttgctcatggagctgtatttgagtaatcgttagggtgttccttgatgggggggtggggtttcaggatgtaccatcacattgggaactgggcttgatggcttttgaggtcttaccagccttggggttctgtgattccacagttcagccattgacaaggttttcttttctttttcttttcttttctttttttttttttttttttttttttttgaggccgagtcttgctttgtcgcccaggctggagtgcaatggtgggatctaggctcacggcaacctctgcctcccgggttcaagcagttctcctgcctcagcctcctgagtagctgggattacaggcaccagccaccatgcccagctaatttttgtatttttagtagagatggggtttcaccagtttggccaggctgatcttgaactcctgacctccagtggtccacccgcctcagcctcccaaagtgctgggattataggcatgagccaccgcgcctggccgagaaggtgtttttaaaataaacaaaaggttgatgattgtgggttagcagaacttactaacattaatgtcactaaagttggtatacagcccccatccactgctaaatttggctggcttttaaaagaaaaataaaataaaataaacaaaagctggaaaggatgaaggaggcccttggatgaaacaagttactaagtgggctttaataattcattcatattctcaaagtgacaatttactctctcaggcca

SEQ ID NO: 60 - DNA, 600 bp, Homo sapiens
  misc_feature (1)..(600): DMR1:62587101
attccacattatttttcaaaaacacattacaatatgatggatataatagagttaggtagttactacaaaacaataacatcctaatttgcatttatttgaattcttgtccagctcatcatctctatcatagacaaactttaatagtccttgctgccaacacacagaagagaaataattcaagaaaagacaccaaatagctaaaaaaaaaaaaaaaaaaaaaaaagaatcaagagttactttacctgaagactagcgtttagagccaatgaacaagacgtttagtataatagaaccttgctaatcaactgctggggcaatgaaaacaggtctaaattttctgaagagtggtagggcaatatagaaattttaaatgaacataacactttgacccaacaaacacacctctaacctaaggagaaaactgtacacatgtgcaaatgattgtgttcaaagtaattcattacaacatttttgataagagaatgattacacaaaattataaagaaacacaacgtttatcagtactgagttggttaattaagataccttaataagaaggaatatcatgtatccccaaacaatgtacagccatatttattg

SEQ ID NO: 61 - DNA, 1500 bp, Homo sapiens
  misc_feature (1)..(1500): DMR1:62831801
taagcgtttattactaaacttgctctaatgcgttgcaagggaaatacagatgtcaagaaccaaagtctttcttccgttacttagaaccattcattttctgaggagagtcagtgacaatccttgctatatatttttttctttcttttctcagttgtaagagacatagaactttcactgcctcacaggtctctatgatataaacattgcatttcaactgatcagactgcctcgaagtaaggcactctctaattgtattaaggatttttatttagggggaaaacagtagaattcttaattgataagtaactttattactgtttagtgagatttttgatacaattttgtctttatttttagttagctctaagattttaacctgatatgctttctctgtttaattttttcagttgcagctctcattcagtttatcatttcagaaaaaacttcatgatatttttacaatactaagaatatacaaggttgttctttagagggtgtccgagtccattttttgctgctgtaacagaatactggagactgagtaatttatagagaacagaaatttattctctcacagttctggaggatgggaaatctaagatcaaggcactggcatctgatgaaggtctccttgctgcgctctcacatggtggaagacagaagggccgaaagagggcgaactctgtcctcacgtggcagaggagcaggagagagaaaccattcctgcaagtcctttttatagcaacattgagatttttgatacaattttatctttatttttagttagctctaagattttaacctgatattcatgcaagctctgccctcatgacctaaacacctccccaaaggctccagctttcaacactacattggggattaagttcccacacatgaattttggagggaataaaaatgttcaaactatagtggagggttacttataacagtgagaacttggaatgacttaaatatttatagtggaggttttaaagcacattttgttgtcataaaatagaatatttttcagctactacatattattaatatagatctctatttattgataggaaaagatattcatgacataatgagcaacaaaaggttacaatggcatgtgttgtgagatttcacatatataaaattgtatttgtaaatctgtgtgtgtatgtatgtaatgtagacagatgttaagaaggtgttcccccaaatattaataatgatgagctctgggtgttggaatttgggaaaagtttcacttttttctgtatttcctgtatgtgtgtgtgttctgtatggtttggttacttgttaaaggaaaaagaacgtttgtccatatatttatttttatatcttagagatttcaaaacatcctctcatttaagagaaggaaagcttaattattgtttaatagttttgggattttataacctatactttatcattattagtgttttataggatatatcaaaattattgcaggaactgttgttaagacat

SEQ ID NO: 62 - DNA, 100 bp, Homo sapiens
  misc_feature (1)..(100): DMR1:64923801
gcatcagaccaacggttcccaacgcctcccaccccgactcctgctgctttttaaaacatttatgtcataatgctctccctttactaccctgaaatgaaaa

SEQ ID NO: 63 - DNA, 100 bp, Homo sapiens
  misc_feature (1)..(100): DMR1:66253001
aaaataaagatacctactggtattgataataactataactcaataactaatctgcttttatgtgctaagcactgttatcaagagttgtacatatgtaata

SEQ ID NO: 64 - DNA, 300 bp, Homo sapiens
  misc_feature (1)..(300): DMR1:67424601
aggacactaagataatcagaatacccaaataaccttattgtggggtttcaggaaaagctacaaatacatatgggggggaaaaaatgagtaacaaatatatcgaaatattaaaaaaccggtcattcaatatactataacccaaacccatcccataagacattatcttgtaatatagtaactctcagaagagagcattcattcttatctcagagacaagtaaaatttgacagaggtatggattaacctctagttaggtatagaatttttaagaaaatcagaataccaacgttaattcgtctt

SEQ ID NO: 65 - DNA, 200 bp, Homo sapiens
  misc_feature (1)..(200): DMR1:68452201
ggcaggagaatggcgtgaacccaggaggcggaacttgcagtgagctgagatcgtgccactgcactttagcctgggtgacagagcgagactccatctcaaaaaaaaaaaaaaaaaaaaaagaacatcataaaccatttacagaaatccagacccttgtcatgagaaaaggggaatcactgaaatattttatccagaggagt

SEQ ID NO: 66 - DNA, 300 bp, Homo sapiens
  misc_feature (1)..(300): DMR1:70825301
acgaaaattagagaaaaaagctatcccaaactaggtggagaacatagatttttcctgagatggtgacattttcttcagaagttcttggaattccaggtgtaggaatggagaagacgggtacaaggactgaccccagagttggtgtctgctgagtgggtgtgaggagaggggggtgatgcttgggaaatgatgatgttgatgggaggcgtgttcaggtgagcctgcagatagagatggaataaggacaacagcacatggctaggggaaagtgaaagcaccagtgagcatttctgagttact

SEQ ID NO: 67 - DNA, 3000 bp, Homo sapiens
  misc_feature (1)..(3000): DMR1:75742801
ctctcctcccattcacacacccagatcccctggcctgtgcttcctggtagaggtagaagaggcatcttgaagtcaatgacaatggagaatgaaggtgccattgaagaaggaaagcagcacctctttgcctgtgttcaatccctccatacaagtggaatcgagaatgtgcacagccaggacagaggctgctctgagcttgggaggcacagcatcctcctagatgtctctgcagaacaaactttcaaaagataggaacttaatcacatggtcctcgggggtttctctatagtataccagcactagggagaagcaaaatcatctttgcagagagctgatggaagaaaggcaggaatatgaatgagcatccattaaggctctctctctcaagcctaaggaattaagatattcgagggtatgagacaggtgcagagagggagagagccaggcaggaacaccaagaaaaaagctgtgactgctggttacatagtgctctgcttccttgcttgaggccaacagcatgtgcctgtcaccaggctaacctgggacccatgaggggacagggagaagactggttttcagttcctgcatgatcaatttgtagggtgtgtgggttcctcctaaagatcaaagaggaggactctgggatcctctaccgctgccttgattttgcggaggaaagtcacagcctctctgccatcaatcagccggtgatcataggtcagtgccacgtacatcatgggctgcacctctaccttgcctcctatagccactggcttgtcaaagatgccatgcatccccaggatggcagacaggggggttgataatgggtgttcaaagagtgagccaaaaacacctccattgctaatggtgaaggtaccaccatccatatcttcaatggcaaattcattctttcgggccttctctcccagttcagtgatggtctgttcaatatctgcataattcatagcttccacattcctgatgactggaaccaccagaccctgtggggtggccactgcaacactgatgtcaatataatccctatataccacctctttggttatatcatcaatcactgcgtttacaacaggctgttcctgcaaggcaaaggctgaggccttcacagatgccgacatgaagcctagtttgaggttatgtttcttcaaaaaagcctctttgtgccgagccctcatcttctggatgttactcacatcaatctcattaaaaattgtcagcattggcacatgtattctgggcctccttcagacgctgagcaatgcactgccgcatcctgttcattttctcctgatgttctgaatgcagacctttgccagctcctggctcagctagtggtgggacagcagtgggttttactgcagacacaggtttgctagaaggaggttgtgagggcgagggcactggtggcatcgagtgggtatgggtgctgcatggggaggaactgccgctgctataggttctgcttttggggctgcagcagcaggagcttcagccggcttggccttagcaggagcagcaccagttttcctgagtgtgaaaagcggagtgcctccttcgacttttcccccatcaggtacgaaaagagcttcaatcatgccatttgctggtgatggaacctgcaccaatgtcttgtcagtttcaatctcacaaaccacttcatcttctgcaactgtgtctccaacagctttctcccacctgacatctccctctgtgacaggttctgcaaacgctggggttttgactgtaaccaagtcatacttgcatacagttgtagttctgaagaagcgaacactgaagacactgttgttaatgacaaccttcctgctgttagggtaacctggtccctggcataaggagaccccaggcagggaatgtctccctagagggcagttccccttctggaaggcagagagcgagtggctgaacgcccgggacacagtgggaccgggacagcatcacggcggccgggtctccgttttatattattccttttcacaggcagctctatttgccctccttttcaagatagcatgccccttaaagaataaaattagttttgggaaagaaaaagtgccagtttcaacaggcatagactgtcttgttgtaataataatactataccaggaatttttacttgcaactcatattactaaaagaaagttaaatagcatactatagtccctccttatccttgcaggatacattccaggacccctaatggatgcctgaaacctcagaaataccaaaccctgtatatactatgtttttttcctacacatatatacttattataaagtttaatctataaagtgggcccagcaagagattaacaacaactaataaaatagaactataacaatgtattgtaataagttatgtaaatgtaggccaggcatggtggctcacacctgtaatcccagcactttagaaggcccacgtgggaagatcccttgagtccaagagtttgagaccagcctgggaaaggtagtgagacttcatccctacaaaaaataaacaaaaaattagctaggcatggtggcacatgcccatagtaccagtgactcagaagaggtggaaggatggcttgagctggggaagtcgagactgcagtgagccaagatcatgccactgtactccagcctgcgcaacagagtgagatcttgtctaaaaaaaaaaagttatgtaaatgtcctctttgtctttcaaaatatcatatatactgtactgcgggtaactgaaaccacagaaagtgaaaccccatggaatgggggagggcctactgtgttattaagacatagacctcaaatactagctcttccatatactaggtacgtgactaggcaagtttttaaacctgattatttatttcctcatttgtaaaatgtaggtaataataattgggattgttaagagaattaactgagagagcaatcaccatgtgttatttgccgatattatcaccattatccggtatgtgtatct

SEQ ID NO: 68 - DNA, 200 bp, Homo sapiens
  misc_feature (1)..(200): DMR1:77691501
ggaactcaaacaaatcagcatgaaaaaaaaataatcccagcaataagtgggcaaaggacatgaagagacaattctcaaaagaagatatacaaacagctaacaaacatatgaaaaaatgctcaacatcactaattagcagggaaatgcaaattaaaactgcaataacataccaccttactcctgcaagaatggccataatt

SEQ ID NO: 69 - DNA, 500 bp, Homo sapiens
  misc_feature (1)..(500): DMR1:79924401
tgtagatccattgacagcttgcactgtgtacctggaaaagccacagacagtgccagcccatgatagcagccagagtgaggctgtaccctgcaaagccacagaggcagagctgcccaaggctatgggagctgacctcttgcattagtatgacctggatgtgagacatggagtcaaaggagatcatttcagagctttaagatttaactgccctgctggatttcagacttgcatggggcctgtaacccctttgttttggccaatttctcccatttggaatgggtatatttatttagtgcctgtaccccccattgtatctaggaagtaactaacttgcttttgatattacaggctgataggcggaagagacatgccttgtctcagatgagattttggacctggacttttgggttaatattggaatgagttaagactttaggggactggctgggcacggtggctcacgcctgtaatcccagcactttgggaggccgaggcgggtg

SEQ ID NO: 70 - DNA, 900 bp, Homo sapiens
  misc_feature (1)..(900): DMR1:80308801
atgtgaaaacatcagacaaattgaaatcaggaacactgtacacaatacctaattatcactcttcaaaactgtcaatattatttaataaaagaaaaactgaaaaactatcatagatcaaactatcataaatatcaatattttttaatgaaagaaaaactgagaaactatcatagatcaaaggagactaagggggtgataaggtttgactgtgttcccacccaaatctcatcttgaattgcaattcccataatccccataggtgatgaaaggggcctggtgggaggtaatttaatcatggtggcagtttcccatgctattctagtgataatgaataagttctcaagagatctcatggttttataaggggcttcccccttcactcagctctcacttttctccttcctgccaccatgtaaagaaggacatgtttgtttcccccttctgtcatgactgtaagtttcctaaggcctccccagccatgatgaactataagtcaattaaacttctttcctttataaattacccagtctcaggtatgactttattaatagaagtgtgagaataaactaatacaggtggcaggacaactaaattcaatgtagtgttgtggactggatcctggaacagagaaaaaaatgcatgacgtgtatataaaacgtatcttagttaatagcatagtaccaatgttaatgtctcaattttgacaaatatcctgtgattttgtaagatgttaacgttagggaaaattaggtgaatattttcaataatgagatttttaaataatgtcaatttttaggcaaatttgttgctgaaaacaaatagtgccaactataaaaatttttatagcagcatgctttgaaaacttaggattccatttctctaatctgattataaatcttc

SEQ ID NO: 71 - DNA, 1500 bp, Homo sapiens
  misc_feature (1)..(1500): DMR1:81336101
tcttctcattcctgattaacgttcagtggccttgtcggagattctcctctactatgccagcctgccacttccagatatgtttcacctcccttctttgcctgcaccactctgaacaggatttctggaaaccttttgtgcaagctataataatgcttctttttctaaatatactgataaaagtatgaatgcgactgattgtgatactaatcaaggattagaaaagggaatgcttccacagtagcccattttaaccctctatttcactcatgttgatgaggaatagttttctagtttcaaatattagccaggtacagaaccaagtgagactgtaagtcttggtggagccagttaactgtgtccatttccttgatcttccatctgagttaggactgtttcttaattgcacttgtaatattcttgtgctgattgcccaggtccctgaggatcgccaatgtgaagtgcactagacctatatatgtatggctgtcagtgcacaaagtttctagttgataccataatccaaaggagcagggagagcactctgactcagctggggtgtctggatggcctaatcctcctctggaaagagttcataaactttttcatgtgtaattctgatatggacaggaggcagggaaatactgggtagaagagggcagtccccggtgagggccccaccctcgagcctggacaagtggcccaaagtgagaactttacctccccgttttcccactcgaatgttaccttttcaaaaaccaccctggcctgccctgtctcccatcttgtacccatgaaaaccccaggctccactggcagaggagcagcagagaaggaaagaagagaagaaggagcttgacatcagcgaggagcagcagagaaggaaagaagagaagaaggagcttgacatcagcgagaagcagccttgacttcacagggacagcttgacagtgggacctcaaagaagagttcagctggggatagtcgatttccaggggaagactagcttcccactccatcccctttccagctctccatcccttcccaccttccaacagcactaaaattcctggcatttatcatcttcaatttgcttgtgcaacctgattcttcctagatgccgaacaagagcttgggatacagggggctgtcacactgagctgttaaacgcgtaagacattcacggatgacaaagctaaaagagcgcactggaacacacaccctctggggctccaggggttgtgggtatccccctagatgctgctgtggtgcggcacagagtcctgctcctgctggtgccccgaagcgctcatcccagaccctgcactcgctcaccttcgtgctccctgtcccatgaaggattgagagctgtgggctgagtaaacaagccatccccttcatgaagaccgtgaaagcatcagacaaaaatttcctgtttcaattctagcattatgagagctctcagagaaatcatcatttgctttatgttaaagaagaccaagt

SEQ ID NO: 72 - DNA, 2400 bp, Homo sapiens
  misc_feature (1)..(2400): DMR1:81931301
attccggtatttgaacttaatattaaaaggttttattattgggtttattttagttatatttggaattctcaggttgagtgttgtactctatatactttagaatagtaagaaaggtctttaaaattgtagtcagaaagttgcaaccagaaattatatataggtgatacttcgtgcgtttttaacccagtgatgtgaaataatgattaaatctttgtctttgtatgccaaatttgaaaattttggaaatgtgactagaaaaatactaaaaatgattatatgtttagaatttgggactgagtgcttatgtagttttatgtttattttctacttagtatttaatcatgaattataccctggaaatggtttttgttccttgtttttgtttttgagacagggtttcattatgttccctggcctgtgcttcagtggtgccatcctcccacctcagtctcccccaagtagctggaactacaggcacataccaccacacctggctaatttttttaaactttttgtagagatggggttttgccatgttacccaagctggtcttgaactcctgggctcaagagatcctcctccctttgcttctgcctcccaaaatgctgggattataagcgtgagcaatagcgcctgaccccgaaattgtttagacattattcgcaaggcctacttatgcctctgagttctctctaaaaacagaaagaaagcaatttctgtatttattgccttcctagagttgagccactttattaacatttatttgaataagtaagtcaaagattgaatataggaaaattggcagtgattacaatgggtcatatttttctgttatttttaatgacatacttctgtagaacatagtatatttttacatattctcaaaagttttatttccaattttagtgtttcgttagcacatttttagcaaaacattatacttcttatctgttaaaaaattggttcatatgtgatgtatacatgtactcagataatatacttatttcaattctccatgttaagaattgatgaataactagacagcttgctcaaaattagagcaactaaaactcttgatttctacacttagaattagcaagaagacatattaacattgtaaactgtattatgtacctcttacataagttgtactcatcacttgttttctgtttcacttgttttactaagttttatagagcaaaatcatgttttgccattcatatttattctttagtaaagtatctaaacctatctcgttttaaccctgtggctctcacacaagttgcactgatcagagtcacctgcaacacttgttaaatctgagatggctgggtttccacttccagagtttctgaacctgccaatttttggtgcagcttaataatttgtatttcttttctttctttttttttgacggagtttcactcttgttgcccaggctggagtgcaatggtgcaatctcagctcactgcaacctctgcctcgcaggttcaagcgattctcctgcctctgcctcccgagtagctgggattgcaggcatgcgccaccatgcatgcctgcgtggctaatttttgtatttttagtagagacggggtttctccatgttggtcaggctggtctccaaatcccgacctcaggtgatccacccacctcggcctcccaaagtgctgggattacaggtgtgagccaccgtgcctggccaataatttgtatttctaacaagttttcagctgatagtggtgctgttggtatgaggaccacattttggaaactactgctttcactatcttaagtcatctgttcatctttataaatataaaatgaaataagaccagttatttgaaagttgaagtgttcaaaatatattctagtatctgcttctttatgatgaaccgtaattgtagttccttcaaattgtagtaaaatgtctactcattaaaaccctattttttctcttttgccttgttctcattcataccgattttttatgcttaatgtgtaagaaaattgtaggttattaacgtaataaacccacatggtattaccaaaatatactgatagtttgattgttaaaacaatgatacctttattggtaaagaaatcttcttctgtagaggaagggagagaaagtcatgccaggaactgtgcccagtactgaaaatacaaacgactaaacactttttctttcttggcttaactctaccttttcgctttcattagtatgagaacttgaagctgagcccttggcgggaatttactttgcttctgtggataagtaattgctttctttctggatctttttaaatgatagcaatttacacttttataatcttatcaacagcatattgttaaggaattttcagatttttcttagtattaatagctcacgttgggtgtttc

SEQ ID NO: 73 - DNA, 1900 bp, Homo sapiens
  misc_feature (1)..(1900): DMR1:82157101
ttaaaatggcatggtggtgcatgcctgtaatcccagctacccaggaggctgagaggtgagaggatgtcctgagcctgagaagttgaggctgcaatgagccatgattatgctactgcactcaagcctgggcaacagagtgagaccttgtcttaaaaaaaaaagaagaaaaaaggcaaggtgtggtggctcattcctataatctcagaattttgggaggccaaggtgggtggatcacttgaggtctggagaccaaggccagcccgaccaacatggtgaaatcccgtctttactaaatatacatatatatatatatgtgtgtgtgtgtgtgtgtgtgtttgtgtatatatatatgtgtgtgtatatatataaattagccaggcatggtggcgcatgcctgtagtcccagctactcaggaggttgaggcaggaaaatcattttaacccgggagacagaggttgcagtaagccaagatgtggccactgcactccagcctgggcaacagtgcgagactccgtctcaagaagaataaataaataaaaaataaataaaaataaagttgcctctgaatcatttagcttagtgactgacaaaaaaatatgctagtggtgtgaataaaatagttaataagttagtatttttggtaaaatgtgatacctctcatgtttagaaaaattgccaaaaattattctcaaataacaaattacttttgttaagaattacttgaaaacaaagacaatggtagaatttgaatactgcttaatgtccatacatataaaaattacatctaattagtccagatagtttaatggatattatcagttgtatatgtagcccattatcagggctgacgctagacctaggatcttaaacaccaccccagatatggtttggctctgtgtccccacccaaatcttatgttgaattgtaatccccatgtgtcaggggagggacctggtgggaggtgattggatcatgaggacaggatttccccatgctattcttatagtagtaagtgagttctcacgagatctgatcatttaaaagtgtggcactttccctcactctctctgtctctctcctgctttgccatggtaagacatgcttgcttcttcttccaccacaattgtaagtttcctgaggcctccccagactgtggaactgtgagtcaattaaacctcttttctttataaattacccagtctcaggtagttctttatagcagtgtgagaatgaactactacaacctcactttccatcacaaggccctgtcagactagcccagtcttaggtctgtgtgcgttgagatgcctttcagagttcatggtttattctgccatggatttgacagaaaaatgtatgaattgcttccccacataagctcaacttcagacttcagtgtgaaaggcttccatctatctgccccttggggggttctatggtactctttccttgaaaaactcactttcacagttgcccaggatcataagatgctggaaaattaaagatttgatttgagactggctgggaaaaggactatcttgctgctattgtttttgatgcatttgtcctacaaatttttatctttacctcttcaagaagattacttaacagaaaacatataagcagatattattgtatggattttactggtgaaatgtgaaaaatgaggagtaggttgcttatcctcgtgtaaaagtgagccatcctcaggtctgggaatcgttctacagccttaacacactttcccttgctgtttgagtttccattactggggcttgactcatataagaaagagctactatttcaagtttatgtttggacatatcacttttctaagagaaggtgggagaacaatgaacaaactgtctgtggatgttgtcgctacttatgaacagtttt

SEQ ID NO: 74 - DNA, 1100 bp, Homo sapiens
  misc_feature (1)..(1100): DMR1:82296701
agaagaatcagaaaaaaatggaccatgcagtgttggagcattaataaggcttgcagcttagtgagatttaagtgtaaagagagacaaactaatcagaaacacagaaatacaataggcagaaatggcagctgaggtatagagagagggctgcaggactcatgggcaaatctctccttagtttagagagtgctaggaggagggtagctaaagacaggcattttagtttgcaaagctcttcaggacgttatcctaatctcactctcctggggaaacagtgcacacaaaacattttgcatggaaagaggtgtctgtattttctgagggcagcctctcaggaaagaaagggagctggccactggatttattctagatgaataataggaaccagggaataattgaaggcatattaaaatagtataaatatccacagcagaggaaatttttatatagggtctagggaattagaataaggaaaaaggtgagcaaattagcaaagtcgaattttagttctgcttttcagggaaaagaactggaactctgctattcagaaataaactgtgaagaagagtggccaaaacctatgacacagcagaggcactaatttctaaacgacaaatcctaagatgtactgctctagactgatcctctgtcagaacaagattaaatggataaccgatttggtcttttccatctctagctcctttttatttccacatccattattctatgaatatacaagaaagggaaatataatattgttaaagctcaggtatgatttattgactcactgtatcttttaagatagcacatatactttgtgttgtcatacttgatagcacattttttcatgaataattgtgaataaacagactcataaaccctgtttaaagtgtcagtgcataagttactgccagtggtgtcttggggctgcattaacttacacgtgtaatttttcttccttcctctttcttctctcctcccttttttaattaatagattttctcactcttgagcatttagcatcgccttgtttgcttgatgcagctccctttggggtttcgcctgcggatgaggcagaagaacctggggaaagcagtttg

SEQ ID NO: 75 - DNA, 400 bp, Homo sapiens
  misc_feature (1)..(400): DMR1:83359101
tttaactaatgatctgtcagtcttatttattccgtgcaacaaacaactcctgaattcattgatcttttgtatgttttttcacatcttgttttttgagttgttgtttttttttttttttttttttttttttttagttgtcctttgattttggttatatcttatcttctactcactttggggttggtttgctcttctttctgtagttccactaggtatgatgttaggttgtagatttgagatttttctaacttttaatgtgggcagttagcactataaacttctgtcttaacactttcttaactgtgtcctagagattttgttatgttgtacctttgttctcgttagtttcaaagaatttcttcatttctgccttaatttcattgctaacccaaaagtcatt

SEQ ID NO: 76 - DNA, 1200 bp, Homo sapiens
  misc_feature (1)..(1200): DMR1:84056101
cctcttgttgaattgatccctttaccattatgtaatggccttctttgtctcttttgatctttgttggtttaaagtctgttttatcagagactaagattgcaacccctgcctttttttgttttccattggcttggtagatcttcctccatccttttattttgagcctatgtgtgtctctgcacgtgagatgggtttcctgaatatagcacactgatgggtcttgactctttatccaacttgccagtctgtgtcttttaattgcagaatttagtccatttatatttaaagttaatattgttatgtgtgaatttgatcctgtcattatgatgttagctggtgattttgctcattagttgatgcagtttcttcctagtctcgatggtctttacattttggcatgattttgcagcggctggtaccggttgttcctttccatgtttagcgcttccttcaggagctcttttagggcaggcctggtggtgacaaaatctctcaacatttgcttgtctataaagtattttatttctccttcacttatgaagcttagtttggctggatatgaaattctgggttgaaaattcttttctttaagaatgttgaatattggcccccactctcttctggcttgtagggtttctgccgagagatccgctgttagtctgatgggctttcctttgagggtaacccgacctttctctctggctgcccttaacattttttccttcatttcaactttggtgaatctgacaattatgtgtcttggagttgctcttctcgaggagtatctttgtggcgttctctgtatttcctgaatctgaacgttggcctgccttgctagattggggaagttctcctggataatatcctgcagagtgttttccaacttggttccattctccacatcactttcaggtacaccaatcagacgtagatttggtcttttcacatagtcccatatttcttggaggctttgctcatttctttttattcttttttctctaaacttcccttctcgcttcatttcattcatttcatcttccattgctgataccctttcttccagttgatcgcatcggctcctgaggcttctgcattcttcacgtagttctcgagccttggttttcagctccatcagctcctttaagcacttctctgtattggttattctagttatacattcttctaaatttttttcaaagt

SEQ ID NO: 77 - DNA, 1500 bp, Homo sapiens
  misc_feature (1)..(1500): DMR1:86773001
gctgctgaaagtcttagaaaaggactgtaaaatctcctaacataaaaagtggctaaaagaggtattaggagttgatcacttggctcccctctctgggtcttgcccaactctagccacaacgacaagcatccaagttaaattctcacttccaaatctaatacctgcttgaagaacttcccagttgcctcttagctttgcttcatggcacattcctggtaaatcaaaattctaaacaaatttatcctgtcaacaagggactatttaccactccataaatcaacccagatttttcatcctgctctactatatacgatgggtaaagtattctaggtgatctttgagcattttatctttttcttgagagaggcagatttggggcacgattctgaatcttctggggcaggcaggtgctctcagactttggttttgatgtagtggtgatagctgtggtcttcactgcgctacaggccagctgacaaggatgttgctctccttccaacctggggctcttggttatccttgaaggagaggaagtgaaatcttcttattttaatgacctaatcagaggagctgaatcaaaacaccatttggcaatacctcagtacatgattctctaaggctcacaaaaaagttttgaaggaaagggtagtttgtactttctatctaaataaacattttctgaagtcacagtacaaagagtagactacaagtcctaatgaccatggatatcatatacaaaacaagattagtacctgagcttaggagggagtatttgtacttacaacatctaaaatatcaaattaatgagtcagaactttggccttcattctatctgcctttgtaaaacatatctcagacttctcagggtaaacttgatctgattcaaactggaaacaaggtatctcctggccgagatcttctcctttcagattaaacagtctgaaaggaaaaatgggatcttccccattttaagagaataaacatgtgtctctgaggggaaaagaaaatgaaaacattctatcaaccagcacagcacactgaggaagagccaggtgcaagctcagggcaacaagacacgttttctcattctccttcactgccaccatcctttcccaacccctgcactccctctgtccccctccatccccattaaaaaacagcaacaaaccgctatgattaatgactaaagaataagagcaggtgtacaatctttatacattttagatttggatcaaattcactcttctcaattcctcttcctaaagccccaccaataatcctttgccatctgcccctcctcccctttcctttctgaggctgctaatgaaagtggggtggccaggactgaagaaggacttgagctggctgtctctgattgactcctagctatctcatgcccccgcttcctgctggcagaaagcaatgcaaagtgactgctgtaggagcagctgctgaagctcatttccctcccccgatgcctgtcacattcttgggcaatat

SEQ ID NO: 78 - DNA, 3000 bp, Homo sapiens
  misc_feature (1)..(3000): DMR1:90594901
gagacccaataaaccatacaaaggatcaatgaaaggaaaagttcgttatttgaaataataaacaagattgataaatcactagctagattaactgagagggagagagaaaagatccaaataagcacaatcagaaattacaaagatgacattacaactgatatcacagaaatataaaaggtcctcagagattactacgaacatgtctatgcacacaaaatagaaaacctagaggaaatggataaattcctggaaacacacaaactcccaagattgatccaggaagaaatcaaaatcctgaacagaccaataactagttacaaaattaaatcagtaataaaaaacctactaaccaaaagccctgggctacacagatccctagccaaattctatcagatgcaaaaagagctggtaccactcttactaaaactatttcaaaagattgaggagaagggatttcttcctaactcattctacaaaatcagtatcattttgataccaaaatctggcaaggaccaacggaaaaaaaaaaacaacttcagaccaatattcttgaggaacacagacacaaaaatcttcaacaaaatacagcaaatgtatgatgccaacaaaaaagttgctaccattgtttcaccttactgcctaaagagtttccacatacagcacaaaaaatgaaaccaggcagtgaccaacagtacgcctacactgaggaataagaattgggtggagattaaggtggctagaattcacatgacagaacagtagagtggaaaaagcagaagagagagaggaagagagagagagagagaaagaaagagagagagggaattctggagagctgcaaagggtcctacttgactatctgctgaatactgatcagcaaactcagagaaaaagaagaaaccactgaaagggattcacaggaacaacacctagggttcacacagggccaggtacagttcgtatttcatccgccaaagtgaaaaaccaaacaactcactgaacatcagctactgtgttcacaaggcttttgcctcagcagtacgaaaaacatgtttctaaagaaatgctgctctgatcataactaacaaagatcaaaagcaagacacattatatactacaggaagacaaaaacagcacacaaaaaggaaaaatcacaaagtctggcatcaaataaaaaattattatgtattcaaagaggaagaaaaatgtgacccataatgagcagaagcaattaaccaaaaccagccaaaaagtgacacaaagacagaattagtagacaaagctattaaaacttattataaactgtattttatgtggtcaggaggctagtagaaatattgagcatgttaatttgagattttgaagttaaaaaaatccatatcaaacttttaaaaatacaaactacagtctctgagatgaaaaatatattggattgaataaaagcagattagacattgcagaagaaaaagttagtgaacttgaaaatatacaagagaaattatccaaaataaaatacaaagagaaaaaaagagacaacttcaagtgacctaatttatgtgtaactggattgcctaatgggagtgagagataggaacacaagaaaatatttgaagaaataatggctgaacattttctaaattaatgaaaactataagcccaaagattgaagaggctcaatgcactccaagaaacatgaataaggctataccaagttacattaaaatcaaactgtttggctgggcacagtggctcatgcctgtaatcccagcactctggaaggctgaggcaggtggatcatgaggtcaggagatcgagaccatcctagctaacacagtgaaaccccgtctctactaaaaacacaaaaaaaattagccaggcatggtggcaggtgcctgtagtcccagcgactcaggaggctgaggcaggagaatggcatgaacccaggaggcggaggttgcagtgagccgagatcgcgccactgcactctagcctgggcaacagggcgagattctgtctcaaaaaaaaaaaaaaactgtttaaaactagcaataaaatctttaaaataatcagaaaaagacaagttacatgaataatcataagaatgacagcagacttcttattcaaaccaatgcaagccaagacaatggagaaacattttataaaataaaactttttttaaaccaatatgttacttggaaatctaggatttaacaactaaaagcattacttttcacagaagagtgctgaaaaaccttaaatttacaacattttctcactataaaatgatcaatagatgtaatgaagatgctttaataagctaaaaatctgaaactggcagattgtagtgtatggcctaaatttcatgtctgccttggcatctttaaggtcatagggccctaaactcttaagttaccctgctcttaccagatatgttcctcaccctgtggaaaaggcttcccactggctagttcctctatcagctgggccagctgcactccacttagtttcaacctaatgagtttcacctccctaccaacggcaaaattatttgcacaagtcaatcgcattctcacaggagccaggagtcacctcattctcttgtttccacaaagcttgcctctcagagcccctactgcttagttggcttccaagtgtgacccctgtggtatggccccctctagcatgctgtaccctccttcccaggactctgagtctaggtgactaataaactgctgtcagtttcttctgtccagtgtcaggcatcatgtttctggtcatcttatattatttaggttggggaatccttccttgctgacagagtgaataggagatgatcagaacatcagtatagattgcagctataatcaaattaaactaactttccatttatttctaaatgtgggttttttttccacagtgtgtacaaaatctttgcctgctataataagaaattgcaaatagtaaagtgtttataccggtttcccttataatatcagaaag

SEQ ID NO: 79 - DNA, 1200 bp, Homo sapiens
  misc_feature (1)..(1200): DMR1:91560201
cccaaactaccaccattcctccttaggggaaatcatgtctgctctgtctttagtaccacaaacaccttgattaaactaaggatgtgtggttttactcctcctcaccacccctacccgcccccacccctccgcacccggcccctagaaaagaaaaccaatgcagctaaagtaaattgctccatgcctcaccaaaatgtcaacctgtcaggtaggctcagattatcgtcccagggttaagcctggctagatttgggctgcaggggctcctgggagtactggctaactaggcccctctgagggctcctgcatcctgtacttgaaatcaatcacaaacctttaacttcctgctttccattctcttccttctctcttcaagttcagtttaaataaaattactctgctgagagatctttaaaaaaaaaaaaccagacaaaaaaaagcatcaggctgggcacagtggctcatgcctgtaatcccagcactttgggaggccagcgcaggaggttcacttgatgccaggagtttgagacctgcctggacaacataaggagactctatctctacaaaaaatttaaaaattagctgggtgtggtggcacatgcctgtagtcccagctacatgagagtctgaggtaggaggatcacttgagcctgagaggtcaaggcttcagtgagccatgatcacagctctgcactccagcccgggtgacagagcgagatctgttatcagaaaaaaaaaaaaaaaaaaaaaaaaaggccgggcgtggtggctcacgcctgtaatcctagcactttgggaggccgaggcaggcggatcacgaggtcaggagatcgagaccatcttggctaacacggtgaaaccccatctctactaaaaaaatacaaaaaattagccgggcatagtggcgggcgcctgtagtcccagccactcaggaggctgaggcaggagaatggcgtgaacctgggaggcggagcttgcagtgagccgagatcgcgccactgcactccagcctgggtgacagagcgagactccgtctcaaaaaaaaaaaaaaaaaaacaaaaccaaaccaaaacaaaacaaaacaaaaaaaaaaaaacaaaaaaaaaccccatcaagtagaaacacccctcaccaggtccttcttacagatactcccacccctttccttccatatcaatgtgtgcccttacctagcttctt

SEQ ID NO: 80 - DNA, 200 bp, Homo sapiens
  misc_feature (1)..(200): DMR1:93294901
tgtaattcttgcactttgagaagctgaggtgggaggatcatttgagcccagcaatttgagaccagcttgggcaacatagtgagaccccatctctaaaacgaacaaaaacaaattaagtctcatatacaccataaacatatacacctactatgtaccccacacaacttaaaaattaaaagttaaaaaaacagagaaagtta

SEQ ID NO: 81 - DNA, 100 bp, Homo sapiens
  misc_feature (1)..(100): DMR1:95389801
aggccaaatagtattctgttgtgaatttataccacattaaaaaaatccattaatcaattgatgggcattttggttgttttcatatcttgggtattgtgca

SEQ ID NO: 82 - DNA, 100 bp, Homo sapiens
  misc_feature (1)..(100): DMR1:99008401
ttgctcagaagaaggattgggtagctcaaaagaaggcaagcttcctcagagcttaggagcgggctgctgagagccaaaccaaacaattttctatgatgat

SEQ ID NO: 83 - DNA, 1000 bp, Homo sapiens
  misc_feature (1)..(1000): DMR1:99556001
acactagaaatacatataattaaacattaataaagttgggaaacacacacacacacgcatacacacatacaactagggaatattgaagccatgatttcacccaatgctctttatcattacatactactgtatctccatgtttttcattgggaatttgacttccatcaccagccccagtttcagccccgctgccagcctactagttctaccctagaagcaaacagaagttactgaacataacagagagaactaactagatgaagttatgtagcaagttggttaagaattagactgccaactccattttactcctattttacctgggccatttgtttagccttcttgtgtttgattttctcgtctgtaaaatggaaatgatgataatgacatctacttgcacagctattgtaaggattaaatgagataatcctcataaaacatttagtgtctgccacttacatcatttatttgtgttaacacacaaaggctacctttttaagctttgtattccttgtgcctacttaatgcttggcttatggcaggttctagataattgtttgatgcattcatgacaacaaggtattcattatcaaagaagtgtttgattcattatcaaagaagtgtaatcccacatcacaaccaggtttcatagaaaatgtagtcagagaaattattaaggtcagatattgagttacctaaaggagaaatagcagatacaagcaaaataaacatgaccactggggctaagagcaaaatctaggtcaaagctggtaaaagctaagggaatagaagcagggcattggaatatgggtgcatgcaccagattataaaaggcgacttgtctgccattcttcttcccttcctactgtaaacaaacatttgctggctattttccatgtatccagtactgtactaggctctgagaatacaagtaataaggccattggaattacttgatttgcctatttccttgtcatgcttatttgaactgcaaagcaga

SEQ ID NO: 84 - DNA, 100 bp, Homo sapiens
  misc_feature (1)..(100): DMR1:100163501
ctgtgggccttacctataaaatgtgaggttataattaaatgatatctatgtattttccagcttaaatattctataattcctatacagctttttctaaaaa

SEQ ID NO: 85 - DNA, 200 bp, Homo sapiens
  misc_feature (1)..(200): DMR1:100597701
gttttcttcctcctaaaattcatattctggtggccaagacagctaataaataataaaaccataaaatgtaactttaatcaatgataagtgctgtcaagtgagataaggctggataaggggatggaggatggagggtgaggggtattttttttataacgcatcagagaaggctcttctgatgatgttacgttgaacaggct

SEQ ID NO: 86 - DNA, 1200 bp, Homo sapiens
  misc_feature (1)..(1200): DMR1:103745701
cttatacaatgctccacatacttgaagggttagaaaggcatatcaagaatcagtatagatgtttacaatcttaggttcactgagttccagagcccgagttagaggaatgagttctgctttttgggctgaagtgctctgaggcaatggcttagcttcaacaacatcatctaagtttactactgcatatcctgcacacctttctctttgcgggttgatgaagctgcttctgtccatgtagaactcctaatctaccaatgcctatggctggtctcaaagatctggtctgctagaatagacatagtccaacacctctacacagttatgtttaacagggctgtctgatactgggagcaaagtggcaggatttaaagaattacagacttctatggttatacattgattttcacataacaagctttggtgtttagttaatgtagcatttgttagccaatggtgtcttttggtgttccttagagttacattagagtcagcttgggctgacataagtttttcttttaacttataagtcttgttgttgtagagacctctatttaaaaggctctcggtcaccccctttataactccattcaatgctttggctaacaccacaaagtttggaatctgcagtctgcaaaaatctcacagctcctaaatgttctcttatttgcctcctggttttaggttctggtaagctgcagatgacctgctttcttgctgaccatagactgcactccccttttcaaatagtgaatcctaggtagtgtacctgctgtctgcagatctgagctttctttttgggcactttatatccacagtcctccaggtgtcgaagcagggcacccgtcctttttgcacacctgactgccatggagtgtcctagcagaaggtcatctacatactggagcaggatgcaacctaggtctttagcaggaaacatttggaggtctccaaccgaggcctcccgaaagatggtgggggactttttgaacctttgggaaagtcgagtctaagtgtactgaatggtgacatctgactccggatcttcctactgaaaggcaaacagcttttggctctcaggaactagcctgatgtgaagaaggcatctttcaagtcctgtacgggtcgatagtctttggtccttggtttagggacaggtaggaggtgggtgttccatggagactggcaaggaactagaattcc

SEQ ID NO: 87 - DNA, 500 bp, Homo sapiens
  misc_feature (1)..(500): DMR1:104305701
gccataataaaaactctcccagtaaaggaaattccacaatcagatggcttcactgctgaattctaccaaatatttaagaactaatatcaatcatactaaagatgtaccaaaaaaaaaaatagaggaagagggaatacttccaactcatttaacttggccaatagtaccctgatataaaaaaaaggacaaagacacatcaaaaaaaaaaaaaaaaaaaggccaatgtcactaataaatactagtgcagaaatcctcaatgaaatactaacaaaccttattcaagaataccttaaaaaaattcatcatgatcaagtgggacttgtcccagtgatgcaaggatggttcaatatatgcaaatcaatgacatattactggaagttctagctagagtaatcagactaaataaataaacaaaaggacatccaaattggaaagaagaagtcaaattacccttgtttacagatgatatgattgtatatttgcaaaaacctaaagttctc

SEQ ID NO: 88 - DNA, 2200 bp, Homo sapiens
  misc_feature (1)..(2200): DMR1:104773501
gttatgtacccagtagtcattcaggagcaggttgttcagtttccatgtagttgagcggctttgagtgagattcttaatcctgagttctagtttgattgcactgtggtctgagagatagtttgttataatttctgttcttttacatttgctgaggagagctttacttccaactatgtgatcaattttggaataggtgtggtgtggtgctgaaaaaaatgtatattctgttgatttggggtggagagttctgtagatgtctattaggtctgcttggtgcagggctgagttcaattcctgggtatccttgttgactttctgtctcgttgatctgtctaatgttgacagtggggtgttaaagtctcccattattaatgtgtgggagtctaagtctctttgtaggtcactcaggacttgctttatgaatctgggtgctcctgtattgggtgcataaatatttaggatagttagctcctcttgttgaattgatccctttaccattatgtaatggccttctttgtctcttttgatctttgttggtttaaagtctgttttatcagagactaggattgcaacccctgcctttttttgttttccattggcttggtagatcttcctccatccttttattttgagcctatgtgtgtctctgcacgtgagatgggtttcctgaatacagcacactgatgggtcttgactctttatccaacttgccagtctgtgtcttttaattgcagaatttagtccatttatatttaaagttaatattgttatgtgtgaatttgatcctgtcgttatgatgttagctggtgattttgctcgttagttgatgcagtttcttcctagtctcgatggtctttacattttggcatgattttgcagtggctggtaccggttgttcctttccatgtttagcgcttccttcaggagctcttttagggcaggcctggtggtgacaaaatctctcagcatttgcttgtctataaagtattttatttctccttcacttatgaagcttagtttggctggatatgaaattctgggttgaaaattcttttctttaagaatgttgaatattggcccccactctcttctggcttgtagggtttctgccgagagatccgctgttagtctgatgggctttcctttgagggtaacccgacctttctctctggctgcccttaacattttttccttcatttcaactttggtgaatctgacaattatgtgtcttggagttgctcttctcgaggagtatctttgtggcgttctctgtatttcctgaatctgaacgttggcctgccttgctagattggggaagttctcctggataatatcctgcagagtgttttccaacttggttccattctccacatcactttcaggtacaccaatcagacgtagatttggtcttttcacatagtcccatatttcttggaggctttgctcatttctttttattcttttttctctaaacttcccttctcgcttcatttcattcatttcatcttccattgctgataccctttcttccagttgatcgcatcggctcctgaggcttctgcattcttcacgtagttctcgagccttggttttcagctccatcagctcctttaagcacttctctgtattggttattctagttatacattcttctaaatttttttcaaagttttcaacttctttgcctttggtttgaatgtcctcccgtagctcagagtaatttgatcgtctgaagccttcttctctcagctggtcaaaatcattctccatccagctttgttctgttgctggtgaggaactgcgttcctttggaggaggagaggcgctctgcgttttagagtttccagtttttctgttctgttttttccccatctttgtggttttatctactttttgtctttgatgatggtgatgtacagatgggttttcggtgtagatgtcctttctggttgttagttttccttctaacagacaggaccctcagctgcaggtctgttggaataccctgctgtgtgaggtgtcagtgtgcccctgctggggggtgcctcccagttaggctgctcgggggtcaggggtcagggacccacttgaggaggcagtctgcccgttctcagatctccagctgcgtgctgggagaaccactgctctcttcaaagctgtcagacagggacacttaagtctgcagaggttactgctgtct

SEQ ID NO: 89 - DNA, 2500 bp, Homo sapiens
  misc_feature (1)..(2500): DMR1:104846301
ttttggttgtgtctctgcccggctttggtatcagaatgatgctggcctcataaaatgagttagggaggattccctctttttctattgattggaatagtttcagaaggaatggtaccagttcctccttgtacctctggtagaattcggctgtgaatccatctggtcctggactctttttggttggtaaactattgattattgccacaatttcagagcctgttattggtctattcagagattcaacttcttcctggtttagtcttgggagagtgtatgtgtcgaggaatgtatccatttcttctagattttctagtttatttgcgtagaggtgtttgtagtattctctgatggtagtttgtatttctgtgggatcggtgctgatatcccctttatcattttttattgtgtctatttgattcttctctctttttttctttattagtcttgctagcggtctatcaattttgttgatcctttcaaaaaaccagctcctggattcattgattttttgaagggttttttgtgtctctatttccttcagttctgctctgattttagttatttcttgccttctgctagcttttgaatgtgtttgctcttgcttttctatttcttctaattgtgatgttagggtgtcaattttggatctttcctgctttctcttttaggcatttagtgctataaatttccctctacacactgctttgaatgcgtcccagagattctggtatgtggtgtctttgttctcgttggtttcaaagaacatctttatttctgccttcatttcgttatgtacccagtagtcattcaggagcaggttgttcagtttccatgtagttgagcggctttgagtgagattcttaatcctgagttctagtttgattgcactgtggtctgagagatagtttgttataatttctgttcttttacatttgctgaggagagctttacttccaactatgtggtcaattttggaataggtgtggtgtggtgctgaaaaaaatgtatattctgttgatttggggtggagagttctgtagatgtctattaggtctgcttggtgcagagctgagttcaattcctgggtatccttgttgactttctgtctcgttgatctgtctaatgttgacagtggggtgttaaagtctcccattattaatgtgtgggagtctaagtctctttgtaggtcactcaggacttgctttatgaatctgggtgctcctgtattgggtgcataaatatttaggatagttagctcctcttgttgaattgatccctttaccattatgtaatggccctctttgtctcttttgatctttgttggtttaaagtctgttttatcagagactaggattgcaacccctgcctttttttgttttccattggcttggtagatcttcctccatccttttattttgagcctatgtgtgtctctgcacgtgagatgggtttcctgaatacagcacactgatgggtcttgactctttatccaacttgccagtctgtgtcttttaattgcagaatttagtccatttatatttaaagttaatattgttatgtgtgaatttgatcctgtcattatgatgttagctggtgattttgctcgttagttgatgcagtttcttcctagtctcgatggtctttacattttggcatgattttgcagtggctggtaccagttgttcctttccatgtttagcgcttccttcaggagctcttttagggtaggcctggtggtgacaaaatctctcagcatttgcttgtctataaagtattttctttctccttcacttatgaagcttagtttggctggaaatgaaattctgggttgaaaattcttttctttaagaatgttgaatattggcccccactctcttctggcttgtagggtttctgccgagaggtccgctgttagtctgatgggcttccctttgagggtaacccgacctttctctctggctgcccttaacattttttccttcatttcaactttggtgaatctgacaattatgtgtcttggagttgctcttctcgaggagtatctttgtggcgttctctgtatttcctgaatctgaacgttggcctgccttgctagattggggaagttctcctggataatatcctgcagagtgttttccaacttggttccattctccacatcactttcaggtacaccaatcagacgtagatttggtcttttcacatagtcccatatttcttggaggctttgctcatttctttttattcttttttctctaaacttcccttctcgcttcatttcattcatttcatcttccattgctgataccctttcttccagttgatcgcatcagctcctgaggcttctgcattcttcacgtagttcttgagccttggttttcagctccatcagctcctttaagcacttctctgtattggttattctagttatacattcttctaaatttttttcaaagttttcaacttctttgcctttggtttgaatgtcctcccgtagctc

SEQ ID NO: 90 - DNA, 100 bp, Homo sapiens
  misc_feature (1)..(100): DMR1:105502001
gctgtgttgcccaggttggtcttgaacccatgacccctccccagtaatctgtccatgtgggcctctcatagtgctggaattataggtatgaggcactgtt

SEQ ID NO: 91 - DNA, 2100 bp, Homo sapiens
  misc_feature (1)..(2100): DMR1:106400501
attatttttaaattaattcttcctatagattgatttattcaagtttaaacagcaaagacattagttaggcacaaatgcattttttctcattcttattcagttcaacccatttttgatgggagaatcatctattttctcctaattctgggttttctgagacagattgcttatcttatacagactttccaaaaatagggctttcttgaacctcaacactgctattctgccagtgtgtgcacacagcaaatagagacacatttataatgtaagccaaatgaatatataattatgaatgaaaatttggtgagaaagaaataactatatttgaaaaacatatatatatatatatatacacatatacataatacatacccagttaatattatacccaagctccactgttaagtccatactagaattatttcagataagtccgaaagtttccatatagaaatagctggactgaaataccaaacacacctatattttgggtttcccttgctattagtccattctcacactgctgtgaagtgtcacctgagactaggtaattcatgaataaaagatgtttgcttgactcacagttccacaggctgtacaggacgcacggctgtgaggcctcaggaaacttaaaatcatggcagaaggcaaaggggaagcaggcacatctttgcatggtggcaggagagaaaaagagaaggggaagtgctacacactttcaaacaaccagatcttgtgagaactcactatcaagagaactgcaagggggaaatccacccccatgatccaatcacctcccaccaggtctctcccccaacattgtggattacaattcaacatgagatttcggtggggacacagagccaaacaatatcaccctctaaaagccaattgtataagctagtctttaaacaactctagatcttactttgcttatttgtaaaatgaaggatctgagacacacaatgtttaagttttcttctagttctaaaattcttggatgtcagagtgggagaaaatcttcacaattacagtctgacaaaggactaatatccagaatctacaacacactcaaacaaatcagtcaaaaacaaacaaacaaacaaacaatcatatctaaaagtgggctaagaacatgaataaacaattctcaaaagaagatatacaaatggccaaaaaacatatgaaaaaaatgctcaacatcactaatgatcagagaaatgcaaatcaaaaccacaatgtgatattcctgcaagaatggtcataaccaaaaaattttaaaatgtagatgttgacacggatgcagtgatcagggaacactgctacactgctggtgggaatgtaaactagtatagccactactgaaagcagtatggagattccttaaagaactaaaagtagaactacaatttggtccagcagtccaactactgggtactttacccagaggaaaagaagtcattgctcaaaaaagatacttgcacacgcatgtttattgtagcacaattcacaattgcaaaatcacggaaccaacccaaatgcccatcaatcaacgagtggataaagaaactatggtgtgtgtatatatatatgtgtgtgtatatatatatgtgtgtgtgtatatatatatatataatacctatatatataaaatacctatatatatatatgatggaattatatatatatatatgatggaattatatatatatgatggaattatatatatatatatatgatggaattatatatatatatatgatggaatactattcagccataaaaaggaaagaattaatagcatttgcagtgacctggatgaaattggagactattattctaagtgaagtaactcaggaatggaaaaccaaacatcgtatgctctcattgatatgtgggagctaagctatgaggacgcaaaggcattaagaatgatacaatggactttggggacttgggtggaagagttggaaggggacaagggataaacgactacaaatatggttgggtgtatagtgcttgggtgatgggtgcaccaaaatctcacaaatcaccactgaagaacttactcatgtaaccaagtactgcatgtaccccaat

SEQ ID NO: 92 - DNA, 2100 bp, Homo sapiens
  misc_feature (1)..(2100): DMR1:106966201
actatgatgagatcaaaaacatttccttagtggtgttcttaataaccctatgaggtatggattattgttctcattttataaattacctgttcaaagtcccatagctaggctccagtttaaaaccaagtcggccggaatcctaaatattttcactgcaccttgcttctttgttccccaaaaaaataatctctgtgacagaatgcacaacattcctttctttctgacccttcattcatattacagaggtgatcacttatgttacttgtgagcttttaactgttcttattgtttactctcctgcctcctaaaatcctttctctctaccacagccagagtaatatacttaaaatataaattatgtcacaccactgtcccaccttaaatcatacaggtttttcagtgcactcagaataaagtctaagttctttgcagtggccagcaaggcccactgtgatctgacctctgcctgccttcagaccagaccttatctctcacccttatccaccttcattaccacactcacacaggatagcccttttggttttcctaggctacaccaggctcattcctgtcacagggcttttgtatcttctctccttctgaaagtccactgttctgatagtcacatggctgatttattcttgccattgaggtctcaactcaaattttacctcctcagggaaactcctttgactcccaatttaagtatcaccctttccttgatccctatgcctccccaccatggtgtgctgagatatattctcatgtagccaagtcagatcttcacctagctaactcttctcatctaggcctcagcctaattgtcacttccttaggaaagctatccctaacactccagacaggggaggttcattacttatagattgtttaaaaaagaaaaaaactacactttgtatttgctaaacttataatcagtcaaatattgatatcttttaactaactggtattaccttatttatttatgtgatttcccaaacattaataagaatacaagctcattgagtagagctttatgggtctgtcttttgtactgaagtataaccagaaataaatagttctttttcatgaaatttagagtataggaaatggattttaaataattcaaagcatgatgaatattacaaaagagcaagcagagaacttggggcatgcacaatagacccattctagtctggatagaggagaagtcaagaaaagcctttcaatcaagtgatgattaagctcagaactgcaatataagtaggagttagccaggcatggtctggaaagcagggtgagatggcaagagaagactgtaagaatattccaggcatctagaaactcatgtgtatcctagaatccaccaccccagacctccactcactctgtcccattgccctgttctcttaatagaactcaccacctttcggaaatacatcattctcttggttgactgtctgtccctcaaaatcattaaaataaaatttccatgagggcagggactttgtcagtcttgctcaccactgttccatagtgctcagaacagtcactatcatttaggaagtgattgataagtaacttccaaatgactgtgtaaagatcctgaagcagtaaaggtaaaagcaaacaccaaaagaaaaacagcatgactatcacatgagatgggaggagatcatggcataagatgatgtgggcttggggacagaagggtaagcagagagctgaacttgtaagcatattaaggaggtcggactttatccaaaacaatgaaaatatattaagttttaagccagctctgttatataataaaatatgcaactttaaaacatcattcttattaaagcatagagaatggataggaaaagagcaaaactggaagaagagtagccaatactgggaaattttacagttgaccacatgagaaatgatagtctcctggaccaggagggaggccatggcaatagagaagagcaactggatttaaaagtatttaagtaataggattgaatttatataatgaataattggatgtagcaagtgagaagagagaagacagtgttgattcccaggcttgagccatagatgaacgatggggccatt

SEQ ID NO: 93 - DNA, 200 bp, Homo sapiens
  misc_feature (1)..(200): DMR1:112228401
tattattcagccatgaaaaaaggatgaaatcttgccatttgcagcaacatggatggaattggaggccactgtgttaagtaaaataagccaagcacataaaaataaatatcacatgttctcatttacatgtgggagctaaaaaagtggatgcatgaagatagagaacagattggtggttaccagggaaggggtagagggga

SEQ ID NO: 94 - DNA, 1000 bp, Homo sapiens
  misc_feature (1)..(1000): DMR1:113852901
gaaatatctagtttccttgggttttgatttttgctttttgttttgttttgtttttgaaacggactttcactcttgctgcccaggctggagtgcaacagcgcgatctcggctcactgcagcctctgtctcccgggttcaagcgattctcctgcctcagcctcctgagtagctgggataacaggcatgtgccaccaggcccggctaattttgtatttttagttgagacagggtttctccatgttggtcaggctggtcttgaactcccgacctcaggtgatctgcccacctcagcctcccaaagtgctgagattacaggcatgagccactgcaaccagccaagtttgcttggttttgattagaattgtcaactcagaatggcaacagtagaacagtgatatccagtaaaatataatgtgagccacatatgtgattttaaattttctttttctttcttttttttttttttttttgaggactttcacttttgttgcccaagctggagtacaatggcatgatcttggctcactgcaacctccacctcccaggttcaagtgattctcctgtctcagcctcccgagtagctggtattacaggcatgcgccaccacacctggctaattttgtatttttagtagagacagggtttcaccatgttggtcaggctggtctcgaactcccaactttaggtgatcagcctgcctcggcctcccaaagtgctgggattaccgtgtgagccaccatgcccggccaaaaatttctttcttttcctttatgtattttatttttatttttatttttttgagacggagtctctctctgtcacccaggctggagtacagtggctcaatctcagctcactgcaacctccgcctcccgggttcaagcaattctcctgcctcagcctcctgagtagctgggattacaggcacatgccaccatgcctggctaatttttttttgcttttttttttttttttttttttttgagacagagtctcgctc

SEQ ID NO: 95 - DNA, 1400 bp, Homo sapiens
  misc_feature (1)..(1400): DMR1:115495201
cttacacacaaagccatgccatgcccttagcagacctggcaccggcaaggttgaaggctacactgggcccttggagagctgcccaggtatgctgctcccagctttatctgaagagctgcccccaggtgtgctggtcctggcagggcctggggaaggggctgtgtgctcctggcagggtcacgtaggtatagaagggacaggctgggagagagctgatggtctgaggaaacacagagagggggattacaggtctttgctccaagacagggcagcaaaagtagtgtcaagactggaagtcttgcaaatcacaccaagataaaacagaccatcttattctttgtgtagcctctgaaccgggtctctagagtcaggtggttggcagaaaagtctctgggatcagatagatctttgagtgctccctctgcccattaacgcaatcttgggcaaatgacttaacctctctgagccccaatttcctcctcagtgaaacaggaataagaaaaccaaatatatagcaaatgagtattcctaacatcccaaagcctatcagatgcgcctgtttcacattctcatggcgtttgtacattctcgcacacatttacatgcataatttatttctgactcacccattaggctgagctcctaccccaccccacccagggcactgtggaaatagatctgttttgctcatcattatagccccagcgtctagcacagttcctggagcttagtaggtgctcatggaccaagagagtagcatataattcagcagcatagcacaagacagacctggatgcagtcggtgatggctgctattattgtcattattagagaggtgctgctctctgagaattatttccacaccctcacctcccacaatcagttctcctcgactgcctcttccttgcatctaagctcttcctatgggtgacccaaatgcccccagtagcaaagctagcccacttcctttcatttttgccctgggacagatgaggagcagtttctacactttcagggcttaaagaccccattgaggtcctccctaagtctctttctttccagagattaaaaacttctcaaattcttttattccttccttacaaaacatgtcccatgcttcttcaattaccctgtggtttctctggaggttttaagatcagtagccataagctcccctctccccaggtgcccagaaaccaaagggccttcagcccacaggagatgtgttattgggttcccctagttcccagcccagtctgatgctcctggctctgtccagaggccacaagcccacaggacaccccagcccgcctccagcttattggaagttctcctgtgccccaacctgctcagtctggtccccacttttaaggcagagtgtctagagttgtatgagatca

SEQ ID NO: 96 - DNA, 200 bp, Homo sapiens
  misc_feature (1)..(200): DMR1:115889901
tttcatgtacacgctctcccttcttggaccacatccaatgattcacacaatattaggaagggcttctttcatcaatggcttcttattactcttgaaataaaactaatattcctttttttttttttgagacagagttttactcttgttgcccaggctggagtgcaatggcactatcttggctcaccgcaaccttcgcctcc

SEQ ID NO: 97 - DNA, 500 bp, Homo sapiens
  misc_feature (1)..(500): DMR1:117715801
cggtgttgtttttggggcggagacagtggaagtgagaccagccttttgggctgcatgggagctgggtgagtgctgtaactgctggcttcccctcacttccctggtgacctgcatgatgcagcagaggctcccataatccacctgggaacataactccattggcctgagaaccacaccccattccccagagcagcctcggtaagcctcacccaaggagagtctgagctcagacacacctaaccctgaacccatgatatggtttggctgtgtccccacgcaaatctcatcttgaattcccacgtgctgtggagggacccagtgaaaggtaattgaatcatggggctgttctcgtgatagtgaataagtctcatgagatctgacggttttataagggggaggttccctgcacaagctctctctttgcctgctgccatccatgtaagatgtgacttgctcctccttgccttccaccatgattgtgaggcttccccagccatgtg

SEQ ID NO: 98 - DNA, 200 bp, Homo sapiens
  misc_feature (1)..(200): DMR1:117889201
cttaaaaaattattttctttgacaaataatgtatgtaatgtattgatatacggatacattgtaaaatggctgaatcaagctaatgaacatatccattatctcacatatttatcatttttttttggtgagaacagttaaaatgtattcttttatcaattttcgggtatacaacacattcttattaactacagtcaccgtat

SEQ ID NO: 99 - DNA, 700 bp, Homo sapiens
  misc_feature (1)..(700): DMR1:119724901
caccctattgggaaggaatgcgttcgtttcatcagactgttcctagcagggaggacggtaggagagtgtgggtgcctatatgtagactctacaggattgggcaatgtgggtggagagcaggcgtggctgggcctcacagtagggactttgagcagatggcgggggctcctgaggtgcagaagaacagcacacagaaaggaaggaaggagagaatcaacaaatgtaggtttcaccatttttgcctgctttaccatctcctcctctagtaagtcaggccagcaaccatttaattattgtgaggaccctcgcccacattagagtcctctccagtctggcctgatgaggattccaaagcattgaaacctggagaggctccatgatcagctgggagcagcagccagagaaaagggttagggatttcttgtgttctgtggtgccgcacgcatacatcttagatagcactgtggagtctggtgggaagaaaataggatgtgagggagaggagagaggggccaggtggggctctgtctcactaggtcaaaggcattttatcaggcaagctttcccaagaagtgaacagttcctcaaggcaagtccctgtccttattacctgcctgatgggtcagagcagtgaggtgaatgcagcttgtcccccatgtggcttggtactgaagttcttctgagtttacccataagatcg

SEQ ID NO: 100 - DNA, 2600 bp, Homo sapiens
  misc_feature (1)..(2600): DMR1:120838201
caaccaagcctgaattattcctactaacattgctgttggttttcattgcagtagatatttaggtttccatttcttcctccccttctcatttactaacctactgtaggtggaccagacttcaaaaactgtattctcatggcgactgcatggaaacttgagcacattttatggaaaattattgagcacagtcttttcatgatccctgtatgctgtgtgtcctgagggcactaactcagagtgtcctgttactccctcatcagtgtgtcacctggacaattcactgagctcgttctctctctctctctctctgtgtgtgtgtgtgtgtgtgtgtgtgtgtgtgtgtgtgtctatctgtctttctctttcattcttttccatttggccctgttctgtcccaacatgaaggcaataatttgttacctcattaatggatctatccttttagttttttaaccacttccctatgctacccatgaaacctagttggggctctgttgtgtctgatttcccctggcttattctttactttttcctccttttccaggctcagcagggagctgctggaggtagtagagcctgaagtcttgcaggactcactggatagatgttattcaactccttccagttgtcttgaacagcctgactcctgccagccctatggaagttccttttatgcattggaggaaaaacatgttggcttttctcttgacgtgggaggtgagtacctttctatgaaggtgataaggatccactgagtcttccatataaagatcatattcctgctccaagtggccattactgagctgagagatgtcattgccacagggaggacctatacgcacatgtaggttgaatgaaactctagttctacctggaagcccagacaagggatgggtcagtgagcaagactctcttcctagtctcaggccatacctgtggcgccctgatcctattctcatgacattggacctgggcagatgtgacaaattcagagaactatgattttgactcaagggtttgtagatttcctttttcactctaatttcagtgtctaaagtcctcacaaccatgaacaatctgactatttgatgagacagggctaaatattgcagtttttctcctagaaatcatttgagggtatttgctttaagttgattgtaaaaatatggcataactgtttgcacaaatttgggacaaatgatattgggataacgatctactagaatagggacattttacccacagtttctgggagaaaaaccgaggaatttctatcatgaccagccttcaggcctcctgaaatatatctctcacagtgtcctattcttatgctgaggagcctgaggtccctgtgtgaggattagacagtggattgttatgtgtgtaggggaatcagcttaatgtgtctgtccatgtctgaatttattgcagaaattgaaaagaaggggaaggggaagaaaagaaggggaagaagatcaaagaaggaaagaagaaggggaagaaaagaaggggaagaagatcaaaacccaccatgccccaggtgactttcagcaattgtggatgcttaattctgtgttaacacctggaggcaacagattcagggaaaccagagtgtgtttgatgtcatgttttcaacgaaggctgaattactcctactgtcattgctgttggttttcattgcagtagatgtttaggtttccatttcttcctccccttatcatttactaacgtaccacaggttgaccatacttcaaaagttgtactctcatggccactgcatcgaattttgagcatattttatggaaaactattgagctcactcttttcatgatcacagtttgctgtgtgtcatgagggcactaactcagagtgtcctttgactcccttaccagtatgtcacctggccaattcactaggtcactttctctctgtctctgtctctgtctctctctctgtctttctctttcattgttttctacctggccctgttctatcccaacataaaggcaataaattttttttttacctcattaatggatctatcctttttcttttctaaccacttccttatgttacttctgaaatctagtggggctctgtggtgtccgattttccctggctgcttctttagttttgtctccttttgcaggctcaacagcatgctgatggaagtggaagagcctgaagtcttgcaggactcactggatatatgttattcgactccgtcaatgtactttgaactacctgactcattccagcactacagaagtgtgttttactcatttgaggaagagcatatcagcttcgccctttacgtggacaataggttttttactttgacggtgacaagtctccacctggtgttccagatgggagtcatattcccacaataagcagcccttactaagccgagaggtgtcattcctgcaggcaggacctataggcacgtgaagatttgaatgaaagtacagttccatttggaagcccagacataggatggttcagtgggcatggctctattcctattctcaaaccatgccagtggcaacctgtgctcagtctgaagacaatggacccacgttaggtgtgacacgttcaca

SEQ ID NO: 101 - DNA, 2400 bp, Homo sapiens
  misc_feature (1)..(2400): DMR1:122309901
aggcttgtgttcaactcccagagtataacattgcttttcatagagcagttttgaaacattcttttcgtagagtctccaagtggacatttggagcgctttcaggcctgtggtggaaaaggaaatatcttcacataaaaactagagagaagcattgtcagaaacttctttgtgatgattgcattcaactcacggagttgaagattccttttgatacagcaggttggaaacactctttcggtggaatctgcaagcggatatgtggacctctttgaacatttcgatggaaaagggataatcttcccatgaaagctaaacggaagcatgctcaggagcttctttgtgatgtttgcattcaactcacagagttgtactttccttttgatagagcagctttgaaaccctctctttctagcatctgcaaggggacatttggagggcttcgaggcctggggtggaaaaggaaatatctgctcattaaagctacatgcaagcattctcagaaactgctttgtgatgattgcattcaagtcacagagttgaacattccctttgatagagccgtttggaaacacacttttggtagaatctgaaaggggagatttggaccgctttgaggcctatggcagcagaggatataactgcccataaaaactagacagtagcattcccaggaaacactttgtgacgattgagttcaactcacagagctgaacattcctttggatggagcagtttcaaaacacactttctgtagaatctgcaagtggatatttggacctctctgaggatttcgttggatacgggagaaaactcacctatctaaacagaagcattctcagaaccttcttcgtgatgcttgcattcaactcacagtgttgaacctttctctgatagttcaggtttgaaacactccttctgcagaatctgcaagtggagatttggacctctttgaggcctatcgtcgtaaaggaaataacttcatcctaaaacaagacagaagcattctcagaaaattctttgtgatgattgagtttaactcacagagctgagcatatcttttgatggagcactttcaaaacacactttgtgtagaatatgcaagtggatatttgtacttctctgagaatttcgttggaaacgggataaaactcacataactgaagagaaacattcccagaacttctttgtgatgttggcattcaactgacagagttgaaccttcccttgtgagttcaggttgaaacgcccttttcgtagtatctgcaagtggagatttggaacgctttgaggcctacggtagtaaaggaaacagcttcatgtaaaaactggacagaagcattctcagaaaatactttgtgatgattgagtttaactcacagagctgaacatgcctttgggtggagcagtttggaaacacactttttgcagaatctgcaggtggatatttggacctctctgaggatttcgttggaaacgggataacgtcacctaactaaacagaagctttcgcagaaacatctttctgacgtttgcattcaaagtccagagttgaaccttcctttgatagttcacgtttgaaacactcttgttggaggacctgcaagtggatatttggagcactttgtggccttcgttcgaaacgggtatatcttcacataaaatctagacagaagccttctcagaaacttctctgtgatgactgcattcaactcacagagttgaacattccttttgatagagcagttttgaaactctctttttctagcatctgcaaatggataggtggaagtctgtgaagatttctttggaaacgggaatatcttcacgtaaaaagtaaacagaagcattctcagaaactcctttgtgaggcttgtgttcaactcccagagtataacattgcttttcatagagcagttttgaaacattcttttcgtagagtctccaagtggacatttggagcgctttcaggcctgtggtggaaaaggaaatatcttcacataaaaactagagagaagcgttgtcagaaacttctttgtgatgattgcattcaactcacggagttgacgattccttttgatacagcagtttggaaacactctttcggtggaatctgcaagcggatatgtggacctctttgaacatttcgatggaaaagggataatcttcccatgaaagctaaacggaagcatgctcaggagcttctttgtgatgtttgcattcaactcacagagttgtactttccttttgatagagcagctttgaaaccctctctttctagcatctgcaaggggacatttggagggcttcgaggcctggggtggaaaaggaaatatctgctcataaaagctacatggaagcattctcagaaactgctttgtgatgattgcattcaagtcacag

SEQ ID NO: 102 - DNA, 700 bp, Homo sapiens
  misc_feature (1)..(700): DMR1:125085001
ttccattcgatgatgattcgaatggattccatttgatttctccattcgattacattcattgatgattccattcgctcccaatacattattattccattagattccattcgatgatgattccattcgataccattcgatgacgattccattcgatcccattaaatgattccattcgattccattcgatgattccattcgactccattcgatgattattccattcgagttaattcaatgactccattcaaaaccattcgatgatgatttcattcgagtccattcattgattccattccagtccatttgatgattcctttcaattccttttgatgatgattacattctagtccattcaatgattccatttgattccattcgttgatgattccatttgagggcattcgatgattccatttgatttcatttgatgacgatgccatttgattgcatttgatgattccattctattccatttgatgatgattccatcatcatccacccatctgccacgggtggcagaaagccgcggcgggcaaatgccacgcctgcgaggggggcacaaatccgcggcggcgggtggtaaaaagccgcggcgggcaacaagccgaggcggggtgggggcaaaaagtcgcagcggcgggggctaaaaagccgcggcggcagggggcaaaaagccgccgcggcgtgggcaaaaagccgc

SEQ ID NO: 103 - DNA, 6800 bp, Homo sapiens
  misc_feature (1)..(6800): DMR1:143268301
gaatcagatggaatcaacatcaaatggaatcgaatagaattagggaatgatatccaatgtgatcatcatggaatggactcgaatggaatcatcatccaatggaaactaatggaatcaacatcgaatggaatcgaatggaaacaccatctaattcagaagaatggaattatcatgaaattgaaatggatggactcatcatcgaatggattcgaatggaatcatcgaatgaaattgattgaaatcatcatcaaatggaatcgaatgcaatcattgaatggaatcgaatggaatcatcatcagatggaaatgaatggaatcgtcatagaatggaatcgaatggattcattgaatggaatcagatggaatcatcgaatggacttgaatggaatcattgaatggactcgaatggaatcattactgaatggaattgaatggaatcatcgaatggtctcgaatggaatcattatcaaatggaatcgaatggaatcaccgaatataatcgaatggaacaatcatcgaatggactcagatggaattatcctcaaatggaatcgaatgaaattatcgaatgcaatcgaatggaattatcgaatgcaatcgaacagaatcatcaaatggactcgaaaggaatcatcgaattgaatggaatagaatagtcaatgaactcgaatggaatcatcattgaatggaatcgaatgtaatcatcgagtggagtcgaatggaatcatgatcaaatggaatcgaaagtattcatcatcaaatagaatcaaaaataaccatcataaattggtattgaaaggaattgacatcaaatggaatacaaaggtatcatcatcaaatggcaccgaatggaatcctcatagaatggaaatgaaaggagtcatcatctaatggaatcgcatggaaacatcatcaaatggaatcgaatggaatcatcatcaaatgcaactgaatggaatcctcaattaatggaaatgaaaggagttatcatctaatggaatcgcatggaatcatcatcaaatggaatcgaatggaatcatcatcaaagggaatctaatggaatcattgaacggaattgactggaatcgtcatcgaatgaattcaatgcaatcatcgaatggtctcgaaaggagtcattttcatatggaatggaatggaatcatcgcatagaatcgaatggaattatcatcgaatggattcgaatggaatcacctaatggaatggaaaggaataatccatggactcgaatgaaatcgtcatcgaatggaatcgaatggaatcatcgaatggactcgaatggaataatcattgaacggaatcgaatggaatcatcatcggatggaaacgaatggaatcatcatcgaatggaatcgaatgcaatcattaaatggaatcatatggaatcatcatcaaacggaaactaatagaatcatggaatgtaatacaaagtgatcatcatcgaatggactcgaatggaatcatcatccaatggaaactaatggaatcaacatcgaatggaatcgaatggaaacaccatcgaattgtaacgaatggaaatatcatgaaattgaaatggatggactcatcatcgaatggattcgaatggaatcatcgaatgaaattgattgaaatcatcatcaaatgaaatcgaatggaatcattgaatggaattgaatggaatcatcatcagatggaaatgcatggaatcatcatagaatggaatcgaatggattcatcaaatgaaatcagatggaatcatcgaatggacttgaatggaatctgtgaatggactcgaatggaatcattattgaatggaattgaatggaatcatcgaatgttctcgaatggaatcattatcaaatggaatcgaatggaatcaccgaatagaatcgaatggaacaatcatcgaatggactcaaatggaattatcctgaaatggaatcaaatggaattatcgaatgcaatcgaatggaattatcgaatgcaatcgaatagaatcttcgaatggactcgaatggaataatcgaatggaatggaatggaatagtcaatgaactcgaatggaatcatcattgaatggaatcgaatggaatcatgaccaaatggaatcgaatgtaatcatcatcaaatggaatcaaaaataaccatcatcaatcggtattgaatggaactgtcatcaaaaggaattcaaaggaatcatcatcaaatggaaccgaatggaatcctcattgaatggaaatgaaaggagtcatcatctaatggaaacgcatggaatcatcatccaatggaaccgaatgaaatcatcatcaaatggaaccgaatggaatcctcactgaatggaaatgaaaggagtcatcatctaatggaatcgcatggaatcatcatcaaatggaatcgaatggaatcatcatcaaatggaatctaatggaatcattgaacagaattgaatggaatcgtcatcgaataaattgaatgcaatcatcgaatggtctcgaatggaatcatcttgaaatggaaaggaatggaatcatcgcatagaatcgaacggaattaaaattgaatggactcgaatggaatcaacatcaaacggaatcaaacagaattatcgaatggaatcgaagagaatcatcgaatggactcgaatggaatcatataatggaatggaatggaataatccatggactccaatgcaatcaccatcgaataaaatcgaaaggagtcatcgaatggactcgaatggaataatcattgaacggaatcaaatggaatcatcatcggatggaaacgaatggaatcatcattgaatggaatcgaatggaatcatcgagtggagtcgaatggaatcatgatcaaatggaatcgaatgtaatcatcatcaaatggaatcaaaaataaccatcatcaattggtattgaatggaattgtcatcaaatggaattcaaaggaatcatcatcaaattgaatcgaaaggaatcatcatcaaatggattctaatggaattattcaacggaattgaatggaatcgtcatggaatgaattgtatgcaatcatcgaatggtctcgaatggaatcatctccaaatggaatggaatggaattatcgcatggaatcgaatggaattatcattgaatggactcgaatggaaccaaaatcaaaacgaatcaaacggaattatcgaatggaattgaagagaatcatcgaatggactcgaatggaatcatctaatggaatggaatggaatggaatcatccatggactcgaattcaatcatcatcgaatggaatcgaatggaatcatcgaatggacgcgaatggaataatcattgaacggaagcgaatggaatcatcatcggatggaaacgaatggaatcatcatcgaatggaatcgaatggaatcatcaaatggaatcagatggaatcatcatcaaatggaatcgaatagaattatggaatgaaatccaatgtgatcatcatcgaatggactcgaaaggaatcatcatcccatggaaactaatggaatcaacatcgaatggaatcgagtggaaacaccatcgaattgaaacgaatagaattatcatgaaattgaaatggatggactcatcatcgaatggatttgaatggaatcatcgaatgaaattgattgaaatcatcgtcaaatggaatcgaatggaatcattgaatgaattcgaatggaatcatcatcagatggaaacgaatggaatcatcatagaatggaattgaatggattcattgaatggaatcagatggaatcatcgaatggagttgaatggaaacattgaatggactcgaatggaatcatctaatggaatggaatggaataatccatggactcgaatgcaatcatcatcgattagaatcgaatggaataatcgaatggacccgaatggaataatcattgaacggaattgaatggaatcatcattggatggaaacgaatgtaatcatcatcgaatggaaatgagaggagtcatcatctaatggaatggcatggaatcatcatcaagtggaatctaatggaatcattgaacgtaattgaatggaatcctcatcgaataaatggaatgcaatcatcgaatggtctcgaatggaatcatcttcaaatggaaacgaatagaatcatcgcatagaatcgaatgcaattatcatcgaatggactcgaatgcaatcaacatcaaatggaatcaaacggaattatcgaatggaatcgaagagaatcatcgaataaactcgaatggaatcatctaatggaatggaatggaataatccatggattcgaatgcaatcatcatcgaatggaatcgaatggaatcgtcgaatggactcgaatggaataatcattgaacggaatcgaatggaatcatcatcgaatggaatcgaacggaatcatcaaatggaatcagatggaatcagcatcaaatcgaatcgaatagaattatggaatgaaatccaatgtgatcatcatcgaatggactcgaatggaattattgaatggaatggaatggaatagtcaatgaactcgaatggaatcgtcattgaatggaatcgaatggaattatcgagtggaaccgaatggaatcatgatcaaatggaatcgaatgtaatcatcgtcaaatggaatcaaaaataaccatcatcaatttgtattgtatggaattgtcatcaaattgaattcaaagaaatcatcatcaaatggaaccgaatggaatcctcattgaatggaaatgaaagaatcatcatctaatggaatcacatggaatcatcatcaaatggaatctaatggaatcattgaacggaattgaatggaatggtcatcgaatgaattgaatgcaatcatcgaatggtctcgaatggaatcatcttcaaatggaaattaatggaatcatcgcatagaatcgaatgcaattatcatcgaatggactctaatagaatcaacatcaaatgcaatcaaacggaattatcgaatgaattgaagagaatcatcgaatggactccaatggaatcatctactggaatggaattgaataatccatggattcgaatgcaatcatcatcgaatggaatcgaatggaatcgtcgaatggactcgaatggaataatcattgatcggaatctaatggaatcatcatcgaatggaatcgaatggaatcatcaaatggagtcagatggaagcatcatcaaatggaatcgaatagaattatggaatgaagtccaatgtgatcatcatcgaatggactcgaatggaatcatcattgaatggaatcgaatggaatcattgagtggaatcgaatggaatcatgatcaaatggaatcgaatgtagtcatcttcaaatggaatcaaaaataaccatcatcaattggtattgaatggaattgtcatcaaatggaattcaaaggaattgttatccaatggaaccgaatggaatcctcattgaatggaaatgaaaggagtcatcatctattggaaacgcatggaatcatcatcaaatggaatcgaatggaatcatcatcaaatggaatctaatggaatcattgaacggaattgaatggaatcgtcatcgaatgaattgaatgaaatcatcgaatggtctcgaatggaatcatcttccaatggaaaggaatggaatcatcgcatagaatcgaatggaattatcattgaatggactcaaatggaatcaacatcaaacggattcaaacggaataatcgaatggaattgaagagaatcattgaacggactcgaatggaatcatctaatggaatggaatggaataatccatggactcgaatgcaatcatcatcgaatggaatcgaatagaattacggaatgaaatccaatgtgatcatcatcgaatggactcgaaaggaatcatcatccaatggaaactaatggaatcaacatcgaatggaatcgattggaaacaccatcgaattgaaacgaatgtaattatcatgaaattgaagtggacggactcataatcgaatggattcgaaaggagtcatcgaatgaaattgattgaaatcatcatcaaatggaatcgaatggaatcattgaatggaatcgaatggaatcatcatcccatggaaatgaatggaatcatcatagaatggaatctaatggattcattgaatgaaatcagatggaatcatcgaatggacttgaatggaatctgtgaatggactcgaatggaatcattattgaatggaattgaatggaatcatcgaatggtctcgatttggaatcatttatcaaatggaatcgaatggaaatcaccgaaatagaatcgaatggaacaatcatcgaaatggactcaaatggaatttatccctccaaatgggaattatcgaatgcaatccaaatgtaattattgaaatggaatcaaagagaatcatcgaatggactcctcgatggaatcatcaaatgaaatggaatggaatagtcaatgaaatcgaatggaatcatcattgaatggaatcgaatggaatcatcgagtggaatcgaatggaatcatgatcaaatggaatcgaatgtaatcatcattaaatggaatcaaaaataaccatcatcaattggtattgaatggaattgtcatcaaatggaattcaaaggaatcatcatcaaatggaaccgaatggagtcctcgttgaatggaaatgaaaggaatcatcatctaatggaatcgcatggaatcataatcaaacggaatcgaatggaatcatcatcaaatggaatctaatggaatcactgaacagaattgaatggaatcgtcttcgaatcaattgaat

SEQ ID NO: 104 - DNA, 2000 bp, Homo sapiens
  misc_feature (1)..(2000): DMR1:143417501
gggaagtggaggttgcggtgagccaagatcatgccactgcactccagcctgggcaacaagagcaagactgtctcaaaaaaaaaaaaaaaagaaagaaagaaagaaaaagaaaaagaggttgggcataatgtctcaagcctgtaatcttatcactttgggaggtcaaggcaggaagatggcttgagcccaggagttcaagactagcctgggcaacacactgagaatccatgtctacaaaaaactaaataacttagtggagcagggtggtgcacacctgcagtcccagctacttggctgggaggctgaagtgggcagatcacttgagccagagaggttgaggctacagtgagtcatgtttctacaactgcacttcaacctgggctacagagcgaaatcttgccttaaaaaagaaagaaaagaaaaagaaaaaagagaagaagaaaagaagaaagaaaagaaacttgctgcatagacatgaccatattcatttgaaagcaagttagtaaatatgtatcctgaaaagatagtttagaaaagaaacttacaggccatgaccagagtgattataaaacattctcttaacagttagcaggtggaataaaaagtgtattctttaaaatgatttcattactagtaaatagttctataaggaaaagtagggggaaaaaggcaaagaaatatgaaactaagtcaatgaaaagcaaataggctatgatcacacatctaaaggccatgaacatggcaaagagtattttaaagaatctaaaaagtgtactttgaattttaaagtattttaagagattaattttataaaaggaaaaacagtgttatcacgcagaaggaccatatttagtataatcaaaagtttaagaaattggccaggagtggtggctcacaccagtaatatcagcattttgggaggccgaggcgggcggatcggatcacctgaggtcaggagttcaagatcagcctcgctgacatggcaaaacaccacctctgctaaaagcacaaaaattagccaggtgtggtgacgcacacgggtaatcacagcttcttgggaggctgaggcatgagaattgcttgaatctgggaggcagaggttgcagtgagccaagatcatgtcactgcactcccgcctgggcaatagagcaagattctgtctcaatcaaaaaaaaaaaaaagagtttaagaaattaaggaaagctgagtgtaatgaaaccttttcaagggtagtagtggtatagctcaaacctggtttgaattccagctttgtcacttactgggtaagtaagtagcagccttaagcccaactggtgtttgctatttgcacgtattttcataaataaaagtggtctgtaatgttttcacagtgttgtcaaacttcaagattattaaaactattaatatcctgtttaatgtttaagaataaataactatttgatatcttttaactactgtcctatcactgacttttaagactcttactgacaattttgtgattttttcatgtaatcatcctttatatcttacttagcaagttctctattagacatatgtctgctgaatgaaacttaattacagatatttttgaacatttattaaatttaaattatatttgtacttgtaagaaatatttaaacaatgctttgtttttctaaaataaaagaaaaccaatagcacaaaccttcattttctaagtgtgtcaagttgttttgttttttttatttgcttgtgtgtttgttttttgagactgagtctccctctgtcgccaggctggagtgcagggtgcgagctcggctcactgcaacctccaacttgctggttcaagtgattctcctgcctcagcctcccaagtagctggaattacaggcatgtgcccctgcgctcggctaattttttttttttttttttttgtatttttagtatagaccaagtttcaccacgttggccaggatggtctcctcctgacctcgtgatccacccgcctcggcctcccaaag

SEQ ID NO: 105 - DNA, 200 bp, Homo sapiens
  misc_feature (1)..(200): DMR1:143648201
attgagcactaagaacccttggacacaggaaggggaacatcacacgccggggcctgtcatgaggtggggggaggggggagggatagcattaggagatatacctaagtaaatgacgagttaatgggtgcagcacacgaacatggcacatgtatacatatgtgacaaacctgtacattgtgaacatgtaccctagaacttca

SEQ ID NO: 106 - DNA, 1100 bp, Homo sapiens
  misc_feature (1)..(1100): DMR1:145253701
atcttacatggatggcagcaggcaaagagacagcttgtgcagggaaactcccattttaaaaatgatcagatctcatgagacttactcactaacccaagaacagcacaggaaagacccatcctcatgattcagttatctcccactgggcccctcccacaacatgtgggaattatgggagctacaagatgagattgggtgtggacacagccaaaccatatcaattgtcatcactcaaggcagatgagtatatagaaagctatcagttgtaaggaattggactaagtttaagagaataataattaagatagaacaaatgtttggtcctgcttaagggctaggatagatgaggcacaatagaatcatgtggggagctgtaaaaatgcccaggccctactctgtgtcaattaaatcagaatccagaatctctgcttgagtgtgtctagagtattggtcaaaggaaacagtgattttgatgtgcagccagttaagagctgatatcctcaaggatcatgatgtgacacagctgtttcagaagggtaaatctccatactcccactttagaagaaaagaaaaggcaaaatgacaaaacaatcaagcaaaagggctggaagagctggtagataacagggtgtcaacttgaattaattcagctctttggtaaagattagctggagtaaagaaattccagttagtcaaatgggatgaatgtccttttatggaaaccatatcatgctttttgaatgatctgagaaagactggaagcattagaggtgaagtatatccatttgctcaatgggagaagattttgttttattttatttacataatgtgatatgcttggccatctgcagtagtgcctgaaaggggatgtaaaacggaaaatgtagtcagtgagactgattaataaccatgggtagaaaaataggccaagtggaaaaacttattcatataattgcttcattttgctgactgcaaaaggatttgttttggaagtgatttctgctctttaacctagtggattgatagatcacagaaaggtcttagaaatgacattacgtaattttgttcataacatgaaattagcttgaatcaaaaaatgt

SEQ ID NO: 107 - DNA, 400 bp, Homo sapiens
  misc_feature (1)..(400): DMR1:146051601
aaattcaaaaaattagccggacctaattttttggttgcctgagcctgtaatgccagttactcgggaggctgagtattctctggttgaggaaggagaatagcttgaacgcaggaggcaaaggttgcagtaaggcgagatcgcgccatacactccagcggactgtttgctgttaatcccatagggaaaagaaaagcttagttttatttctatagaacaacaacaaaaaaagataagagattagtagagacgggttcactatatttgcccacacacgcctgaggtcgagcgatattaacataaacataacctatcgacgtacctcatagattgctgggattacaaacgtgagaaccacgatgtcccaaatttttagtttcagtgaagttacagatgggaacaa

SEQ ID NO: 108 - DNA, 1500 bp, Homo sapiens
  misc_feature (1)..(1500): DMR1:146139001
ttcgaactcctgagctcaggtgttccgcccacctcagcctcccaaagtgctgggattaagatgtgagccagcgcccctggtcagagacttactttttttttttttttttttttttttgagatggagtctcgctctgtctcccaggctggagtgcagtggcacaatctcggctcactgcaagctccggttcctgggttcatgccattctcctgcctcagcctcctgagtagctgggactacaggcgcccaccaccacgcccagctatttttttttttttttttgtatttttagtaaagacggggtttcaccgtgttagccaggatggtctcaatctcctgacctcatgatccacccgcctcggcctcccaaagtgctcggattacaggtgtgacccactgcgcccagccgagacttattaatagctaagacaagccaatgaaaaggagagagagtctagcctgacagaagtgaatgagagtgggaggatcatctcagcccatcctcccacctaagtctcctgagcagttgggactataggcgtgcagcaccatgcctgcctaattttttgtattctttgtaaagatgggtttcaccatattgtgtaggctggtcttcaactcctgaactcaagtcatcgtcccacttgggccttccaaagtgctgtgattatatgtgtgagtcacagcacctagctccatcctagtttctgactaaaacaataacaatatgtgtatatacagcctgtcctcagaattgatcttccatagcctagacagaggtatgagacacaaggaaaatagaggctacctgggagaatgtttagagcatcctgacattcatcatgagaggattctctgtctacaaccagagttgagttgacttcgtcttcctcaaatgtgattttgatgttcttgtgaggctggttggagtcacaagggccgtggctatttgaacaagtgatggcacattcctccagtgagtcctcagggactttgctctcttcagccttctgcacctccctgatgagccaggtgggacagagatgacagaagattaaacacagagggattggaccccagggagtcctagctggttttgacaggcggcattaagagagtggttccagaaagcaaaacggaggttcccttaaagagggaacaggcaatcctcttctctctgcaacagaccatggctgccatgggagccagagaggaagagagcagctggtgttcagtgcactgaacagataggagctgaggaggatgaagactcagctatccctgcatggtacagacatgacacttggcacacatagagaaacacgacagctgccgcaccctgtgtctaagctgggttcaatttcacatactgtggccaagggaatgcgggcatttggcccatcatagatgccagagagggtgtgcctcctagacattttcatacgttaccacccattacttgctcctgagtattcagtgttacctgggggcagatgattc

SEQ ID NO: 109 - DNA, 300 bp, Homo sapiens
  misc_feature (1)..(300): DMR1:147254901
gattaaatgatgaagggccatttctgattctttgtcccttgtctgttttgagcaactggaaagaagaaatgcagaggtacagagtagatgtagctgaaattttattgtttatcttgattaagattttttttctggatgatgtataaaatatgataaaacaacctattgtcgtaattagtaagtttattccagaaaactttgagctgatagagtgtaggtagacactgaggatataataggggaagagtaatattattactatttggcaatttaaaggtcagcaatcgtttgtagtaagta

SEQ ID NO: 110 - DNA, 2100 bp, Homo sapiens
  misc_feature (1)..(2100): DMR1:148721801
gagtgtgggaactcggggcttcccagggcgaaggagtgggaacataaacaaaatgggccctgccggagctcgggcatcgcatcctccctcagccctgcctgaacctcggaggaggcgcccaggagatcatccaggcaccgctgcctagggccgcgcagggaagacggccagggctccagggtccgcctcagtcactgtcaccccgcaacatgattctgactcccccaaaggtgggtgcttcctgccaaaagtcccaccaccggcaccctttgttgtcagagggcagagtcagaaatatgtcatcctggtggaaactcttccctccctccctctcccctcagcagacttagccctggattccatggactgctgcaggggttagtcttctggagagagcagggcccctgcatctctttctgacaaaagacggcagacataaacaaggggaagtttgaaagaaagagaaacggctaattctcagcaacctttcatatgtctgcggaaggcttggcatccatggcccagccttcttcaggatgagcacctatgtctgctactctttgcatcaagtgacttctccatgcctttcttgtgtcttttttctcgctcctttccgttgcctcctttatgttttctcactgcctagctcttcccaatagcaccaccccgagtggttctagggcaaaatagtaaagcattttaaatttgttttcatgacttcccacccttttttcagtctcgttcctttccatctttaaggtggccagcagctgctccgcacttgacaaacgtgctggacactgctgctggggagacatcagccggcaagcaagggaaagttgcagacttctcagtgcttacctcctagctgggaagacaaatattggacaactgttctctaaaggaggcatgcagagtactgtgagtgcctgtcagtaggtgcagacaggggctcagggagagcatcctggaagaagagatgtttgggttgagcctggaagcgtgaatgttgggtgaagtgttgggaagagaggtgaagacagagaataagacaggggagaaggaacacattctatgtgaaggtgctgagggaagatagaacatttgaggaaccaaaaatgaattgtacagctgcctgtggtacatagcctgggcctcaccctctcccctgagcacttgacaatgcacataaggtccctaaacacttctgcctactcacccaccataaaacctgtcatgtttgctctccctttaaggctctgtttttttgccttccataattgcgatctcaactgatagtttcctaagacagatttggggtctggaaacagattcttagctgaattctactacttcactgtgcaaacttgaggaagtgaggtatatcatcagtaatatgggctaataactgtgctagtagtaacatttcatgattgtttacgctgcatcagcttccagtgctaagcacttttgtcttttattgtatgattctcacaaatcctcataaggtaggtaatgcttttatccctttctcccttctcaaaggattcttaggaagcctaggtgtgacactaattatagatgcactttgtaaccattaagggttaatgcaaaaaatgaaatattattgtgatgttcaataatagtaccatgatgttcaacaagtacatatttaacgaataactgcacttgttgaatgccatgacagttgtgggctataattaaatgagtctcaaaatattttgtgtctgtctcctgaacaaaccaaataaaaagcaatagaaggaatgaaaaacgttgtcatcaccaatttgctaattgtatgccatgccggaccacagaagagagaattccacagatgtgaccctgagcctccaaagtttacagtctgatgaccaccactacctggaatgcagatacagataacagagtgaaagctcagtatcagttgatacaacactgggttgtatcaagctcatttcctaccaagggtaaggatctttcaggagaccgaatgagcaggaaaaaattcatgaacttcttttaaaattcaaggtgggggctgaagccagaaggttctaagtctcttagtattctcct

SEQ ID NO: 111 - DNA, 900 bp, Homo sapiens
  misc_feature (1)..(900): DMR1:149661701
agtttttgttttaaaaaagtgtttgaaaagtgatattccactgtcttctggcttacactgttccaacaagaagtctgccataattcttatttctgtttctctgtacataatatgtcttttttctctggatgcttttgagattttctatttatcactggtttgaagcagtttgattaagataagaccttgtatagttttctcttttacatattgttctactttatttagtttcttgcatctgcatgcttatagttctcatcaaatttgaataataatgacatatatagtcttacctatggcatatacaatatattatatttggcatacatacatcaaatatatataatgtatattctattctttctctctatcttctccttcaaagactccagttatatttgtattagctgctttgaaattttaccacagctgactaatggtctgttcatttttgttgtatcttttctttctctctgtttctttctatttccatgtcttggaattgattaatctttcttcagcagcatctaatctgctgttaatcctatcgagtgtattttcatctcagactttatttttcatctgaatttaatttatgtctttttttaaggtcttctatgtatctcttcatcatttcatattttcctctagcttctttattttattttattctattttttgagacagagtctcgttctgttgcccaggctgaagtgcagtggtgagattttggctcactgcaaccttcacctcctgagttcaagtgattcctgtgcctcagcctcctgagtagctggaattacaggcacatgcctccacacccagctaattttcatatttttcagagagacggggtttcaccacattggccaggccgatctcaaactcctgacctcatgt

SEQ ID NO: 112 - DNA, 800 bp, Homo sapiens
  misc_feature (1)..(800): DMR1:151642401
atgttttgtaaatatttgagtttgcgacttgccttttcattttttaaaacagtatctttcaaggaacagaaattttaaattttgatatagtctcgtttatcagtttttaaatttatggataatgcttttttgtgttctaagaaatctacctaacccaaggacaccaatcttttatgttttcttacagttttatagtttcagctatctttttttgtaagaactttattattatttatttatttattattagttttttgagatggagtcttgctctgtcacccaggctggagtgcagtggcgcaatcttggctcactgcaagctccgcctccatggttcacgccattctcctgcctcagtctcccgagtagctgggactacaagtgtctgccaccatgtccggctaatttttttgtattttttagtagagacggggtttcactgtgttagccaggatggtctcgatctcctgaccttgtggtccacccgcctcggcctcccaaagtgctgggactacaggcgtgagccaccgcgccctgcctattttttatttttgttttattttattttattttattttttgagacggaatttcactcttgttgcccaggttggagtgcaacggcgtgatcttggctcactgtaacctctgcctcctgggttcaagtgattcttctgcctcagcctcctagagtagctgggattacaggcatgtgccaccacacccggccaattttgtatttttagtagagacagggtttctccatgttggtcaggctggtctggaactcctgacctcaag

SEQ ID NO: 113 - DNA, 1200 bp, Homo sapiens
  misc_feature (1)..(1200): DMR1:153326601
taacttttttaattgttgttttgtgttgttttgttattataagaaggtattaattacagatgccatttctttaacgtttaggacaagttaggttttctgtttcttcttgtgtcaaatttggtgatgtgcacctttttaggaatttttctatttaatgtcagtttgcaaatgtattgaatactgcttttcatactatcttcttactatgtcttcaatgatcttcagtaacgttccttgcttaatttctgacattagttatatatgtttctcctccaccccctctttctcagttagacttattagaattttaccaattaatcttttttaagattaattttagacatcaggacgggttccaagatggccgaataggaacagctccagtttacagctcctggcgtgagtgatgcagaagacaggcgatttctgcatttccaactgaggtactgggttcatctcactggggcttgtcagacagtgggtgcagcccatggagtgtgagccaaagcagggcggggcatcgcctcacctgggaagcacaaggggtcacggaattctcttttgtagccaagggaagccatgacagaggatacctggaaaatcgggacactcccaccctaatactgtgcttttccaacggtcttagcaaatggcacaccaggagattatatcccgcacctggttcagagggtcccactcccacagagcctcgctcactgctagcacagtctgagattgaactgcaaggcagcagcgaggctgggggaggggtgtccaccattgcggaagcttgagtaggtaaacagtccacagacctttcatcagttgggagctgtgtgtgtgacgttaacagtcattaatgcctagattttttattagggcttgcaaggtgatgatattccatttctaccattactttttcatgtatttattagagtacatctattaggagaagttctctactatttggttattcaattgtattctgtgtataggaaaggaagaataggtacatttctctttccctttttttacaagttttaaagtaaaaaagtagattcagtggatgtcctagcagtgacaattcgggggtttttttagtgttattatgaatgtgttgatttaaacttaacaagctcagacccattgcagttgttgttgctatttatgctcatattgtcattagccattagacattgg

SEQ ID NO: 114 - DNA, 700 bp, Homo sapiens
  misc_feature (1)..(700): DMR1:154878801
ggtgccagaatcaacttctgtgaatattttgcaaaagtcgctcttatttcccaggcttccttgggttttttcaccattggggaagaagaaaccatctgttgtctgtcccgggtgagggcaccataaagcctttgaatgagagggctggacaggatgccagaggcgcctccaggcccaccaccctattagcaagagaagacctccggagatgggaggggacttgcctgtactcattcgtgagtcaggcacaaagccgggactcgagcccggcctccgcgatggtccccttcaactggtccatcatctctcggttgctatggggcatccaccaacacagctccactcccggttgctgctgtgaaacgagggaagaagccccctctcccctcagcacagccaccaggcacagtcaggagctgcaacctgggtgcccagccctctgacaggaatcctgcagaaggccaggcccctctcctgcctcccgcccttgttttgcctcccttcgctcctgggaaaggtggcagccggagggttgctatggacaccgcagtcgggctctccctccgcagtaataatccgaagatgccctccctgctggagtccaagtctctaattgccgagcctcagaggcagtgatgctgccgcacaggaagtactgggcagctggagaacccaaggattagatgggctgagaagggaa

SEQ ID NO: 115 - DNA, 900 bp, Homo sapiens
  misc_feature (1)..(900): DMR1:155064201
cctttgcccgcactccgggctccgcccccctcgctgctctcctggcgatccccagcctcccgcaggctggagctgtggctgacgaacttgagagcgagggagggggctttactcttatgaaagagcgtgggttactctcctgcccgctgggtctcacctctggctctcactctgtctcctgatctcatttgctatctctgctttcatctctgtctttattggtccttctgtttctttccagtgtcagccctgcccttctagccgaatcacctctgggcaagtctcgtgaccttcctaacctcatttatctcacctgtataatgggctaataatacctagtaccctgggaagtctggcagggtaagtgaggtcatgtatgtgaaagaggctcaggctgtacagatataaactattatttctttctctctcctgagctgcctgcctttgaaccttagtatattttactgtttccatccccctccccaagtctccctgcctctcctatttcctatctgtttttctttctgattttctacttgagacaatctgtgactattcatttcttcactcactaacatttatttattaaacacatactgtgtgtgcccggccctgtgctaggttgcaggggattaactatatagatgagaagatcaagaccctgccctctgggattccacagactctctggagaacaggcgcaggcaggagagcctgcataaagacaggtcattacaataccaataacaagtgataagagcttttgttgtccttggactctgaattctctatctctgtcacagaccaaagcttctgaatcacttggaggacctgttaaaaattcaggtttctcaccccccaatcttaaggtttctggctcattcattcaatccacaaata

SEQ ID NO: 116 - DNA, 200 bp, Homo sapiens
  misc_feature (1)..(200): DMR1:156187501
gctaaaacggtgaaaccccgtctctactaaaaatacaaaaaaattagccgggcgtagtggcgggcgcctgtagtcccagctacttgggaggctgaggcaggagaatggcgtgaacccgggaggcggagcttgcagtgagccgagatcccgccactgcactccagcctgggcaacagagcgagactccgtctcaaaaaata

SEQ ID NO: 117 - DNA, 2300 bp, Homo sapiens
  misc_feature (1)..(2300): DMR1:156299901
ccgggagttggaggttgcagtgagctgagatggagccattgcactccagcctgggcaacaagagtgaaactccatctcaaaaaaaaaaaaaaaaaaaaaaaaaaaactgtggtgaaaaaaaactgcatctcaaaaaagctgtggtggcccacgcctgtaatcccagcactttgggaggccgaggtaggaagatcaggaggtcaggagattgagaccatcctggccaacatggtgaaaccccatctctactaaaaatacaaaaattagccggctgaggtggtgcacgcctgtagtcccagctactcgggaggctgaggcaggagaatcgcttgaacctgggaggtggaggttgcagtgagccgagattgcgccactgcactccagcccgacaaaacagtgcaagactccatctcaaagaataaaaaaaattaaaaaaaaagtgcatcccaccagatatcacctccctcttttgacaagtacttgtattgcccccatatcctattttctcatatcctatcttttctccacaataaaattgtgaactcttcttggaccagaacccgaataacgaagtgttcaataaatattacgttttttggtttgtttgtatttgtttgtttgttttttcgagatgtggtctaggtctgtcacccaggctggagtgcaatggcatggtctcggctggtctcaaaactcctgacctcaagtgatctgcccgccttggcctcccaaagtgctgggattacaggcacgagccactgcacctggcctactttaatcttattttgactaataaatgaacatggtacaaaatccaaaaggtaccaaagggctcagtgtggtatctcatgcctgtaatcctggcactttgggaggctgaggtggaaggatgtcttgagtcctggagttcaggaccagcttgggcaacatagcctgaccccatctctacaaaataatacaaaaattagccgggcatggtggtgcatgcttgtggtcccagcttctccggaggctgaaatgagaggatcccttgatcctcccattgcaccactgcactccagcctgggcaacaaagtgaggatagcaacaggaggcagacaaacagacaaatcctaggcagacaggggcaggttcctgatgaaaccccaccttcaagccgaaaacagttgaaagccaagctacaagtcctcggtaaatgcacaggtgggattgagaaccactcttcccgtttgttgcactttcctctgattgatccccacgcgtcacctattttacatatacccacccttccctaattggttacactgtcatgcccatctttgagaggtgcctttatttatttatttatttatttatttattttttgagatggagtctcgctctgtggcccaggctggagtgcagtggcgtgatctcggctcactgcaagctctacctcctgggttcagccattctcctgcctcagcctcctgagtagctgggactacaggcacccgccaccacgcctggctaattttttcgtatttttagtagagacaaggtttcaccgtattagccaggatggtctccatctcctgacctcgtgatccgcccatctcagcctcccaaagtgctgggattacaggcgtgagccaccgcgcccagctgagtggtgcctttgttttagctttttttttttttcttttgcatacactcaaaccaatctgcacacacacacccattttgagcccatcaaagccccggacccagccacaaggggagagaaaccacctaacttgggagaccactctcctgtcccttctccattaagagttgtttcgtcactcaatgaaattctttccgaccctcttcaccctttgaactgtcagcataacctcattcttcttggatgcatgacaagaactcgggaactgctgaacgtgggtacaagctgaaacacaggcagcctggggcatgccccagcccagccaagggctgagccagtgtgcaagccaggcgtggccaggtgggctaagtgggcagggtacctccggcagcaggcccggggcgcgaggcctgggcaggaggcattgccggctgcagaggtccccggctggcaaagtggctgagaaaaatcctgcgtcatggagatcttgtcacaaaaaaaaaaaaagaaaaaaaaaagtaccaaagggcatcattcctattcaccagcaaactggtccctcccaagacaaccatcactaccagtttgtttgttttgtttgcttgcttgctctgttggccaggctggagtgcagtggcacgatcttggctcactg

SEQ ID NO: 118 - DNA, 1000 bp, Homo sapiens
  misc_feature (1)..(1000): DMR1:156544301
tagaggtcacaagaaggtgacaagactacaagattgttctcagacggtcctttgagagaaaggagcctgccaaaaccaccgtagctaccttgattatggcatccaggtttgctttaaaatactgcaaccactccaggtaaatcttccgctgcctataaccccgccaatgagcctgcacatcaggagagaaagggaagtaactcaagcaggtctcctttggccagaaaggcttttaagaaaatctttgtcctgggccctccagggaatggaagggggcagttaaatagagggggaaggggaaagtggccctgttctcaaagaacttccaacttcatggggaagaccaaatggcttcacatagccaacaatgccctctgccatactccctggtcccagaacaaacacccacatacccacacccacacacctctaaccaacacctcttcacagaaactcaactataagatacagtcctaaaagataataaagcatacacctactcatcaacttcaccaaagtatgtaccatatcagcctaaaatatactcatacacccatatgcagaccacccacacactatcacacactccaccctccctcatgtgcacagaaagtgggcagagagcagtctggaaatgcatgcagttgtgtggatgagaagtgtgtacaggcacagagccgtgtgctcaccatctctgcccgcggccacctgggcagcaggtcactaatgctctcataactcacattctctttaaaacacaatccagctcctgaccctagttctcagcaaatcttcccaccaaggtccccagtaactcagctgtcaggctgatggcctctcccctagctgatctgctgcaaagggcccaaccgacgtctgcacaaatcatgcctcctttggtctctaaaatctcaaggccctcttccaatccagtctccttcctaggagacttttccctttccctccaagcttgtgtgggattaattttcctaaagtacct

SEQ ID NO: 119 - DNA, 700 bp, Homo sapiens
  misc_feature (1)..(700): DMR1:156672701
tcccctcggcatatgctgaacactctagacccaccggattctccatccttagcctctaaactggagtggtcagggctgaggggtggtgccaaggaggcatggtcctctggggactggcctgtactggcctcttgccgctggcccccaggctcctctggtccaggcaggacgctggcaggaatggccaccctggcttcagcccgcaggggctctggagcctgtttcctcccaccctgtgtctggagcagagagagaggagcatcctgggctctgatctctgcatctacagcaggagagggtgcctgaggtgtgggggggatgggggtgctggccaaggtaggggtacgggcctggaggaattcttggttcttaagaaaggctggcacaggtgtctcaagggtagcaggcaagggtgaggggagggaagttgggctcaggactgggagcaaagatccaagacgccggccctctggggtcctagggaattgcagctccagcttggggtctggaaaggcagagggggaagaaacagcatcagtatatcactggcaatgaggggagccacagagcagccaccgctggcaagagtatccatgcgcctgcccctggcgcccatggctgggctgagagcatgctcactgacactggaggccacggacttgaaatttagattggtgcctctcgggaaagataggtctgg

SEQ ID NO: 120 - DNA, 1400 bp, Homo sapiens
  misc_feature (1)..(1400): DMR1:158903101
ctaattacttactcaaatgaatatattgagaattcacaacaattaaacttttgcttccacaagggatactttatcaatgtaacagtgtctctgaccactaaaagttttcctattgtgttgttctgtggaagagagagaatgtattgtacgtaacagcaagcggttgggttcatggtttgctgatcaagactcctttatacttcttacccttgctcactaaactattaacgtttcttccacatgtcatgctcctttcttaaagatttttatcatgattctttcacctgcaaacttcctattggttaaaactatccttgaataccagtgttaatgtctcttgttcagaaatacttccttagatctcctcccaggctaggaaaaaatattacctagcgtttacatatgtatgatcttatattttcttctgccacttatcactgtagttaaggatatttgtcttttcgagactacaagtctcaagagtaagagttccctgagtgccttttaaaccactttatcacagtggctatttcagtacttgcttcagagtaggctctgagtaagtacaattaccccatagcataatgaatagcaaggaacaaaatcaagtaccagtaattgtttctatgaaaaagaggccaggcacagtggatcacacctgtaatcccagcactttggaggccaaggcaggtggatcacttgaggtcaggagttcgagaccagcctgaccaacatggagaaaccctgtctctactaaaaatacaaaattagctggcagtggtggcatatgcctgtaatcccagtgactcaggaggctgaatcaggataattgcttgaacctgggaggcggaggttgcagtgagccgagatcacaccattacactccagcctaggcaacaagagcaaaaactccatcaaaaaaaaaaaaaaaaagagagagagagagagattcataagctgcctgacaaaaatttccaaataattgtttaaagacacacagcatatttccaggaatacagagaaacaattcaatgaaataagaaaaacagcaaatgaccaagaccaaaataagtaatatagcacagagattaaaattaaaattaaacacaatctctggagctgagaaatataatgaatgaattgaagaaaatgtagtagagaacatcaacagcagtactgacaaaggaggaggaagaaagtgtaaaactgagcaccagttatttgaaaatatataagagaactaaaagaaaaaaggaattcaaaggaataaagaatgcttaaaggattcatggaacagcgtcaatagagcaaatatctaaatataatataagaagaacagtgagaaaaaatggaaaggttattttttaaaataatagcaaaaagctttttaaatctggaga

SEQ ID NO: 121 - DNA, 500 bp, Homo sapiens
  misc_feature (1)..(500): DMR1:159076601
cgtctctaacccagctcctctatggtgcttacctcctgatccctggggcgatcagcaaaccgggtctgccaccttcttttcagagagcttaactagcagaggactcaggagagcatgcccaaataacctaggtgactttcaaagctacaaagactctgacacttctggacggcttcacatgtacccctaataaacacttcccttcacccccaggcccagtgtgggtaggagtgacaactggagctctaattggctgagctggtttgggttctcactagcagccacagaagaaaatgtctatagaaacttgtatctgagtcatgccacataggaactacactgattggaaacagaaagtggcctagaaactgtaaaaaatgaccgcagatgacttcttgatacactttgtgactaaggggcctggtgatgacatttttctggtataaacaagcacactgatctcagagggtatctaaaagtgttgccagtagggcagtgca

SEQ ID NO: 122 - DNA, 200 bp, Homo sapiens
  misc_feature (1)..(200): DMR1:159092301
agaagatggcctaaatgttataaatatatatatgcagcaggagtttgtaatagcagataacaattttagccctaactatgaataagttaaactccaaaaacatactccgcaattacacagattagagactggcccctcttctggacccaggcccacattatcagactgaaggaggttaaagcttattttctgaggacaag

SEQ ID NO: 123 - DNA, 1800 bp, Homo sapiens
  misc_feature (1)..(1800): DMR1:159764701
ataatggaatattatacctaaatccaacctgttcctcaggaaatattaaggaaaaaaatgagaactataatttatgaaaaacgtttaaatgaaaagtctgccaaaataatgactccatgatttcatagagcaatattgtccttttaaaaagaaacaaggggcaggaaagtttaaccagacaaaattaataagagtaaacaaattagctctcaattagagcagaacttgagtagtttgggtggtaagaagtctttgtaatcaacagcagtacatgagaagtaatatcaggatgcaatcagcaaatagacttattatcccaaagataggtgaagttgttctggagttaagtctctgaagctaccctggcccttaccactgcagtgcagtgagtgaacaaaattcttaaagtcaggcaaatctgcttttaaatatccaagtcaaaaccatttacaaagtgaaggaaataatatttccaatgtagagtagtcataaggattaaatagaaaaatacatataaaatacggctgggcgtggtggctcacgcctgtaatcccagcactttgggaggccgaggcaggtggatcacgaggtcaggagatcgagaccatcctggctaacacggtgaaaccccgtctctactaaaaatacaaaaaattagctgggcgtggtggcgggcgcctgtagtcccagctactcgggaggctgaggcaggagaatggcgtgaaccagggacgcggagcttgcaatgagccaagactgcgccactgcactccaacctgggcgacagagcgagactctgtctcaaaaaaacaaaaaaaaaaagaaagaaaaatacatataaaatacctagcccagtgcctgatttgttcaagtcattaagaaacggaaagtcaaaaagaaatccaacagaaggaaaccaaagacttacattccaagaccagcctgaaaatcagcaagtagattagaaatatatgtgaaggaataggttgacaaagtgtcccagccaggcttctgtgggtcatgtagatttcgaggacctctatagtggatgaattcctttctcaaattcccttctgtaagaaataatcacctaagagaattttctccttctctgtcccggaagatctccagctttccttctttttcttgcactttatgtttcaggttaattaacgctttccccaatgtacatactgatcatttcttgctatcacaaactatcctagaggccagcatagttcaaacaggtactggactgaagtagacacaccattggcaagtgggtgcccttccagctggctggaaagttttctggcactttgttccaggagtgtcctgagtgcagtgcccagccaggtcctctgctcagtcttttgagatcatcccatctgagtgactaaacattgcctttgggtgggtgggccacacccaggacccggaagtaagatcatcatttcctcacaaaagggaatgctttttccttccattctattctttgtgttatgccacagacacatgactgaccctaaaattcatattttaacagcaatctctaagatataaagattcttcagcaggaccttaaggaagtgggagtgaggacaaagtgtttggacatatgagagaggaagagtgttccaaaaactaagacacttcacaatgtgttggatagtcccatgaaagcacatgtgagagaaccttgaagactaatcaattcagaaattccagcccctccttggagttggtttacagaccatgcaaacgtagtcccagttccccgagttttcctgattctggagt

SEQ ID NO: 124 - DNA, 700 bp, Homo sapiens
  misc_feature (1)..(700): DMR1:160491401
aaaaaaaagatccagattaaggacaaatgtcttggctcaaccccctgtgaaaaatatccttcacctcaatgttttgtatttcacctttgctgtgtgttatggtctgtagactctgtaaatgactctgcttatattgcctaattgatggtagcaaggtctgggatgaccaaatgatgcgggacatcagtatggggcaggatagtcagcagaagaagtgggaagggagagactgaggtttccatcaactagctgggtagttttggggtggttattttatatttctggtctccagtttatccctgggttcccttctagtccttgcactctgcccctgtgtaaagacaatttggagaccaagccaagaactctgagggcaactcagtgatgtgagaagccaagagaccaggtggaagagtcctgtttcctctgctatcagaattacctaattggggtggaagatggaagcatcacttccttggggaatttgaatctatggggatcctggttcctattgtatctaaagctggctccaatagtgagaaagagactcagatgtagaaggtcagcaagacagaaaggaaaatgctgagaaccaaagaagtggggaaggaagaagtgaataaggtgagaaagcaagcaagcaattctggggagcaaagaagtgcggcgtatctaggcatgtgagatgacatgtgatgta

SEQ ID NO: 125 - DNA, 500 bp, Homo sapiens
  misc_feature (1)..(500): DMR1:160784501
caagaagggaacaaacaaagcctccaagaaatatgggactatgtgaaaagaccaaatctacgtctgattggtgtacctgaaagtgacggggagaatggaactaagttggaaaacactctgcaggatattatccaggagaacttccccaatctagcaaggcaggccaacattcagattcaggaaatacagagaacaccacaaagatactcctcgagaagagcaactccaagacacataattgtcagattcaccaaagttgaaatgaaggaaaaaatgttaagagcagccagagagaaaggtcgggttacccacaaagggaagcccatcagactaacagctgatctctcggcagaaactctacaagccagaagagagtgggggccaatattcaacattcttaaagaaaagaattttcaacccagaatttcatatctggccaaactaagcttcataagtgaaggagaaataaaatcctttacagacaagcaaatgctgagaga

SEQ ID NO: 126 - DNA, 100 bp, Homo sapiens
  misc_feature (1)..(100): DMR1:161097101
tctctgaggaccaagagttgggaagaggaggggaaagccctgctgtgctatcagaccctgcattacatgcccatcctcactgcagccctggccactgtct

SEQ ID NO: 127 - DNA, 200 bp, Homo sapiens
  misc_feature (1)..(200): DMR1:161699701
cttgaggtctagagttagagacctcgccaacatggtgaaaccccatctcttctaaaaatacaaaaattagccaggcgtggtggcaggcacctataatcccagctactggggaggccaaggcaggagaatcgtttgaacttgggaaacagaggttgcagtgagccgagatggcaccactgcactccagcctgggtgacaga

SEQ ID NO: 128 - DNA, 1000 bp, Homo sapiens
  misc_feature (1)..(1000): DMR1:164408901
aatgcttggcacctttatcaaaaatcatttgatcacgtatgtaagggtttgtttttggtctccccacactattccatctgtctatttgtgtctaatgtctatgctagcatgacacttttttcattacagctttggagtaagttttgaaattaagaagtgtgagttggccaggcgcggtggctcacgcctgtaatcccagcactttgggaggccaaggcgggtggatcacgaggtcaggagatcgagaccatcctagctaacatggtgaaaccctgtctctactaaaaatataaaaaaaaattagccgggcgtggtgacaggtgcctgtagtcccagctactcaggaggctgaggctggggaatcgcttgaacccagaaggcggagcttgcagtgagccaagatcgtgccactgcactccagcctgggcaactgagcgagactctgactcaaaaaaaaaaaaaagtgtgagttatccagccagctttgttgttttctgagattgtttggctattcagtttttcttgagattccatataactgttagcatggattttttatttctgaaaaaaagtctttgggattttgacagtgattgcagtgaatctttagactactttgagtagtattgatataaactttctaattcatgaacatgaggtgtgtttccatgtatctatgtcatctttaatttctttcagcaatgttttataatttttactgtgtaagtctttcacctccttggttaattcctaagtattttatttttttgatgctataataaatggaatatttgtaatttccttttgaaattgttcattgttagtaattgactttagtgtgttgactttgagtactgctatgccactgaattcatttattagttctaacagtttcatgtagattcttccaggttttctacatagaagatcatatcattatctgtgaacagaggtaattttacttctttctttccaatttggctgccttcttttttttcct

SEQ ID NO: 129 - DNA, 2400 bp, Homo sapiens
  misc_feature (1)..(2400): DMR1:164708001
agcatgacttacagcagatttgatggcctggattttgcttttccacacctgtccccatctggtaggccatgctgtctcgtagccaacctgcaagtcagttaggtgaggccgagtgacctcagcctgatgcaggccacagaagcagagcgaggcagagtgactaagtgactgctggaatcctagtaaagcagggataggaaccagagttcctggactgcacgcagccttttctttggtaagagaggttgactactgtagtagctgtgtaaggggcagatagagatgagtgagagatggtcattcctaagtaagaaatatttatcagatgactgttatgtgtcaggagctgggctaagtgctttacacatatatagtctttttttaaaaaaaatattttcttttcttttaatttagtttcaggggggtacatatgcaggtttgttaacataggcatattatataatgctggggtttgggcttctattgaatccctcacccaaataatgaacacagcactcaagagagtgtttttcagcccttgccctttccctccctcctcctttttggaaaccccagtatctattgttgccatctttacgttcatgtatacccattgtttagctcccacttgtaagtgtgaatgtgcagtatttgattttttgtttctgcgttaaatcacttaggataatggcctccggctgcatccatcaacatatacaatctttacaacaaatatatggcacaggtactgtgattatattatacccattttagggataaggaaactgaggctaaagaagtaaccaagacaaagttagaaaatgccaagtttgaatctaggctatctccaaaatacttggccttgaacacccatttgagcaggtttgcactgaatctgtttcttcattttaagcactacttattgagtgctgactgtatgccaggtaccatggtaggtgctggggatactgactagaggaagacagtgtcctagtccttgaggtgtacacacagccgcggagacaccccagcaaatcagcgatggcagtggtgccatagatactctgagaagtagtcacggtactcatggggcctgctacttcataatgtcagtgacgtggcagacacaggaaggctgcagcacacctaactttgttggtcacttttgtctatctgctactctcaaggctccatttgtctctgttgtgtaactctgagcaagctagtcttctttctaagaaagtggaagctgatcagcagaaggtggccatggacaaaatgggaagcaggaccgctggagaaataggcccagttgcttatttcaggaaatcctctagtcttgttcactcgaaattgtgcaaggacaaagctgggtccattgaaacagaaagcataagaaaacaaaaatagaaaaagggggaaaaacactttaagttgaataaacaactgctgagccaactcatgagttcagcgggggattctcatgtttccaggatattttcagattctgatggcaactcgggaaagaccactgtaaccttgaactttgtcagaggaccgagtttaagaccaccaagacatttcacgcagaccacccactgcaatttcttgcataggtctgctggccagtctcttattaatactgcaaggcaacctaaactatattttgttgggaaagtggaagagcgaaggcaggtgttgaaaagccatgaaaaaaagaattaaaacaaaaatgtgcctcaggctcctttcagctggcagcagaatttccgtcatctttcccttttgaatttgatattattgcaggaacattaccacggactcaattttcacttgacagtgaaataccagaagtcgtctcgggtccggagtgctgtctgcatccagtccctgttaatctgcagaaggaaagcatggagatggggtgggtggccaagctgacacaggcctcttcaggctgctgggaaagggtgctccctgggtgtgaggcccaggagtccctagaattgcatagatgcagcagtgagcagcccacctgggtgtgaatcatagacttgttttgagaattaaatgagcaaatttatgtagaatgcttaggtcagtgtctgacacatacaccagtgttcagtgagtattacctattgtgactgtttcttcgtgggcaaagcaacatcatcctttctctgcagaatttgaaactgatgtcaaaagaagagggaggcagcagcatcacacatcagagggaatttcttttagattcatataccgtttttccattttctcttttcagtttttttctttcttataagaaagactccagatgttgaatttaaactgggggatgtcttcaatgccattgaatatattgagcgtgtaggcaggcagtggaaggtgctggtt

SEQ ID NO: 130 - DNA, 200 bp, Homo sapiens
  misc_feature (1)..(200): DMR1:165799301
attttgcttcttagtgcaatcttgtaattatggggactaggttaatgaaactttggcttgaaaagaccttttaactcaaaacgatctacatatgaaacaatccctatcaaaattccaatggcatttattttgcagaaataaaataattcatacaaaatctcaaggaatctcaaatagccaaaacaatttaaaaaaaaaga

SEQ ID NO: 131 - DNA, 900 bp, Homo sapiens
  misc_feature (1)..(900): DMR1:167468001
aaattctagctcatgaaaactgagggagaaggcttagacagtaaaaattaaatatttatgaagatactacgctcacaccgacatataaatgcacatacacatacattttaggcatagctatttatttttaattctttatgtgatacccaatgagaaaagatttccagtaaaaaaaaaatgaggggaagatttattgcctccaaattaatataagaaaacgtccctgtaatagctgtcctcctcccccagtaaaaggaaagaaaaaagatacacaaatattgaattgacaaaattatcttttctctattgtgagaaaggcaagttaatacccataaagaacttcgcactccctcagttgaaggatgctctataaatacaaagcatcgttataatttattattgaacagagtcaattttttcttctgaatcatttttcaaacctctcatagctcaggcctctctgatgggagctctgacatgaagccaaaacacctcttccagacacagagagaccatcaatcagtttaattcgaagactcctcaaagtgagcctcctggtagcccagcaggaactgttttagagtcttcttccttcagttacagtcagtgacttgcatagagagctcaggtcacctggctcatctcaggcactcaccagacacctgggaagggctggtatttctacccttgatactttgctcccagtaaagggaaaccaaggctgagaaccctcacttttctttacccacctttgttcttagccctgccttctgctaaattgtaaccaacaaatccacagtggctaaaattcccagtcatgcagtcgctcctagactgagatgctccacccggctgatttgttgtgaattaagggaaccaaaaaataaagtgctctctttc

SEQ ID NO: 132 - DNA, 2500 bp, Homo sapiens
  misc_feature (1)..(2500): DMR1:167562401
aattccactccccagtatatacccagctgaaatacttgtatatattttttgttttgttttgtttgtttttgagacagggtctcactctggttgcccaggctggagcgcagtggcacgatctcagctcactgcagcctcgacttccctggctcaggtgattcttccacctcagcctcccaggtagctgggactacagatgcacaccatccttcctggctaattttctgtattttttggtagatacaaggtttcgccatgttgcccaggtggtcttgaactcctagactcaagtgatccacccaccttggcctcccaaagtgctgggattacaggcctgagccaccatagccagcctgaaatactgacatatgttgaccaaaagatgtgtacaagaatgttcatagcagcattacttgtaatagcccccaaatgtccattgacagtgggatggaaaataaactgtggtttattcccacagtggaatagttcagcaatgagtgctgctacatgaagcaacatggatgaatcacataaagatgatcttgagcaagagaagccagccacaaaacacatgtatgattctgcttatataaaattcaaaagtagacaaataattctaaggtctaaatatgaaaacaacagttccttttgggagataatgactggaagagagcatgaggggagcttcgaggctgttggcaatgttcgtttctggagctgggcagtgcttacagaggtgtgctcaccttatgaaacaatcattgagctctacacttgatttttatacttttatgtgtctatgtttgtgttgctccttaacaaattatccctaaacttagtgacttaaataatgaatatgtattattccattatttctttgggtcaggaattgaggtgtgggttgactaagtagttctggcttaaggtctgtcatgacagtcgcagtcaagctgttgacaggagccgcagtcatctcagggctccactggagtcttacaattttttcataatctcagaatgacattccgtcattcaaggagaggagattaacacaggacatgataccagggggtgaggaaggcaagcatatgggattggtgctgttatactactccagtattcagagaggagggggtaacaaagaagatggaagaacacctacaacttatatttatcctccagtccagctttataacctcccctggtctcatgccttagtctagaagtggaacatgatggataggggaaggaggggctaaaaaaaacctcaacaacatgaactgaaagtgcatatgttggcagtaatgtttggcaatagtggaggtccagtttcgatgatgcccggtggttgtaggccagtgcagagctgcagtatccggtgcaacagttccccatgaaagtggctcatctgaaggctgtgacaacagaagaagggccctgatgcagctgtgcaggcagaggtggcccgagcaggcaaaggaggttgagctcataagtgagacgcctctggtgataggagcgacttggaggagaagtagaggccccaccatcatgagtggagacaagggtcatcaatataaagagctactgtgaatgtgactcactttgtctcccaggcaaacagaagccacttaaagctttcattgaaaggaaggagaaatcatcagctagatagatagtgactatgctggaggtgagtgagaagttggctttggtccaggtctcaactgggcagctgctggactgaatccagactggctggcccttacattctccttgttgcttgtctacaacctccgagagtcttgagctgggtgtgaaagtctccttctacctaaaatgtggatgtgtgatgcagggaggcgtcaggagatagggaatgctggggctgtttttcctaaaagcaagaaggaaaatgaaagcttaataatgacaggtaaggttgaattgtcacgataatatgtggcttgtatattgggagcttatgccatttacttcttgttccacatgcatcattccttaaacaagtgtttgctaaatatttaatgtgcatttatatttaatggaaggggttttttgtacagtagaaaaagtcacacaacatcatatgcattaagactgatagtcacaggtttttacatgtggggatggcttaattttggaggtggtgacccaaggcactgttagtgacctagatgaccactagaataccagatacagtcacaagaatgaattcagagccctttaaaagctatgcctagcaaattccatgaagggtgtgtgaaaaataaaagaccagaaggcactatagaaaacaattctcctgctcctcaagcaatgataaacgagattgcatcatgtctttgcttaaaccctccagtggctactccttacacttactagctacactgcttggcatggcctgcagggtctgacctggtagagcgggcctctgcatacctctccaaccacacctcctgttctcagtccccagctccag

SEQ ID NO: 133 - DNA, 200 bp, Homo sapiens
  misc_feature (1)..(200): DMR1:170556701
aaagagggaaggtttttgactgtcactgatttaaaataggggacccattgggattcatcagtgcaaaactccatcaagtattgggaaaaattactttaagaacagacctttctgactgagggttgatggtatctcgttagatgaaaaacagcataaatgttagcactcattacaatttttcagggtgttgtggaaccaag

SEQ ID NO: 134 - DNA, 600 bp, Homo sapiens
  misc_feature (1)..(600): DMR1:170639201
gacttcctgggtcgagtggggacttggagaacttttcttacaagaggattgtaaaatgcaccaatctgcagtctgtagctaagattgtaaaacgcaccaatcagtgctctgtagctagcaagaggttgtaaaatgcaccaatcactgctctgtaaaaacgcaccagtgttctgtagctagcaagaggtttgtaaaatggaccaatcagcactctgtaaaatggaccaatgagcaggagtctaaaagtaaccaatcacggggaggattgagaaaagggcattctgataggacagaaacaggaaatggggggatacaaataagggaataaaagctggccaccccagcccgctgcagcaacccacttgggtccccttccatgctgtggaagctttgttctttcgctgttcacaataaatcttgctgctgctcactctttgggtccatgccatctttaagagctgaaacactcactgcgatggtccacggctccattcttgaagtcagcaagaccacgaacccactggaagaaaccaactccagacacaccaggttcaactgattatcctgcctcagcctcttgagtagctgggactacaggta

SEQ ID NO: 135 - DNA, 900 bp, Homo sapiens
  misc_feature (1)..(900): DMR1:172068201
gcctgtaatcccagctactcgggaggctgagacaggagaatcgcttgaacccaggaggcagaggttgcagtgagctgagattgcgccattgcactccagcctgggtgacaagagcaaaactctgtctcaaaataaataaataaataaaataaaaaagaaatgaggttaataattatatctgtcttttctgattgctgtgaatagtgaaagaggtaattcatgaagttcttagcgcctgacacgtggtagacactatataaaatgttagtcattatccttttctttgtcctgttttccgacttcttcatctttgaattttattaagtgccaactcagcaggagcacagtgctagatggtatctagggttctgctttcttcctaaggaattgctctgctggttttgaagtgtttcctcaacataacaaggttacttctgatgatagtttgtgaagcctctcccatcaccttgacatccttctttaggagttgatgatatttcatttttgcttccagaatggcaatgaatatcttctgtaaaataacataatttatctctgcttcttttttggtagtgtaactttttgagtattaatactcagatctgcttttcttgacagctggcaaacttccccagactctgcgaggaaacggaaaggattgttgctaaccacattcgtgagcgagaagggaagacaaaggaccaggtaaagagaggtcttccctggtgggcagggagattgtgggaggtcgaaggtctctgcaaggttgtctggtagttcccaacagtcagcctgtcgcttaaaggaaaaaaaaatagtggaacacaactacattatgtttatttttacttatttatgaattatacacatactatattcatatcttgtttatgttaaaaa

SEQ ID NO: 136 - DNA, 200 bp, Homo sapiens
  misc_feature (1)..(200): DMR1:173173301
aaggtcaaaatccatagtctcgtctgagacaaggcaagtcccttttgccaacgaacctgtaaaatcaaaagaaagttagttacttccaagatataatgggagtacaggcactggataaatgcacccattccaaatgggagaaattgaccaaaacaaaggggctacagtctccttgtaatagggcaaattattaattatta

SEQ ID NO: 137 - DNA, 200 bp, Homo sapiens
  misc_feature (1)..(200): DMR1:174085301
gtgagaacatgcagtatttggttttctgttcctttgctagtttgctaaggataatggcctccagctccatccatgttcctccgaaggacatgatctcattctttgttatggctgcatagtattccatggtgtatatttaccacattttctttatccagtctaccattcctgggcatttaggttgattccatgtctttact

SEQ ID NO: 138 - DNA, 700 bp, Homo sapiens
  misc_feature (1)..(700): DMR1:174195501
gactgaggagccagattgtttggtttccaattcctgttatgatactagtaactttgggtagggttcttaatcaattctttctttctttctttctttctttctttctttctttctttcttccttccttccttccttccttccttccttccttcctttcctttcctttcctttccttctttccttctttccttctttccttctttccttctttcttttctttcttttctttcttttctttctttctttctttctctctttctctctttctctctttcctttctttcttttctttctttctttctttctttctatccttctttctttctatccttcttcttcttttttttttttttgagacagagtcttgctctatcgtccaggctggagtgcagtggcgtgatctcagctcactgcaacttccacctcctgggttcaagtgattctcctgcctcagcctcctgagtagctgggattacaggcatgcaccaccatgcctggctaattttttgtatttttagcagagacagggtttcaccgttttagccaggatggtctgggtctcctgacctcgtgatccgcccaccttggcctcccagcatgagccaccacgcctgggctgtagttctttttattttcttcttgtggaattattttatttagattgcctcttttggatatgatctccatatttttctttcct

SEQ ID NO: 139 - DNA, 1400 bp, Homo sapiens
  misc_feature (1)..(1400): DMR1:174866101
gagggagggggagagagagagagagagagagagagagagagagagagagagagagagagagagatgccagcctgccaatattcaaagagtttaaacttcaaccataacgtttattttttctccttctctcatctttccctctatatctatctatagaaatataaaaacatattttagatttaacataaaaaattaactgtcattcaaatgaatgaaattagaatgttctgggcattgccactgccaccactatgacagctgttttagaattatgaaaatctttttattattttattttagaccattaagcaatttactattgctcttaaagcatacataaagccaatttttaacatcatggaagccatcgctgacaagaatgttgcctcaattcacatgatattttctattatagcagtctgttaatgtgtattgcattcatcagtaacttgaggaggaattgataaattgccttcagtcttctttctcctcatatttgcgaatgccttatataataaatactactacaggccaggcatggtggctcacacctgtaatcccagcactttgggaagctgaggtgggtgaatggcttgagtttgtgagttcgagaccagcctgggcaacatggtgaaaccccttctctactaaaaatataaaaaatgagccaggcttggtagtgcatgcctgtagttccagctacttgggagactgagagaggaggattacctgagcctggaaggttgaggccacagtgagctgtgatcgtgccactgcactccaccctggacaatagtgagaccctgtctcaaaaaaaaaatttttttttttaaatttaaaaattagctgggagtggtggcgcttgtagtcccaattactgtggaaactgaggtgggaggatcacttgaacccaggaggttgaggctgcagtgagctgtaaatgcatcactgcactccagcctgggcaacagagagaaaccctgtctcaaaaatgatagatagccagccatggtggctcacgcctgtaatcccagcatgttgggaggctgaggcggccggatcacgaggtcaggagttcaagatcagcctggccaacatggtgaaaccttgtttttactaaaaatacaaaaattagccgggtgtggtggtgtgcgcttatagtcccagctgcttgggaagatgaggcaggagaaatgcttgaacccgggaggtggaggttgcagtgggccgagatcgcgccaaaaaaaaaagatagatagatagatagatactgttggatgcaatataagttttcagcccatattttcgttatataaggatacaacattaagagcaaaatactaagataagagaaatatagagtctaccattagaaattttaaaacttctatttcaggatt

SEQ ID NO: 140 - DNA, 3200 bp, Homo sapiens
  misc_feature (1)..(3200): DMR1:175491101
ctgcaaactaatgcaagaacagagaatcaatcactgtatgttctcacttataagtgggagctgaatgatgagaacacatgggcacatgtgggggaacacacacactggggcctgtcagaggggagcttgggggagggagatcatcaggaagaatagctaatggatgctgggtttaatacctaggtgatgggatgatctgtgtagctaaccaccatggcacctatttacctatgaaacaaacttgtgcacctaacacatgtacccctgaacttaaaataaatgttaaagaaaaaaataaattcaaatgttaaattttcttcttctcttcacagaatccttttagcacatgacctcctgacttctttacctgcttacagggagaaaggctgaactatgatgatttagtcatttttacaaatgagcagtaaagggtcagaattacacaagttagtggaagcatctagactttctgagttagataatgcactttctaccatagcacaagcatctgtgtaattatgtctaaatttccaggcccagactttttttttttttttttttttttttgagatggagtctcgctctgttgcccaggctggagtgcagtggcgtgatctccgctcactgcaagctctgcctccagggttcacgccgttctcctgcctcagcctcctgagtcgctgggactataggcacccaccaccacacccggctaattttttgtatttttagtagagacggggtttcactgtgttagccaggatggtctcgatctcctgacctcgtgatccgcccgccttggcctcccaaagtgctgggattacagcgtgagccaccacgcccagccaggcccagacttttaaacgataaactttttcatagttggttccatgaattatttaaaagtttcatgaaggaagaccactcattgtggccaaaggccattgatggcaatcagacaagggatccaaattcaggcctcctagtaactatttccataaacaactttgctttcctgctcaatgaacaaacagatttcatcaaaattttggaggaaaaaaaaggagcatttattcttcagtctttcccccctctggagaaagcccaagtttgttttgtctattggttttgaatattgcatgtgctactatcatttatgagagccatttagtgatcagattgcatgtctcccttgtttaggtagttctgcagatggactggcatttgcttgcatacagctgtgcacatctggcatgcaggtgggttttctgataggctagcttgcttacaaaatgatttcttctgggaatgaagaggagagattgcccaaggcctgagatgaagccgtccacaagcttggacactgatttgtttctaacaaaggttttctgagcagggtagtttgggaaagatgatgagaagcatacacctagaaaacgagcggtcacagagttcccatccccaaaggcaggtgtgtgtcaaggcctaagttgatttttggggggcctgagagagtttggagggttaatgctctagtcaaaactatatctatggatatttatggatgaaatgacatgataagttagaattgcttcaaaaaaatcctacgtgggtgtgtgtgggagtgtggggaatggggtttagggatgcaacaagagagatgttgggttgatgatttttatagaggagtgattagtacatggggttcattgacaattcactctatttttatgtatttttgaaattttctagaatcaaaagttaaaaacaaaatctgttcccacatatgggcctccagaggcacatttaatcctgatagacttcttgttaattctaggtagtggatggctggtggggtgcaggcatgaacacaggcaatacgaggagcaggaggtgggtgggtagtccctcacacagccaaaggagggagagtggacttggcgcatttctcctgtgacacattattctctgctgtacccgtcagaaggcaggtgtcatttcctcatgcaccatagctgtcccctctcctctcctcttctccttggcaatctctccaagatgctcagggttgcacggagcccagaaatgaccagaaaaagggctggtagaaacaaaatgggtattaatgccacattctgtcagaattccaaacctaatctaagctatagccccagaaaaggagaaaggtgaaagggaacagaaaggtgaaaaagtaaaccaagaaactgaggaagttttagaagaaatgctcatcttttgggagagagactttcccgggccatctccttgctaatagaacatgcagatgcccagcagaagtgagaggtgagtgcctcaggccactagaagagaccagggcggcctctctggcccttgatgtgctaggaggagctggctccgccccacgctcaccaggagaaggtcatcccccggatttctaacagctttcatggaggaagcagcggctagctttccacaggacagcctctgccaggcccccttccggacccttccaaaaccaaaggtgctccgcactaagcttgtaaatgacctttccattcccgactccggttggtgtctatgtttagcttccctcctttcctcctggggacactaaggtggggggtagtggtcctggccccaagccatgggagccggtgcctgggcagcaaggtgagagcaccagcggcttccagagagtccatatggctgcgtggccacaaatagctgcaccgacttgaaaaaaacgcccactcctctgaaacacactctgtgtacttgagtcagacacattctgttctctcccttcatcctgacaggagcctccgtgagatccactctcagctgaggggtccctacaacctctcttcttgaacgcccactctcccaacctgtttttctttgtatctgctgctctccctgtgtcttcctcccgcctctgactctatcctgcatcccgttcccatctctctggtctgtgcctcctttcccggattcctcccaccagcctgtcactgtgccgcccttctctcccttccccaccccgccccctcccgccggcctctctctgctccacacagctgggctctctggggatgtggctgtttgggctgcagttctatgggcacaggtggcactggcagatgcaagtcctttccattcatgtgggtaaacagtaaacattatattaaaatattcat

SEQ ID NO: 141 - DNA, 1300 bp, Homo sapiens
  misc_feature (1)..(1300): DMR1:176845201
gagcctttctcagagactcttctgtgtgtttgattgtgcccaggtggcccagggctagctggctctaacaactagcatgacagcctccaatcagaaaggcaggtaaggggacagggtgaggagaatgggcagatactgacagaaattaaagtaaagggattgtgaaagtaaagagctcttcctgattctcatcttctcttttttctattacaaggcattgaacttggcacttcctgtattctttgtgatcactattgagtgcattagttaacacccaaggggatggcttgattgggaatgtagtgaaaggagctgatctactgtattgtaatgtaaaacagctacagccagttattttgtaagattataagttgttcattaaaaaatcagcacacaaaatatgaagtgtctttggtgtttgactctttgtttaaatcatttcatcactttctaatcactttccattgtcttgtgccaggtccaggcaacagtcattatttatttgattgattggtcatttcttttagccacttaaaaaccatttgttaagtaaataggatgtgtaaggaagatgaatatgaaagttcataagaagacatggcatatatgaaagtagaatgtgaggtaggaatgtcaaatatctcatgagtttttaaataaagtgtaagaattacttacagttcagaggaagtagggtttattcctggatgccaaaggtaggcagcatttggaaaatggttgggaaggatgcatatgatctgacaggcagaaatgggggttgggagaggagagtccaggcaaggtaaacaacatagttgaagctgtggaagtaggaatgggataggctgtgcattatggaacatcagtgaggcatccagcttagctggaagatagaactaagctagcatgtaccatacatttggtaaatacagaatcttacttaattcttacaacagatctgcaaatagcatattctcacttcacaaataagaacgctaagccacagtctggtaaagaaagttcttcaaggtcatatgaagggagttaacctggttctgtgggacaccaagatgttagaaggaaaagaaaaatggtgattaataggatggagagaggtgaaaagaaatgtcaagggatgatgcctctgcattaaatacacaatctgaaagcttatcagccctaacagaagagggaagctggcaggagcaggcttttaaagaaagagtattcatttgctctttcaataaacttgggttgagggccagataggaaatgccatctaaagcagtgttcagaaccc

SEQ ID NO: 142 - DNA, 800 bp, Homo sapiens
  misc_feature (1)..(800): DMR1:177032401
cccagctccttgagatgaaggaccaaacagccccttgcctttctcccatccccacctggtgtgaggtccatccccgacttttcattgcagccctgcagggagtcgagggtgcgcgtgacctggctggcaaagtcctcccctccgttcatgcactccctctgcagatggtggcgcagatcagtgatgtcatactcatagccgtccaggataggtgtctcccggatgctcagggtgccactggagttgtggccctgcacgcgggcattgcgcaggctctcccgtccgtgcccgccgatcagcacagaaggaatgtagtgaatctcattggctgcctcagcactggcactcttctggggctgcgggacccggcggcgtttgcaccagcgccggcgagtatacaggatcatcaccaggcacaagatggacagcagcagagcgatcatgccaccctaggaagagaggaccacagatggatgtgggaagatgggtaggctcttcccacaaagagtcactgctccttctgctaccaccattcatcacttatttatgcattcattcattcagctgtattaagcatttacagcaagcatcattcagcagcaaagggaaattctactgtgactggtatttagggtgagagaaaaatggagctgggatgaccagtgcatcatttcaagtgatccagttgcttcgggcttagcaaacaatttgaagaaacaagtctgtgtgtgtgtgtgtgtgtgtgtgtgtgtgtgtgcgtgatttcagctgcaaaaacaggggagagcttttatgtatta

SEQ ID NO: 143 - DNA, 200 bp, Homo sapiens
  misc_feature (1)..(200): DMR1:178264301
accatcatattttaaataactcatgtattcacgtacgcatacatgaaaccaagatagacttatacagttttaaacattctttgtttggaattgccttctacttgtaatctatttctaaaattctctctaaaccctcatgcacaaaactgtgatgttatccccttgtataatttagaaaatcagaggttcttacaaccccc

SEQ ID NO: 144 - DNA, 700 bp, Homo sapiens
  misc_feature (1)..(700): DMR1:179295601
gtagtttcagctacctgaggtgcgaaacagagtacaataagacatttcgagagataccatgttcaagtgaattttaatacagtatattgttaatctcttactgtgcctaactttttgaaactttgcctcccaggttcaagggatattcatgccccagcctcccaagtagctgggattacaggcgtgtcccagtacgcccggctaatttttttttttttttttgagatggagtttggcgcttgttgcccaggctggaatggcacgatctcggctccccgcaacctccgcctcccgggttcaagcgattctccgcctcagcctcccaagtagctgggattacgggcatgtgctaccacgcccggctaatttttttttttttttttttttttttttttttttttagtaaagactgatcagatcttactggtcaggctggtctcgaacttccaacctcaggtgatccacccgcctcagcctcccaaagtgctgggattacaggcgtgagccaccgcgcccagctcacccggctaatttttgtatttttagtagagacagggagggtttcactgtgttggccagactggtctcaaactcctgatctcagatgatcggtctgcctcggcctcccaaagaggtgggattacaggcgtgagccactgtgcccagcctgtaaatgaaactttataataggtatgtatag

SEQ ID NO: 145 - DNA, 200 bp, Homo sapiens
  misc_feature (1)..(200): DMR1:181006601
ataagaactgttttgatccttctatgatttcttctggaacaaagaccacaaaaacgtgttctagctgattagggtgtttgttgtctatggctttaaaacagaattcacacgcatcctataccctctgacgtttcaagtattggaaaaaagaaagcgctaacaaaaatgaaaaaaagcaccttacaatatttaggtctatg

SEQ ID NO: 146 - DNA, 3200 bp, Homo sapiens
  misc_feature (1)..(3200): DMR1:182508701
tttttattgataattcttgggtgtttctcacagagggggatttggcagggtcatgggacaatagtggagggaaggccagcagataaacaagtgaacaaaggtctctggttttcctaggcagaggaccctgcggccttccgcagtgtttgtgtccctgattacttgagattagggattggtgatgactcttaacgagcatgctgccttcaagcatctgtttaacaaagcacatcttgcaccgcccttaatccatttaaccctgagtggacacagcacatgtttcagagagcacagggttgggggtaaggtcacagatcaacaggatcccaaggcagaagaatttttcttagtgcagaacaaaatgaaaagtctcccatgtctacttctttctacacagacacggcaaccatccgatttctcaatcttttccccacctttcccgcctttctattccacaaagccgccattgtcatcctggcccgttctcaatgagctgttgggcacacctcccagacggggtggtggccgggcagaggggctcctcacttcccagtaggggcggccgggcagaggcgcccctcacctcccggacggggcggctggccgggcagggggctgaccccccacctccctcccggacggggcggctggccgggcagaggggctcctcacttcccagtaggggcggccgggcagaggcgcccctcacctcccagacggggcggctggccgggcagagggctgacccccccacctccctcccggacggggcggctggccaggcggggggctgacccccccacctccctcccggacggggcagctggccgggtgggggggctgacgcccccatctccctcccggacggggtggctggccaggctgaggggctcctcacttcccagtaggggcggctgggcagaggcgcccctcacctcccggacggggcggctggccgggcggggggctgaaccccccacctccctcccggacggcacggctggccgggcggggggctgacccccccacctccctcccggatggcacggctggccgggtgggggggctgaccccccacctccctcccggatggggcggctggccgggcggggggctgacccccccccacctccctcccggacggggtggctgccgggcggagacgctcctcacttcccagatggggtggctgccgggcggagaggctcctcacttctcagacggggtggttgccaggcagagggtctcctcacttctcagacagggcggccgggcagagacgctcctcacctcccagacggggtctcggccgggcagaggcgctcctcacatcccagatggggcggcggggcagaggcgctccccacatctcagacgatgggcggccgggcagagacgctcctcacttcctagatgtgatggcggctgggaagaggcgctcctcatttcctagatgggatggcggccgggcgcagacgctcctcactttccagactgggcagccaggcagagggtctcctcacatcccagacgatgggcggccaggcagagacactcctcacttcccagacggggtggcggccgggcagaggctgcaatctcggcactttgggaggccaaggcaggcggctgggaggtgtaggttgtagtgagccgagatcacgccactgcactccagcctgggcaccattgagcactgagtgaacgagactccgtctgcaatcccggcacctcgggaggccaaggctggcggatcactcgcggttaggggctggagaccggcccgaccaacacagcgaaaccccgtctccaccaaaaccagtcaggcgtggcggcacgtgcctgcaatcgcaggcactcggcaggctgaggcaggagaatcaggcagggaggttgcagtgagcggggatggcagcagtacagtccagcttcggctccacatgagagggagaccgtggggagagtgagagggagagggagagggagagggagagggagagggagaggcctattgactatttgtatgttttcttttgagaaacgtctattcagagcttttgcccatttttaagttggattatttggtttgctattgcgttgtttgagcttcttatatattctggttatgaatcccttttcaggtggatagtctgcaaatattttctcccagtctatgtgttgcctgtttattttgataattgtttttgttactgtgaataaatattaggatgtaatcctatttgtatatttttattttggttgctggtgcttttttttcttttgaagtcttacacaaaaagtctttgcccagaccaatgtcctggagcatttccctaatgttttcatctaatagttttatagtttcaggtcttagatttttgtctttaatacatttttatttgatttttgtatatgatgagagatagaggtctagtttcattcttctccatatagttatccagcttgctttctttatttttttgagatagagatttgctctcgttgcccaggctggagtgcaatggcatgatctcggctcactgcaacgtgtgcctcccggttcaagagattctcctgcctcagcctcccaagtagctgggattacaagcatgtgccaccatgcccggctaattttgtatttttagtagagatggggtttctctatgttggtcaggctggtctcaaactcccgacctcaggtgatctgcccgtctcggcttccctaagagctgggattacaggtttacaggtatgagccaccgcgcctgtccagttatccagctttcttagcaccatttattgaagagactgttatttccccattgtatcttctttgcacatttgttgaagatgagttggctgtaaaggcatggatttatatctgggctctgtgttctgtcccattggtctatgtatctgtttccatggtgctgatttggttactgtagctttgtagtaaattttgaaaccaggtagtatgatgcttttagttttgtcctttttgcttaggattgctttggctatttgggggtcttttgtgatttcatataaattgcaggatttaaaaaatttctctgaagaatgtcattggtgtttcgataggatgaatctataaattactctggatagtattgtcattttaacagtattaattcttccagtcatgagcatggagtaacctttcatttgtgtatatcttc

SEQ ID NO: 147 - DNA, 2400 bp, Homo sapiens
  misc_feature (1)..(2400): DMR1:183404601
ttcagaggaagaatggcccattgtgtccaataggagctctactctggagggaagccttggaggcccctcatgatgtgagaaagatgtgaaagacagtgctttacaagcaatgctttaaaggcaatgccaatgctgaattgccacccccgctgttggtctagggtggaagcattattatatctgctcaaagaaaggaattagacatcttcccataccaaccctgtctgcaacccaaatggtcaagcaaacaaatgcaaaatggggaagaaaaacatcctgtctgtaaaggcaggtcagatagacaaagaagcaattatgcaccaactaaaaggatctcaggccgggcgaggtggcttaagcctgtaatcccagcacttcgggaggacgaggtgggatgatcatttgagtccaggagttcgagaccagcctgggcaacatggtgaaatcccatctctataaaaaagcaaaaattagccaggcgcggttgaatgtgcctgtagtcccagctagttggaaggctgaggtgaaaggatcacgtgagcccaggaggtcaaggctgcagtgagctgtggtggcaccactgaactccagcttgggtgacagagcaagactctgtctttaaaaaaaatgaaagaaaggatctcaccttcgaaacaataggattctaggatttgcttcaaaataatatagggcaaggattgggaagtgggtaggggtatcagcacatcaaaatgagcaaggaattgataattattgaagctgggtgataggtgcatcaagttcattgttgtattgttctgtttacttttgcatatgtttagaatttttcataagaaaaatggcttttttattacttggtttttaaaagattccacttcacccaatgtaaatatgacagtatccacctctgttgggacaaagtcatcattgcagggaacaaggtcatttagccacttacatgggagccctgggaatagggaagcgtccaccacatggccatgagggaggagctagacaaaactaagactttaagacatggacaagagttgactggagctttcaacagagctctttttatttttattgttttttttgtttgtcttttgtagagacgaagtctcacttcaagagaacttgttttaaaaataacagccctttcagtgaaatatcagaaaacaaacttgataatttcagaattcagaaacgcttagtctcagccctgcctgggaacgtgcaaagtgtctttgctattccaaaggcaggatgttattcccagtgtgtggttgacatctcacacaactaagtatgtgcactgacctgcaaagttctggaaggtaccacgtcttgacaatacaccagttagattttttaataaattggaatagtttagcagttagtccaccaaatgacaaatttttcagaatgtcaggacattttaacatgcaagtagctatagcttacctaacttgattcatttagaaaaagagagagacagtgccacaaataaagggattacttgctatgctaagttcaatgatagataagacagcacaatcaggccacatcagaatgcagtatcatgaattgaattgaatagagggatgtagacaatgaaggtatgtttaaaggggataaggcaggatgctatgaagactgggaatgtaatgacatccagataaaaagaactagagcttgtgaagccgaaagagaagggtgctgggacagagtagctgtctccacctatttgaatgtctcacagtggaagacaaattaaacttgctgcatggatctcgaggaaaagaactaggtccaacacatgggagtctcaggaagcccactgtcagctcgatagaaaggacaatcttaaaaaaagtgcaattgtgccaaatgctatttggctgctttggaaaatagtgcattctctggacctgaaagatctcaagcagagattggacagaaacttgtaaagatgttttaaaagggatttcagaactggaagactatctgcacaattttgaaatctgcttcaaatggagattctgtgatttctgaagatgcaaacttaacaatcaataaaccaacggtttttggttttgttcgctcaaagtagagtaagtactttacaaagcttcacttcactaggtgtcatgtacctaaaacctttttcaaactgcaactaaataaaaaagaaactcaactgctctgccattccttttttttttttttttttttttttgagacagagtctcactctgttacccaggctggagtgcagtggcgagatctcagctcactgcaacctccacttcctgggttcaagcaattttcctgcctcagcctcctgagtagctgggattacaagcacatgccaccacacctggctaatttttgtatttttag

SEQ ID NO: 148 - DNA, 1500 bp, Homo sapiens
  misc_feature (1)..(1500): DMR1:185040901
gcctgtaatcccagcactttgggaggctgaggcgggcagatcacttgaggtcaggaattcaagaccaacctggccaacatggtgaaaccccgcttctactgaaaatataaaaattacccaggtgtggtggcacatgcctgtaatctcagctattcgggaggctgagaaagcagaatcgcttgaaccggggaggcagaagttgcagtgagctgagattgcgccattgcactccagcctgggcgtcaagagtgaaagtctgtcacaaaaaaaaaaaaaaaagaaaaaaaaaaaaagaaaatcatctctagcttcttgaaaaaatactacactgaggattgggataaatgataatgttgagaggaaactccagagatgtttgactcatataccacttactagaaagaagaaagatactgcagttgtgtatgcagcacagagtggcaaggcagatgtggcagaatggaatatatctggcacttggagtcaaatgaccaaggtctgagcctcagctctgccacttactaactcaatgtttgggagagttattgagctgcagaagtcacattcctgtcctccataaagtaggaataataccttggaaaactgttctgaaaattcatgaaataacagatctaaagtttctttataaactgtgatgcatacatagcttagcattaacaggtgattggtggcctgcagtcttcatctcagatgagctgataaccattaaatacttcaagcatgactgaaaataaatgtatatggtagagatagaataggcaagtgtgaatttccatttaagacacactgcctaagcagagaaagcctctggagagactaaacaaactcttgacagaaacgtcctctgttaagtaatgaaagtgaagcaaaccaagctcatatgtgctattctatttcatatacacactggagtcaaagaatcccattctttcattctcttaacacctatttattgagcatctactaagtgccagcactgtgctagtctctaggtatctgctggtgaacaagatttttgctttcaaggaactcatatcctagttatattaatgtttttattccaagtacttaacaaagtgcttggcacatactagatgctcaataaaagctggttgaactaaactagttttaattttgtagcctgactatagcagaataccagttaagaggtgattttttctttcattttttttttttttggatatggagtctggctctgtcacccaggctggagtgcagtggcatgatctcagctcactgcaacctcagcctcccaggttcaagcaattttcctgcctcagccttccgagtagctgggattacaggcgcctgccactacacccggctaatttttgtatttttagtagagacggagttttgccatgttagccaggctggtctcaaactcctgacctcaggtgatccaccggcctcggcctcccaaagtgctgggataacaggcctgggccgccatgccca

SEQ ID NO: 149 - DNA, 700 bp, Homo sapiens
  misc_feature (1)..(700): DMR1:185648801
atacaatcctccagctagacataaaagttctctaagtccccacccaactcaggagcccagctggcttcgcctagtggatcccataccaggactgcgggtggagctgcccgccagtcccgcgccacatgcctgcactcctcagctcttgggtggtcgatgggcctgggtgctacgcagcagggggcagtgcccgtcggggaggctcaggtcgccagggagctcactgtgggggggctcgggcatggcgggctgcaggtcccaagccctgccccgcggggaggtggctgaggcccggcgagaattcaagtgtggggcaggcgggctggcagtgctgggggacccagtgccccctccgcagctgctggcccgggagctaatcccctcactgcccagggccggtggcgccggccagccactccgagtgcggggcctgccgggcccgcgcccaccccgaacttgcgctggcccgcgagtgctgtgtgcagctccggttcccttccatgcctctccctccacacctcccagcaagcagtgggagccagctccggccttggccagcccagagaggggctcccacagtgcagcggtaggctgaagggctcctcagcatggccagagcggacgctgaggccgaggaggtgctgagagcaagtgagggctgctagcacgttgtcacctctcactaactgagggggaagtc

SEQ ID NO: 150 - DNA, 100 bp, Homo sapiens
  misc_feature (1)..(100): DMR1:185979201
gtgcatgacttgaatgtccaggtgaaaaaatggatttgatgagctagaagttagagagccccattccaagtttgataggcaggaaaaggtacatgaaagt

SEQ ID NO: 151 - DNA, 200 bp, Homo sapiens
  misc_feature (1)..(200): DMR1:187014501
taagtaaatatatggtatatgtaaacatacatgtggcacatataaatatatatggtgtatataaacatatacatagtttacttttcctgaaaatcatgtaaagcaagcttataattctcgttttaggtgtaaaaaagcattattagccaaacgccttgccttatttaactgagattgtaaggaacggattccaaaattca

SEQ ID NO: 152 - DNA, 1100 bp, Homo sapiens
  misc_feature (1)..(1100): DMR1:187877701
gataagaacgggagggctgacattccatatttggctaatggcctacaatgaaagacgagaaagagagcaataagtgtgcatgcctcagttgtaatataagaagaaactctgcatacaagctggggggaaaacaatgcaaggttgaaagcaatggtcaaaaaaattacagctctacttctttagtattctggcaatcaaaataacgaattaaccatacaattatctaaattctgattacaatgaacagattgcaatagttttatgtcacttttgagttatagaagtttgttctacatctatgtttctttggcaaaattctctttattaataatatttctttgtaaggcagttaattagctgaaggctaaaactttagatgtgaggcagattttttgagttatcttttcagaagataattaatttttgatttgtattatttaatcacatggggtgtatggttcctgttattttgaatgcaaatcattctataaagtaaaatgtggagaggagcccatgcatgtgtaacttttaatagaacatatttgttttgatatttcatcttttctttctttagctatcttccctgaggttctaaaccctaaagtgtaaatattaataagacaaacactatttctcacacatttccctctaacagctcttttagaaatgcaaagggaatcagcaagttttatttctacaggtagatcttcctacattcagatgttattgattttttttctttcctgaagaagttgataggatctttataggagaaaaaagtatatggttttaaaacctgaacaacaaaatctgttgaaggtacagatattaacctctatgtattgagggcagagttaagttgattagttatctgttctcaatttgggggtgctccatgtttctgttgaccgcttttgttcagtgtcttgtgttgaagctcctgagtttttaatctcacatatcctagcacagtccgtattagagatataatcactcaactgtcaaatctattttgaaaaggattttggagagagagtacagcgatttattctttacttttataaaatgatcttttctaacaatctcactgcaagcacaca

SEQ ID NO: 153 - DNA, 300 bp, Homo sapiens
  misc_feature (1)..(300): DMR1:188058601
tacatagaataaaggtgtatatgtacacaagtacgtatttggatttttaattttttatcgatacaaaatactttaaactttatgaggttatatgtgagtatttattataggcatagaatgtataatggtcagatcagaatcttagggatatccgtcactccaaatacttatcattttcgtgtgttggtaaaattttaagtcctctcttgtagctactttgaaatatacaatacattgttgctaaccatattcaccctactctgctatctaatattgtgacttgcttgttctaactgtatg

SEQ ID NO: 154 - DNA, 300 bp, Homo sapiens
  misc_feature (1)..(300): DMR1:192083501
catatttcctacacttctttagtgcctaatacaaagtatatttacagtaaatgaatgaggaaatgaataaaagttaggtgattcttacacagatctacattatttaaacagactagcaaaatagtataggtaaaggtcaattaacacttatgtattaccttctatgtgctatatcttacggtatagagtggagcaggttagtgtataaaagataacctatttgtggtttcagatagagctgaattcaaacctcagcttggccatttacttacatgacttttacaagttactgaactgctt

SEQ ID NO: 155 - DNA, 1800 bp, Homo sapiens
  misc_feature (1)..(1800): DMR1:193740601
accctcaattaatgagggaaacagaaagctacatattttaaaacaatctgtaatatacgtgttatgtaaaacctagagtatgttttggggtatcagaggaagagtttatggaatagggagtctgaggaagatgagtagaaatttcctagaaaaaatggaagacaaagaataaatcccagcttctgaggactgagtaagcacaaacatggagataagcagaaaagtagacatgatggacactgtaaagaatcaggtctaagtttgaaggaggaagcataaatataagaggcttgaaagaggtaaagataccccggagttccaagagaatgttggagaagggagcctgagtggagacttgtctctttctataaactatggacccagggtgttcagagagatttgcctcagacatagcctaggagaatgacatgaaatgttctgtggaatactggagaggttctgttcttccagctttatcatatttctatatcttctaattacaaaatttaatgaaattttaatcttttgatataaattcaaaaggagttacatacattgcaaagggagccctccccaacccgtccctctttcttgtatagtttgacattcctctcagccttcacatgaattcaaattctggtgttcatctaagttggcaggagtatgggaagcaagggagtgtgcaggtagagtgaaaggtggtgggggcactgtttttcttaattacatgttaatatgctttgtcttgttagctttggaggatttacatcactggagcacttaggttggagcatttacatctcattgcagctttacaactacctttatctcttattgtttttcttgcttcctgctgggaacctactgtgaagtacagttgactctagctgcatgagtttgaactaggctggtccacttttaagtagattttattccacctctgccatatctctgagagagcaagaccaatccctcttcttccttctcatcctcagcctactcaacgcgaagacaatgaggatacttttatgataattcacttccacttgataaataataaatatgttttctcttccttacaattttcttaacactttcttttctctagcttactttactataagaatatattatatactacatacacaaaatgtgtgttaattgactgtttatgttattggtaagtcaacagtaagctatcagtagttaagtttttgggaagtcaaaattatacgcgagtttttactacactgggagtggtggggctcggtgccccccggccctttcattgttcaagggccaactgttagtgtctaatgaaatattgaaaactacttgttacaataatgaattcatacatagatgaatacatgaaataatactgtttattttccaagtcctggaaaattttagactagaacataagcttctaattccctgcacacttttagtctcactctagttatgagttttttttttcttttgcaattgtgaacagtttattatttcctatactatggaaccacttgtaaattatcccagttcttttccttgagttctcatattctctctctctctctctttttaatttatttaagctctgggatacatgtgcagaacgtggaggtttgttacacaggtatacacatgtcatggtggtttgctgcacccatcaacccatcatctacactaggtatttctcctaatgctatccctcccctagccccccacctcccgacaggccctggtgtgtgttgttcccctctctgtgtccatgggttctcattcttcagctcccac

SEQ ID NO: 156 - DNA, 200 bp, Homo sapiens
  misc_feature (1)..(200): DMR1:193795801
atacatgtgccattgtggtttgctgcacctatcaaccgatcatctaggttttaagccccgcatgcattaggtatttgtcctaatgctctccctccccttgggccccaccacccgacaggccctgttgtgtgatgttcccctccttgtgtccatgtgttctctttgttcaactcccacttatgaatgagaacacatggtgt

SEQ ID NO: 157 - DNA, 300 bp, Homo sapiens
  misc_feature (1)..(300): DMR1:194318501
attgttttgttagtgagtatttaggaagaaatatattgcatggcctttatttcctagtaccttaattaaatagatacgtttcaattaaggtaatgcgacacttaattactgcacgtgtcataaaagctatgtagaaaataacaagtagatttcttagtttaaatgccattccttattttataaaccatatatgaccttttatgttttctcctttctgataaccatggaaatatgttaaaacaaaacagaaatagaatcctgacaagaaaaaaacaattatccaatggaagaatatgccaa

SEQ ID NO: 158 - DNA, 1400 bp, Homo sapiens
  misc_feature (1)..(1400): DMR1:194663601
aacaaagctggaggcatcatgctacctgacttcaaactatactacaaggctatagtaaccaaaacagcatggtactggtaccaaaacatatatatatagaccgatggaagagaatggaggattcagaaataatgtcacacatctagaaccatttgatctttgacaaacctgacaaaaacaagcaatcgggaaaggattacttatttaataaatgctattgggaaaattggctagccatatgcagaaaacagaaactggacctcttccttgcactttatacaaaaattaactcaagatggattaaagacttaaatgtaagacctaaaaccataaaaactctagaagaaaacctaggcaataccaattagaacataggcatggacaaagacttcatgactaaaacaccaaaagcaatggcaacaaaagccaaaattgacaaatgggatctaattaaactaaagagcatatgcacagcaaaagaaactatcatcagcataaacaggcaacctacagaatgggagaaaatttttgcaatctatccatctgtcaaagagctaatatccagaatctacagggaccttaaataattttacaagaaaaaaacaaacccatcaaaaagtgagtgaaggatatgaacagatacttctcaaacgaagacatttatgtggccaataatcatacgaaaaaaagctcatcatcactggtcattagagaaatgcaaatcaaaaccacaatgagatactgtctcacaccagttagaatggtgatcattaaaaagtcaggaaacaacagatgctggagaggatgtgaagaaataggaacacttttacactctcagtgggagtgtaaattagttcaaccgttgttgaagacagtgtggtgattactcaaggatctaggactagaaatatcatttgacccagcaatcccattactgggtatatacccaaagtattataaatcattctactataaagacacatgcacatgtatgtttattgcagcactattcacaatagcaaagacttggaacgaacccaaacgcccatcaatgataggctgcataaagaaaatgtggcacatatacatcatagaatactatccagccataaaaacggatgagtttatgtcctttgcagcaacatggatgaagccggaacctattattgtcagcaaactaacacaggaacagaaaatcaaacaccgtatgttctcactcataagtgatagttgaacaatgagaacacatgaacacagggaagggaacatcacacactggggtctgtcacggggtggggagctagaggagggatagcattaggagaaatacctaatggagatgacgggttgatgggtgcagcaaaccaccatagcacgtgcatacctatgtaacaaaactg

SEQ ID NO: 159 - DNA, 100 bp, Homo sapiens
  misc_feature (1)..(100): DMR1:195733101
cccaccaactgatctcttcactcaccctgataggtggcttgtgggggtgggaagaaccttggggtctgcatcaagtagaactgaggccctaatggccctc

SEQ ID NO: 160 - DNA, 500 bp, Homo sapiens
  misc_feature (1)..(500): DMR1:196304301
tcattttctctacctcttatattgttataagaaatgaaaacagcctagatttaactatttatttatttttagaaatgggatctcactatgccacccaggctggagtgcactgccatgatcatagctcactgcagcgtcgaaattttgggctcaaggaatcctcctgtctcagcttcccaggtcactctgattataggcacgagccgccacacccaggttaacacattttacatgtataagactgggtcttttttttcctttcacatctaattctctcagtacactactatttagtagtaagtaaaagctgagtgcaaaaaccatctacacccacactcagcctgtatactgaaaatggaaaccaaatctttctgaccatataacattactttgcaattccattgtctctattagcattatccggatctcttcccaatcccagtcaagtccctgttttgaaatatcatcattaaattaaattccagttctcagtatatttt

SEQ ID NO: 161 - DNA, 3500 bp, Homo sapiens
  misc_feature (1)..(3500): DMR1:198312101
tgccacaatttcagctcctgttattggtttattcagagattcaacttcttcctggtttagtcttgggagagtgtatgtgtcaaggaatttatccatttcttctagattttctagtttatttgcgtagaggtgtttgtagtattctctgatggtagtttgtatttctgtgggatcggtggtgatatcccctttatcattttttattgcatctatttgattcttctctctttttttctttattagtcttgctagcagtctatcaattttgttgatcctttcaaaaaaccagctcctggattcattaattttttgaagggttttttgcgtctctatttccttcagttctgctctgattttagttatttcttgccttgtgctagcttttgaatgtgtttgctcttgcttttctagttcttttaattgtgatgttagggtgtcagttttggatctttcctggtttctcttgtgggcatttagtgctataaattgccctctacacactgctttaaatgagtcccagagattcttgtatgttgtgtctttgttctcgttggtttcaaagaacatctttatttctgccttcatttcgttatgtacccagtagtcattcaggagcaggttgttcagtttccatgtagttgagcgattttgagtgagattcttaatcctgagttctagtttgattgcactgtggtctgagagatagtttgttataatttctgttcttttacatttgctgaggagagctttacttccaagtatgtggtcaattttggaataggtgtggcgtggtgctgaaaaaaatgtattttctgttgatttgggttggagagttctgtagatgtctattaggtccgcttggtgtagagctgagttcaattcctgggtatccttgttgactttctgtctcgttgatctgtctaatgttgacagtggggtgttaaagtctcccattattaatgtgtgggagtctaagtctctttgtaggtcactcaggagttgctttatgaatctgggtgctcctgtattgggtgcatatatatttggaatagttagctcttcttgttgagttgatccctttaccattatgtaatggccttctttgtctcttttgatctttgttggtttaaagtctgttttatcagagactaggattgccacccctccctttttttgttttcgatttgcttggtagatcttcctccatccttttattttgagcctatgtgtgtctctgcatgtgagatgggtttcctgaatacagcacactgatgggtcttgactctttatccaatttgccagtctgtgtcttttaattggagcatttagtccatttacatttaaagttaatattgttatgtgtgaatttgatcctgtcattatgatgttagctggttattttgctcgttagttgatgcagtttcttcctagtctcgatggtctttacattttgggatgattttgcagtggctggtaccggttgttcctttccatgtttagtgcttccttcaggagctcttttagggcaggcctggtggtgacaaaatctctcagcatttgcttgtctgtaaagtattttatttctccttcacttatgaagcttagtttggctggatatgaaattctgggttgaaaattcttttctttaagaatgttgaatattggccccactctcttctggcttgtagagtttctgcctagagatccgctgttagtctgatgggcttccctttgagggtaactcgacctttctctctggctgcccctaacattttttccttcatttcaactttggtgacaattatgtgtcttggagttgctcttctcgaggagtatctttgtggcattctttgtatttcctgaatctgaatgttgacctgccttgctagattggggaagttctcccggataatatcctgcagagtgttttccaacttggttccattctccccgtcactttcaggtacaccaatcagacgtagatttggtcctttcacatagtcccatatttcttggaggctttgctcgtttctttttattcttttttctctaaacttcccttctcgcttcatttcattcatttcatcttccatcgctgataccctttcttccagttgattgcattggctcctgaggcttctgcattcttcacgtagttctcgagccttggttttcagctccatcagctcctttaagcacttctctgtaatggttattctagttatacattcttctaaatttttttcaaagttttcaacttctttgcctttggtttgaatgtcctcccgtagctcggagtaatttgatcgtctgaagtcttcttctctcagcttgtcaaagtcattgtcagtccagctttgttccgttgctggtgaggaactgcattcctttggaggaggagaggcgctctgctttttagagtttccagtttttctgctctgttttttccccatctttgtggttttatctacttttggtctttgatgatggtgatgtacaggtgggtttttggtgtggatgtcgtttctgtttgttagttttccttctaacagacaggaccctcagctgcaagtctgtttgagtacccggccgtgtgaggtgtcagtatgcccctgcaggggggtgcctcccagttaggctgctcaggggtcaggggtcagagacccacttgaggaggcagtctgcccgttctcagatctccagctgcctgctgggagaaccactgctctcttcaaagctgtcagacagggacatttaagtcttcagaggttactgctgtccttttgtttgtctgtgccctgcccccagaggtggagcctacagaggcaggcaggtctccttgagctgtggtgagctccacccagttggtgcttcccggctgctttgtttacctaagcacgcctgggcaatggcgggcgcccctcccccagcctcgccgccaccttgcagtttgatctcaagactgctgtgctagcaatcagggagactccatgggcgtaggaccctccgagccagatgcgggatatagtctcctggtgcgccgtttttttaagcccgtcggaaaagcgcagtattcaggtgggagtgacctgattttccaggtgccgtctgtcacccctttctttgactaggtaagggaactctctgaccccttgcgcttcccgagtgaggcaatgcctcgccctgcttcggctcgcgcatggtgcgcgcacccactgacctgcgcccactgtctggcactccctagtgagatgaacccggtacctcagatggaaatgcagaaatcacccgtcttctgcgtcgcttacgctgggagctgtagactggagctgttcctattcggccatcttggctcctcctccccatctatggtgggccttagcttttctaagaggtatgaggagccattgaaatgcttaaagttgaagcatcacctggctagttaggcagtgctagagaaataggaagacaactgaaagcaaagccgtcagctggaagac

SEQ ID NO: 162 - DNA, 1100 bp, Homo sapiens
  misc_feature (1)..(1100): DMR1:201367901
agccaagatgcactctgttggtttttggggttacagagctgtctctcacacacacattcccctggacccaagactgcctgacacaagagaagcgctgggtcaacgtttgttgattgggcaatcaatggttgaatcttagtcaataggagagtcaggtgcacatgggaaagcctgttctggggggtttcttactgcctcaggaatggctccaggggctctcgccaccccctgaggcccctgcaccctcaaccagagacttaccttctgccctggtctcctcggtctcagcctctgcttcagcatcctcttccgctgcctcctcctgctctggagaagtgaagcagacagagtgaagaagcaggccccactcatgctatcaggcagaacccagagcagagaatgggcagcggggagtggggatgggggtcaagacgtctaggtccagatgaatttgggggcaaccaacgtgctggggggctgccattcttggttttgactgtcggctacctcccgccacccagcttagccccactcatcccggcaacctccctgatgatgggactccacctcattccccaactttccagcccagaagttccaccccgtgtctggcaccacagaacatgctctgcttaagccgaggtgtccagaagctcctgtcctgaacctagtgactctagacaccctcaatccacatctcaaagaaaccaaaagagtacgactgtgtggctggatggcacactcaatatctggatcttcgtactatccagaaagtgggcaggatttttctattttcatctatttgtttggcaggatgtggcccccatctcactcaggcacttggtgtagacagacagacaaacagataagggagacaggatgccgcctggcctgggctgtgcctgtaggaagtgttctgtgatgcctgttcactgatgcactgggaagtgggtgcctcttggcagagggagaagaaaaacctcagacaggaggaagacaccatcgtgggagaagggttggccttcattccctctgtcctcccttcccaggtctgagtcctctctgaagcctggagatgccttttatttgatccctgcagg

SEQ ID NO: 163 - DNA, 2800 bp, Homo sapiens
  misc_feature (1)..(2800): DMR1:203107301
taggttcttgaaatggatgctttgattattgattttcatgcttcatttctattgtatgtattaaggctttatttctaataatatgaatataaatttccttctaagaactgctttagttgtgtctctcatgttttgatatcttgggtctctataaccatttagttcacagaattgtctaatttccattgtgaattcttctgtcctctgtgggtgatttagaagtatgttgtttaatttccagacatttggtgatattcgagttttttgttactggtattttgcttagtttctctatgggcaaaggacatactctgtatgatttcagttatttgagggacgttgtctgtctcgttcctcaatgtataccagtttctagtgcagtgaccagaatatattaggagcttaataaaggggtggtccagttcttgacttcaacatggggcacagcagtgatctgatttgccccctgtgctacaagtgaacctcaaaatctggaaagatttcacacctgaacacatcctgggattttgagattttgattgaaattgcattgaaactacagattaatataggggagaattgacatctttataatttgaagataatcgacatatttataattttatgtatttcaaactataaataggatatctctttccacttatttaactcattatgagaggcaacataatacaagattaagagcatggattcttttccaaagttgaatcagtaataaaaacctgctagccaaaaaaaagccctggatcagatggattcacagccacattctaccacacatataaagaagagctggtaccgatcctacagaaacaattccaaaaaatcgagaaaaagggattcctccctaattcattccatgaaaccggtatcatcctgataccaaagtctggcaagacacagcgaaaaagagagaactacagaccaatattcctgatgaatatagatgatcaaatcaacaactgaattcagcagtatatcaaaaagttaatttgctacaaccaagtaggctttattcctgggatacaaggttgactcaacatatgcaaatcaataaatgcgattcaccacataaaattaaaaacaaaaaccatatgatcaactcaatagatgcagaaaaagcttttgataaaatccagcatcccttcatgataaaaaccctcaacaaagtagtcatcgaagtaacatacctcaaaataataagagccatctataccaaacccacagctaacattaaactgaatgggcaaaagctggaagcattcccttttagaactggaacatgacaaggatgccccctttcaccactcctgttccacatagtactggaaatcctagcctgagggatcaggcaagagaaagaaataaaaggcatacaaataggaagagaggaagtcaaactctctctctttactgctgatatgattctatacctagaaaaccctcaagactctgccagaaggttctgagacctgataaccaacttcaggaaacttttaggatacaaaatcaacatacaaaatcagtagcatttctatacaccaataatgttcaagctgacagccaaatcaagaatgcaacaatagccatgcatgtgcacctagggatatatctaaacaaggaagtgaaagatttctacaaggagagctacaaaacactgctgaaagaaatcatagatgacacaaacaaatgggaaaacatcccatgtccgtagactgaaagagtcaatatcatttaaatgtccataccacccaaagcaatctacagattcaatgctattcctgtcaaattacaaattctgtttttcacagaattagaataacctattctaaaattcatatggaaccaaaaaggagcctgaatagcaaaaaaaaaaaaaaaaaaaaaaaaaaaaaaaaaatcctgagcaaaagaaaaaaaaagccaaagacatcaattacctaacttcaaactacactacaaggctacaagtagccaaaacagcatggtactagtacaaaaatagccacgtacaccaatggaacagaatacagaacccagaaataaatctgcacaacctacaaccaattgatctttgacaaagtcagcaaaaagaagcagtggagaaaggactccctattcaataaatggtgctgggaaaactggctaacgatatgcagaagaatgaaactggatccctgtgtatcaccatatacaaaactcaagatgggttagatacttaaatgtaagacctcaaactataaatatcctagaagaaagcctagaaacagtccttctgcacatcacccttggcaaagaatatgactacgtcctcaaaagcaattgcaacgaaacaaaaaactgacaggtgggacacaattaaactttaaaaagcttgtgcacagcaaaagaaactatcaacagagaaaacagacaatctacagaatgggagaaaacattcacaaactatgcatctgacaaagcactgatatccagaatctataaggaacttaaacaaatcaacaagaaaaaaaaccaaataaccccattaaaaagtgggcaaaacatgaacacttttcaaaagaagacatacatgcagccaacaagcatgtatgtcaacaatctcaacatcactgatcattagataaatgcacgtcaaaaccacaatgagataccacttcacaccagtcagagcaattattattaaaatgtcaaaacagatgttggtgaggctgtggagaaaagggaaagcttatacactgttggtgggtaggtaaattagttcagccactgtggaaag

SEQ ID NO: 164 - DNA, 100 bp, Homo sapiens
  misc_feature (1)..(100): DMR1:203954301
attttcaaaaacataggacacaagtttttcagcatgcaaaagctggaagaatttaaccagcacacttgaacaataagaatgttgaaagagggcaggaggc

SEQ ID NO: 165 - DNA, 500 bp, Homo sapiens
  misc_feature (1)..(500): DMR1:204644301
tgggctttccatctgtaccatgcagcctccctccctttctgtcctggtgatgggggaggtcactttctctcctttctcaaagggtagaccccttggctggcctagcagctcccccgacagccccatgcctgcccacctcttcagatcctctcctcctcttctttttcccctgccctggacaggagctggctgttctcttttgtgatttcaggtctttgaacctgttgttctggaatgtctttccattctcttattagggagctcataattatcctccaagtgccagctcagttgtcatctcctttgtgacaccttccttctctcctcttgctcccacaacacctaccctagtttagcatgagccatggcaagtccatctgcctccccagactgagcttctcaagagcaggggctggctgggcctccctcatccctagcatcccctcacttggcatagggtctgcacatggtcagtgctcaataaatgcagcttggggtaa

SEQ ID NO: 166 - DNA, 2500 bp, Homo sapiens
  misc_feature (1)..(2500): DMR1:204996801
tgtctgggtggcatctggccagtgtttggcctggggctccatgccatccctggggtctgagcgattcagcccgtgcccccttcccgtctcatcctcacgcatccttggctgggtgcatgctgggtgtttcgagccacgcagaccatgagaagaaaatgaaacacacacagggcttcattctcttcctctcccatggttgtgtcttctgttgctgcgacccgtctgacccagtccgttatgcttggggaggctcctgatgactaagccccgtctcctcaccgggctgcctgccttgcacgcgggggccgtgtgtccaggctgggcacagccaaaccaaccagactcggctgttttacatttccctctcagctcctcccacattgcccccgactaccgtgggtgcgacgggcgctgtgagcagtaccgatgctactgccattgctgccaccaccgaagccacaacagtccccatcatcccaactgtcgcacctaccaccatcgccaccaccaccaccgtcgccacaactactacaaccactgctgccgccaccaccaccacggagagtcctcccaccaccacctccgggactaagatacacgaatccggtactgcgcatcgcccatgctccccatcccctcctggcccgcctccccagcggcctccagacgaacccacaggctcccccagcgaggaggtggggtctggggtggtgtttgccaccacctccctttgtgtttcctttggaaactcacccgtgactggatgctcagtcccgtagcctggaggcccagatctccccagcctggccctgacacacacacactccttgggtggtcctccaccactcagtaccccaaattctagcttcagatccctgttccttaacagacggccaagctccttgggcagggcccccaggttccagatgttaggaccgcctccagctacatgtcaggcagtcagctcagagccgagcactccagaaggaagacagcgtgaggaggggaaaaggaccagatactgtacagctggcctgagggagtttcctgccctggccacgtctgcgtccggcctagaggctgagcagcagggagtggctgtgccaggcagctctgttcccagaacccctgtcccttccttgcctctccttccgcgaggaacacttacagacttttcttttacaaagtcagagcttccaggaaactgtattgccaaggaggcccttaatgccaaactcacattccccaagccctcaaatgcaggcatggagggaaaattacgggcattctcagagcccctggtaagaatcgatcccagggctggtacgctgagccacgagaatgcactgttcctgtatcatgcagccaggccaggaagctctgttcttccagttcggggagaccccaggggaattcagcgatacttccaagcactgagcatcagtcttttattaccaacaaggggaaggtctgtagcttcctgagctcacaggccagctataaaatcagcgtgaggcagccaggaagcacccagaactcttctgccacagttgtagaattgtaggacccagtgggcaccacctttgtctcctgggcaagtccctttaccttccaaggcctcctttctcccaccctgctccacttttctcagcctcctgaatgaggatggaggcttaatagacatgagaggattttgttttcagttcaatgacatagagttaagtgagctgtcagggaagacgagaggcatagctgctgtgagctcctgagaccctgaaaatgctggtttgcttcacaggtgccatctagaacttaacaggcactttcggaaaaagttggctgaggaggaacctgctggggtattagaagctgccaccagcgggttggtgattgatgttctttggggccacggtgaggcatctttttcattaaaaagtggggctttgtgtcctacaagtgctttgagttcagagaaaagatgaaccaaaaatgaagaaaggaagtggctcttgcttccccagcaaagagttacttgccttctgaaacacaggccttgttgccacataggaccagcccctccagagtctcactcctcaagttctgtgagacgctgcagaggacctggccatggccttgatcttatctagaccttgggaacacccctcaaccatcctcacctcacttcagcagaatggctgtctaggactttaaaaatgaatgttcacctttatcgtgccttacatcttggaaaaagatgtttcataagtttactcttctcagggtgaaataggcctttttatttgtccttcgcctgtctttttcagatttccagggagattccttaattcttacattccaggagtcagtgagacaatctatgcttcccctccctgaccctttttgtgtttctcggtgttgatatttcacatgcttggtccttctctttgaactttttagtgcttccgggtcatcatcctgatctctctgtggcaatgccttc

SEQ ID NO: 167 - DNA, 500 bp, Homo sapiens
  misc_feature (1)..(500): DMR1:205889601
gagtttgtattggggccaagcagtgttgcagaagaaaataagacatttagattttagttcaggtgatagttgaagaaattttaagttcttgagaacacaggctaagggagaagaaggaggaatggagggtggaagtttgcccatagtgaaggaggcaagtttaaagagaaaggtagagacatggagaaagggttggggagcagccctgggctgcaatgtgggtgagcagccaaagcaggcatccccgcaattgacttgccaccaagggaatgtggttgaatgaccaaggcaggcatccctgaagatatcagacgccaatggaatgtgggtgaataatcaggcaggcatccccggaatgattaaacactaagggaaggctgccttcctgagtacatgaccagcaccagagttttgggtccatggataaaatgtgtctcctttgtctctactagaaaatgaaaggaattgaaattaagagaagagagggagtgaagggtggc

SEQ ID NO: 168 - DNA, 1800 bp, Homo sapiens
  misc_feature (1)..(1800): DMR1:206856201
ctgcagcgcttcccccagggcagaaagccgtcttcctcttgctccttcctctctacctccactcttagttgtgttccttgggacccagaatggttttccagttcttgacaagtcagagatacctcagtatccatttcctgtctcagattctgagcttccgagggtacagctactttgtaaatggctgcactcagtatataaatgttcattgaatgaatgaatacatgcatgaagcaaaggcggagcccacttaaaggaagcctgtggctttgtcattggtttcggaacttctcagccttccttttatcctccacttggatcctctgcctctgttccatgtccttgatttctagctccatggcaaaggagtcagttttctgtctgtccttcttgtctttcatttctctttcacccctgattattgtcctatggtccttaacttcacatcctgaagcctgaagactagtgtctccactcaactccttggctggccagggctctgggtgtcttgctaactggggcccttctcacctaggagtggtgcagtcccaagcgtgcaggctagagggcatcatctgttccgacaaggtcagtagtggcagaagcagcaccttctcacttgggccagaggttcagctttttcagaccagccgccctatgactggggagaaagaactcaagacttcacctcttcttcctcacctcctcaatggctccaaaatgtccctcacacctcactcaagaagagcaaggtgtaagtctagatgagatacccctgaggcagagtgcaggcagggtccttctgataccactaggtggctagaaatggtgtctaatgtgaaagttgttggatagtagaaatctcagtctctctgtaggaaaccagtgaatgaaaaagtactttgaaagccagagtttgagatcagcctgggcaaaatagcgagacaccacagctacaaaaataaaaaattagccaggcatggtggtgaatgcctgtagtcctagctactaaggaggctaagatgtgagagttgcttaaacccaggagtttgaggttacagtgagctatgactataccaccgcaccccagcctggatgacaaaacaagaccctgtctctatatgtctctctaaaaaaaaaaggtgctttgaatttgaaattagggaaacacatcagtaagcaagtcagttgacctattatgatggatgatgttggtctagattctgagtgggttaccaaaggaaaacagtcactgattcttagaacgtctcagagtgtagtttctcaagttcttgctcacagttcattgcaattccaccgtttttttcaactttcttcaatacctgctcctgaaccccgcccagcatccccgggtcaccatacctcaggtacaggaggtagaagtgctctctggcctcaggaattttgttccatttttctttactggaaggagtaagggttcttctgaccctgccacattctccatcctcaaagctcacaaacccattagtctgtcaatgggtttgtgacatactaacccttgctcaaaccagactttctctaagaaatctcagataccctccttgcccctcagaaggaatctcagtgcctttctcctctcctcacccaaatgcctattatgaacatagactgaattttttaggaatgtcctgataacaaaaatccttcccatcatcccctttatgtcgcctcatttttctcagactgtgtgtcacaactggggagttgtggtcaccatgcccacaggtattacagcaaagcctcttaaccttttgtgtg

SEQ ID NO: 169 - DNA, 300 bp, Homo sapiens
  misc_feature (1)..(300): DMR1:210435701
tttctgtaatgattagttatgttgaacactttttcgtatattttttggccatttgtatgtcattttttgagaaatgtcttttagatcttttgtccatttttaaatgggattctttcttttttttgctgtcgagttgtttgagctccttgtatattctggttattaatcttttgttagatagtctgtaaatattttctcccattctgtgggatgtctcttcactttgttgattgtttcttttgctgtgcagaaactttttagcttgatacaatccatttatctatttttccttttgttgcc

SEQ ID NO: 170 - DNA, 300 bp, Homo sapiens
  misc_feature (1)..(300): DMR1:211071401
tactagagagaagaactgttcaggatgagaggattagcgtcacaacatttaagtggacactcacgatacttgagttcacagcaagaacaacaggaagttgctacaaaactattacagtagtaaagtgtatactttagttcatgttatgcagttatgatttaatactgcatctttacgtctgtaaatgttgtttgtgtggaaacgtttttataaattttaactttttataatagatttgtttatattttacgataataataaaatagactagtgtctacatatattttatgcattcatgac

SEQ ID NO: 171 - DNA, 2600 bp, Homo sapiens
  misc_feature (1)..(2600): DMR1:211796301
gattagggtgggccctaaacctaaatccaataagactggagtccttataagaataggaaaatgtgggtcagagagacacacagggagaccaccacgtgatgacagaggcagagattgaagtgacgcacctacaagctgagggacaccaaggatggtggacaaccaccagaagaagctggaagaggcaagggaagagcctccctgagagtctttcgagagagcatggccctgctgacgccttgatttcaagacttctaacttccagaactgtgaaagaataaatatctgctgtaaaacccactttgtggtaatttgttatggcagccctaaggaattaacataacccctccctcaattttccccatcctctctcttccctttccattctattttccccaaaattatagtctttcttttcttatcaagtataggaaaagaattgcattatcttttaatattcagcacattatatataatctaacattatgtattataaatggtttttaattttcacttctaaatactttcagaaattatactttaaagtataattattaagagttaatccactacatgttttatctctcaatcagaacttagccaaaatttattttcagaccaaatgtcaatttaccaagactcacatagcatgctgaatcaaaaaagtgaaggtggtcaggtgtggtggctcacgtctataatcccagcactttgggaggccaaggtgggtggatcacttgaggtcaggagttcgggaccagcctggccaacatggtgaaaccctgtctcttctaaaaattacaaaaattagcaggtgtggtggcatatgtccgcaatcccagctactttggagcctgaggcacaagaatcgcttgaacctgggaggcaaaggttacagtgagccaagattgagccactgcactccagcctaggtgacaaagcgagactctgtctcaaaaaaacaaaacaaaacaaaatgaaggtacctagatcaacttttctttccttttctttttttttttttttttttgagtcaggaactcctgggctgaagcaatccttctgtctcagcctcccaaggtgctgggatgacatgcatgagccaccacacccagtttggatcaactttttgccaagaaattatcctgaggtagcaataaggtcgtgttgaattttataataattctaattttattcaacaacaaatttaatttccaatatatatggtattcttcttttagagcataatttaaggaccactattagaaagttaaatgaccaacaaaatcagtattaaaatgtttgtagtgaaagagcaatttattacacagatgaagtagctatgctcctcagattatgccttgctattccaggaccagtaaatatagtaataaagctaatatcttaaccaagggatagaaaagaaattatggatgtctacagttcttacactgcacttgattagaagaacaaaaatattctaacacgctgctctatgaaatgaattctcaaaaaagaattgggtcaggtccactatttccaaagggaaaaaggacaactgaataaaaactggaggaaaaattttctaattgtaataaattttaaaattcttattgaaaaccaaagctaaaggttatcatctactacatacacacaacacacacacatacacacacacattctaacatgtatatcaatatacttttcccaaaagttatagattagaattaatctggacagttcacatctcaaaaagaaaatagaaacaacccatcaaaaactccttaacaacagtgacactaaagccattatactggcctacaaaacagaattaacagagagaagaaaggttgcttattatgcccgcaagctgatgcaacaaactattttatccttctgtgtcttcattttctcacttatgaaacaataatatcattaatgctacgtaaacatgttgcaaaaatgaggaagatctaattgacagtaccatagagatcctgagtaatgggattaaagtcacttttggaatcactagtaactaaaagagccctatgcctactgtgtcatatgaaaatcagtctaatagtaaagattaaagagccagctgggcacagtgcctcatacctgtaatcccagcactctgggaggccgaggcaggaggaccccttgaggccaggagttcaggaccagtctgggcaacaaagtgagatctgtctctataaaaaaatttaaaattagctgggtgtggtggcatgtacctgtggtcctagctactctaggggctaaggcagaggatctcttgggctcagaagctcaaggctgtagtgagctgtgatcatgccactacactccagtctggttgacatatatagacactctctctaaaaacaaacaaacaacaacaacaaaaaacaaataaaaaattagagagccaaaataatccataagtgaatttcacatagctggagaactgtggctttcagcagtccaggtttgaggcagacaggattggattcatccaagggagggtgttagttcattaaaagtggccatgagagagtggcttaaagtactgattaatggagtggagactggtgagg

SEQ ID NO: 172 - DNA, 700 bp, Homo sapiens
  misc_feature (1)..(700): DMR1:212202901
agctagtcattgtgactcagctctgcctgcgaagcgcctacagtctagttgagaaggtaaggtacataagtataactatattaaaaagcagttcgaggccacatttaaatatatcagcaagtgaacaatacagacagtaaaagcagaaatcctgtgagttggaaggttagaggaagcttcgtgggagaagtaggattctcgatgaatcctaaaagatgggtagattgttggagaaacggagataattaaggtcccactgctagggagattgtatataagcagaggaggaaatgaacgcagcatgttgggaaaacctatatttcccaagctattttattattgattttcatcatctcctgaacttcagttgattggattggtttttgccattttgtcatcattccttaaatctccagcgcaatctccagcatttacctttctttatttctgtggacgagaaacagatctgtctttttgccttttggggcactggcttcctgagtgtagaagtcatgactgtgatgtgcagtatgcctgggaaaaataaaaggagttactccttgcacccagggttagactttcctcatggcaagagattttggggaatagttttcggcagtgatcccatcttcaaacacttctgggatactcatgactagctaactcctgctggcggctgcctcccatcactgacctcgag

SEQ ID NO: 173 - DNA, 900 bp, Homo sapiens
  misc_feature (1)..(900): DMR1:212407001
gaataaaggctcccaaagatgtccaagtgttaatccttagaacctgtgaatatgtcaagttgcatggaaaaggggaattagggcagcaaatgggactaaggttgctaatcagctgactttaaagcagggagattatcctgggttacctgggtgggcccgatgtgatcacaaaggccctttaaacacagaaaagggaggcaggagagtcagcatcagagtgatgtcatgtgagaaagactcgacgagccactgctggttttgaagctgcaggaaggggccacaagccaaggaatgcaggaggcctccagaagctagaaaaggcaaagaccaagttctctcctcaagcccctagaaaggaattcaggcctgctgacagcttaattttagcccagtgagatccattttggactcctgacctccagaactataagataataaatttgtgtttttttaggccactaagtttttggtaatttgttatagaaacaatagaaaactaatatacaggtctttcaagttgttctcccgggagccttagggctttagaggcaatgcctcatgtcagagggaggattagccgtgctactatcttttacatattgggctttaataaaagaatgcttattgttttgtgtgagtgtttttggtttttgtctgtttggtagaggcaggatctcattttattgctaaggctggtctcaaactcctggcctcaagagatcctcccatcttggcctcccaaagtgttgggattaccaccacttaaaatagtttttataaaccactgatgtaggccaggtgcggtggcccacgcctgtaatcccagcactttgggaggctgaagtgggcggatcacctgaggtcatgggtttgagaccagcctggccaacatggtgaaac

SEQ ID NO: 174 - DNA, 300 bp, Homo sapiens
  misc_feature (1)..(300): DMR1:212783601
gcacaatctaaacacaacatgtacctcactggagggacaatgctattcccagcaaacctcccctccccaccaagggaagatttgggtccaattttcttgtggatttcctattttttatttattctagtcctaataaatctgaaaagatgagggtgtgatatggttggtcattgatatctatagtaattataagaaggaagtctacggctctgcttgtctaaaaagctcgtgctgaaggagctgaattcctggtcttgtcacccagatgttcatgatttttgcagcaaaacaaattacacc

SEQ ID NO: 175 - DNA, 1500 bp, Homo sapiens
  misc_feature (1)..(1500): DMR1:212885401
gtgaaagtaaatacatgtatggtgtataaccaaaggtattttgattttaaaggacaatttgctttttatttcaagaaatttaaaacatgttattacttaaagatacggattctaaacactagtaggttctcttcacttaacaagtgtttcttttttttttttttttttgagacggagtctcgttctgtcgcccaggctagagtgcagtggcgcaatctcggctcactgcaacctctgtctcccggcttcacgccattttcctgcctcagcctcccgagtagctgggactacaggcacccgccaccatgtccggctaatttttttatatttttagtagagacggggtttcaccttgttagccaggatggtctcgatctcctgaccttgtgatccacccgcctcgacctcccaaagtgctgggattacaggcgtgagccaccgcgcccagcaacaagtgtttcaatactctatgtattgtattattttattggtcacatttatttcaattctgagaacttggataccttatgagccccttctttctaacagtactcatacctaccacttccgaaggaattatttctattctaaaaagagccatttctgagaaatatttgacttttgatagactttatcttgttcttttttttttttttttttaggtggggtctcactctgtcacccaggctggagtgcagtggcaccatcttggctcactgcaacttctgctttccaggctcaagtgattctcccacctcagcctcctgagtagctgtgaccacaggtgtgcgccaccacacccggctaattttttgactttttgatagagacagtgtttcaccatgttgcccaggctgattttgaactcctgaggtcaggcaatctgcccacctcagcctcccaaagtgctgggattacaggcatgagccactgcacctggcctatgttgttctttttttatgttgtgggcttaaatacaaaaacaaaaaagtagttctttccaatcaaaaaattattgttgagcataaggctttattttggtaagaactttttggctaaagtacgcccagactacagtaccacttaactgtaatataatgcataatgtgaaaatgctggtttgacacaatgtcttatgcctgtaatcccagcattttgggaggccaaggcgggtagattgcttgaggccaggagttcgagaccagcttgggcaacatggtgaaacgccatctctactgaaaatacaaaaaatagtcaagtgtggtggtgggcacctgtaatcccagctactcaggaggctaaggaaggagaattgcttgaacccaggaggcagaggttgcagcgagctgagatagcgtgccactggtctccagcctgggtgacagagcaagacgctgtctaaaaaaataaaaaaaaaagaatatactctgttaattgtacattatatggaaccaccaaaaggctaataccaaagaaaatgaatgataccaactgggagac

SEQ ID NO: 176 - DNA, 600 bp, Homo sapiens
  misc_feature (1)..(600): DMR1:214065601
aggatggcatcccacaacgggaggattcctgaaaactgctctcggctccttccatccacctccatcctggactcctctctactccctacacaccccccttctccactggagctgtgtcattgacaacattccctcgaaatctcctccaatatatcttggcatgccagttctttccctcatctcctattgctcatctgtgtttgttaaatattatttggcacataggaagctcttcagaaaaagagacttggattgcaggggatgggcggtgggcttgtgatttgcgcaggaatgaggctgtgctggctcttccccgcttcctcatccctcccccacccacatcaacaccataacacagacaggcacacaaatgtgttgagaaagaaatgcaccagggccataaaaacctttaggaaacaaggcctggtagcttacctagacttaaaagcttggattgtgaaagcagctagaaccgaggctgtcgaatcccccttcttgttttctaaacttgtctctcttcttggcactacaaccagtaccttcaccaagaaactctaccattggccagggtctggcggcacatgctctctaaatgactga

SEQ ID NO: 177 - DNA, 500 bp, Homo sapiens
  misc_feature (1)..(500): DMR1:215393901
ccaccaaagattccctgaacattttactgtcgaatcaataaaaagagaagatgcaaacctttatcgattatagtatccaattgtgtccagaattggtgggttcttggtctcgctgacttcaggaatgaagccgcagactctcccagtgagttcttaaagatgatgtgtccggagtttctttgttctggtgggttcgcggtctcgctggcttcaggagcgaagctacagactttcgcggtgagtgttacagttcttaaaggcggcgccacgtctggagaagtttgttcctcctggcgggagttgttcgtccctcctggcgggttcgcgatctcgctggcttcaggactgaagctgcacaccttcgcgctggcttcaggagcaaagatgcagaccttcgtggtgagtgttacagctcacaaacgccgtgcggacccaaacactgagcagcaacaagatttagtgtaaagagcaaaagaacaaagcttccacagtgtggaaag

SEQ ID NO: 178 - DNA, 2700 bp, Homo sapiens
  misc_feature (1)..(2700): DMR1:216459201
gaaatagttttcaaaaaagaaaggaaacttgaaattttctaatctctaaggattgatgtggtttgcccccctgcccaacccctgaattctactcctccttcctccttttctttggaaaataatctgtgtcctaacttaagtatgtttactttttttttccccaggtttgggcctgattttaacagaatacctgtgtcattactattactttgaaagtgaggatgtggggcaaagttttcacctggtattacagataaagtacagataaagaaaatgaagcagtcttctgaaaattatcacaaagcaccattgtatcctaaatattcattaagccgagttgtatggcacaatcccattaaatgagcaaccaaagaaaagtgctagagcattataataaatgaaaattggaaactgaccgaaaaaagagtttacattcagtaactccagtagatgacatttctcagaatgtcctaatgaacaaacaagaaatagccggtcctacttcttcctggtcctcttacctggttgttgttttgtaatctccctttcagtgcattttttagctcctttttagacccttctgtttgatgatcctcaaaattccaccctcacattttttctcagatatcatctatagtgtaagggtgcctggggctctatcttgaattctcatttttcttgtgacatctagacctgcgtgtctgaaaacctatagaacatctctacctaaaacctgctcaggttccttacaagccacttgtctgaatcaattgctcagccaggcattctcaactgtccacccactacatctaatgagtcaacagtatttattgattctgctttatatgcagctctctcagtactatatttacgttaaacaaaattctccttagaaattcatcagcagacaatacatagctaattcaaggaccttcctaaccccagtctctccatcaaccagcccagaaactcttccataaatgttatatatcttatgtcactatcctgcttaaaagtcttcattgacctctccctgtctataacaataaattagtggcttcattgtcatcatttcatccatctatttattcatttatttatccattcatttactcaacaaatagtcaacccctcctaaaaaccgggtactctttgtcttgaacgtgcaatagggagtaaaatacaagtccatgccttctctgagccctggcccttatcacaccttctagcttcaaccccatcctctttccctacttcacgtccaccctatgctccattcacaccacacttcccagagtttcctaaatatgctctgtgtgttgtgcttccgtattgttcacacattctaggctctctattttaacatgacctgctctttttttctctctctgaattgtgaattcctaatcatatataaataccaaagtcagatgtctcttcttctaagaaagatttcttggctctcagagagggtagactactctgttatagctacccatagggttttattcctacaatagacttccttcaattaataaactttcattcaacttctacgatgtagccaacagctaagtgctagatgatgaattgtagttttctacttatttattctttttttaataattcctgacactttacacaatggccaccaagcattaaacatatgtcaggtaacattttttttctaggtccactttgtaaatataaaaaagtagtgtggtcaaaggaattgccttcttctgacagcagaggcaagacaaattaatctaaaataaaccctactcttatctcttctggataagggaggaagaaactttgccttttgaccatttcaactattattattattacccagttagaaagtgaataaatgacctaaatgggaaacctgacataggtagacatattggcttcagaactagaaggcagggcatttttctcatatgtgcagccttgatgtgttctaggaaaatagtgagctttcacataatttactccaagcagttaaaagttttgtgagcacttatctaattacactttaaaatgtaagtatacaaaatgaccccttttgaccatatcagcagtggctgtcttattctcaacctgccacttcttaaaagaacatgaattcttaccaatggctacttttcatatagtttagaataaatgtcttcgtggtctcctagtgtaactcaggagactaacagggtatagcatcttctcctacccagtttctcctttgctctccacccccattccccaaatcccttcccaagacaccaatataaaccctgactgataacattctgtgttcttcaccagtacctggtctattataatctaaaactgggcttctcactgcctgtagaaatcccaagagcatctattgccacatcactcaaataccaacagccagggattctgaagcacaagagtagaggagcaggaagaggctctcagggggcatttgtttcatgcagagccatggagccaaagtcttcctggctgcttttcatatacaggttcattctttgtttaaaagatatggcataaggcttagtgtgtatacaagaactccagctgttggattgtacagaaagggggaaggtattctgttagcatttgagatttccttttaaaatgtgaccagacattcatatacatgtgcagactttcattttaatcagcaacatgcaa

SEQ ID NO: 179 - DNA, 300 bp, Homo sapiens
  misc_feature (1)..(300): DMR1:217663301
caggcatagtggctcgcgcttgtaatcccagccactcgggaggctgagacgggagaatcgcttgaacctgggaggcagaggttgcagtgagccaagatcccgccattgcactccagcctgggcaacaagagtgaaactccatctcaaaaaaaaaaaaaagaacagttgataatgaccaaattgttatcaattgccagcaaacaaggcaaagcatatgcacaaaatactcataattacttgattagaaattaatttaatgattatactcaaaattatgaaatgtcgatggccctaatatgg

SEQ ID NO: 180 - DNA, 500 bp, Homo sapiens
  misc_feature (1)..(500): DMR1:217894301
ttggtcatgttgggtgatgtagcttaacgctgtgggacttggcagatgcttcagatggcccattctctcttgggatccttaatgggttttttaatgacttaatatcacaaatatatccctgcagtgttcttgaattcacctctattctggctgatcttctgtgactcctacagctgctagtcatctgcggggccacttctagtttgtttcttgttgttttttgagacggagtctcactctgttgcctaggctggagtgtagtggcgcgatctcagctcactgcaagctccgcctcccggtttctcctgcctcagcccctctagtagctaggactagaggcctgcgccaccatgcctggctaatttttgggtttttgtttgtttgtttgttttttgagatggagtctcactctatcacccaggctggagtgcagtggctcgatctcgggtcactgcaacctctgccgcccgggttcaagcaattctcctgcctcagcctcc

SEQ ID NO: 181 - DNA, 400 bp, Homo sapiens
  misc_feature (1)..(400): DMR1:220461601
aacctctgctgctgttttctcagatcctgcttttctcactgctctcaatttttgcctctttttgatgtcacttccactgccctatctatagaagcaacaaacacccctataaaatctgttgaccccatgttctatttccttcttgtgacaacccattacctcccaaacaaatgaattcataaccattgatctagactagttcttttctatagctaaagtgggatggctatactacacatatctttgcatagatccttcctaaactctctctcaccctaacacctgcttccttcacctctgcataagcagttggagactgaggtgggtgtggggtgaggaagaacagctcatctcaaattttctaaaatcatccgtcatcaccaacagaagcagatccatg

SEQ ID NO: 182 - DNA, 300 bp, Homo sapiens
  misc_feature (1)..(300): DMR1:220693301
attacaaagtgacaagtagcttttaaagtataacaggctgagcaaaatggatgtacaaataccaaaaatgtcacgtttaatgcaggcgattgtcattctgatcttgtttataatggatcactcttgattgttaagcttgttcccagagaatatgtttttcttttgttgtttcaaacatgtaagtaaaattcccccagtgattcttatcacacatttaaagaactgtatctcttagcaacatcacatacccacacatgcgcatgccccagcccagtgtctctttgagacatcaacagggta

SEQ ID NO: 183 - DNA, 1400 bp, Homo sapiens
  misc_feature (1)..(1400): DMR1:220983901
agacacaagcgctggacattgagaggaacacaccagcagaagggcacacaagtggctggacgtcgagaagaacccactggcagacaccagcagatgcgggcaggccgtctatagctgggtgacctggagttcggcccagggccgtcagaggagagccccgccactgactggcctgacgccagggaaagatcacctcctcttctggctcccatccctccactgagaactacttccaccactcaataaaaccttggactcattctccaagcccaggtgtgatccaatttttccagtacaccaaggcaagaacaccgggataccaaaagccctctgtccttgctattaggcagagggtctaattgagctgattaacacaaaccacctacccatggcaaaactaaaagagcacgctgtaacatgcccactggggcttcaggaggtgtaaatattcacccctagacactgctgtggggtcggagccacacaacctgcccatctgcatgctccccctagaggtgtgagctgccgagcattgaagaagcgagccacacccccatctcacgccctgcgagggtgatgagggaactttgcccgtttcacatggatcattttctgaccggcatcagttgtgtctgcggtttatgttctccttacagatattctctgggaaggggacaatttgtgagaggccagttttgataagccttatgctgaaatcattgctgttttcaaacttagaattttacttcttttagagattgatttggcttccctcaattctccttcctttcttgagagaggaggagagttgtgctctcagaatcacagaggtttagaagcaaaaatatcttaaatgccacgctaaaaacaaaacaaaacccaaaaacccactcaattgctaaagacataaatgtaagaaataaagatataatgtaagaaatataacatgaaattttaaaataatgtaaaactggagtatatcatgatttatttgtaatagcaagcaataataactcacaacccaataataggggatcatttaaacaatggaaactatgcggccattaaaatgtggttggttgtagaagaatatttaatgccatgagaaaatgttaacaacatttgactcaatgagaaatgtggattttaactgcaacatcaaaatattaacagatttatacatgaaggatgaattatggatgcttttttccttttaattgtggtaaaaaacacataatgaaatttatcatcttaacaaatgtaagtatatagttcagtagcgttaagtgcattcacactgctgtgcaacagatctccagaactttttcatcttgcaaaactgaaactctattaactgttgaatagcaattccctattccccctcctcccagcccttggca

SEQ ID NO: 184 - DNA, 200 bp, Homo sapiens
  misc_feature (1)..(200): DMR1:221526801
gaaagaggaagaaagaaaagaaagaaagaaagaaagaaaagaaagaaagaaagaaagaaagaaagaaagaaagaaaagaaagaaagaaagaaagaaagaaagaaagaaagaaagaaagaaagaacgaacgaacagacagacaagcttggccgagtgcggtggttcctgccaataatcccagcactttgggagactgaggc

SEQ ID NO: 185 - DNA, 400 bp, Homo sapiens
  misc_feature (1)..(400): DMR1:223042301
gaggctgaggcaggggaatcgcttgaacccaggaagcagaggttgcagtgagccaagattgtgtcactgcactccagcctggtgataggcaagactctgtctcaaaaaaaaaaaaaaaaaaaaaaaaaaaaaaaaattgttccttccataccagttcttatatttggctgttggctttgaatgtgggaatgaagcagcaatacatgacgtagttgtaaactggtctttcttatgtttctcctcttactttatcatgtttaaacaaacaaacaaaatgaacaaaaacccctaggttaaacaatataattctcatttaaaaaattcaaacagttcaaatgtcccacaactatttggtctcattacccagagtgaactacccgtaacaaaagcattcttctag

SEQ ID NO: 186 - DNA, 4700 bp, Homo sapiens
  misc_feature (1)..(4700): DMR1:224010101
aaatatctttccattcacttgtgtcttcttcaatttctttcatcaatgttttatagttttcattgtgcagatctttcacttacctggttaaatttattcctacaatttcattctttttgatattagggtaaattgaattattttcttgatttctataaattatttattatcatactcatacttgtcaggcctctgggcccaagcctgcatgtatacatccagatggcctgaaataactgaagaatcacaaaagaagtgaaaatggccagttcctgccttaactggtgacattaccttgtgaaattccttctcctggctcagaagctcccccgctgagcaccttgtgacccccgtccctgcccaccagagaacaaccccctttgactgtaattgtccactacccacccaaatcctataaaacagccccacccctgtctcccttcactgactcctttttcagactcagcctgcctgcacccaggtgaaataaacagccttgttgctcacacaaagcctgttggtggactctcttcacacagatgcgcaagacaatactaacaccaatattattttgattcgtcagatggaaaagtaaggcttgaagaggttagaaataacttttccaaggtcacagagctaattgccacaactataactcagctctagtatgtgaacaaagatttttttataccaaaccaaaattatttatttctactccactattctatcatggtgcattttaggtgctaatgggaaaaggtgctctatgatggtgtccaatagacaattaaaattcgaatctggaaatgagatctggactgaagattttttttaaaattagccctcatcacatgtagtcagctgtagaaatccttagcatggctgaaatttttcatattaagaaaagactagaacttggccaggtgtggtggctcacacctgtaatcccagcactttgggaggctgaggtgggtgaatcacctgaggtctggagtttgagaccagctgaccaacatggtgaaacaccatctctactaaaaatacaaaaaattagccaggcgtggttgcacatgcctgtaatcctagctacttgggaagctgaggtaggagaattgcttgaacccaggaggtggaggttgcagcgagctgagatcgtgccattgcactgcagtctgggcaaaaaaagcaaaactccgaagaaagagagaaagagagagggagagagaaaggaggagacaatgagagacagagagagagaaggagagagaaagaacaaaagaatgaatgaacgaacaaactagaaatcgagcaggaaccttggaggacctattgcttaaggtgtgggcgaaagaaagtaagttagggcaagagactaaggtatgccagagacccaggacaaaacacagtgcagagtgatgtcacagagccaaatgggagtgcaagctatggcaagccctcccaagtatgtgtgggttaaatgtgattaaattcaaaatctctcaacccaaaaattttctccacaaaggaagtagagaaacaaaacagttcattattgaataagcattaaaccagaatgtgatgtgtgaatataatggaatggaatggattcgaaagaaatggaatggaatggaatggagtggaatggaatggacccgaatggaatggaacagaatggaatggaatggaacgcactcgaatggaatgaaatggaatggaatggaatggaatggaacggacatgaatggaatggaatggaatggaatggaatggaatggaatggaatggaatggacacgaatggaacagaatggaacggaatagactcgaatgggatggaatggaattgaatggactctaatggaatggacatgaatggaatggaatggactcaattagaatgcagttgaattgaaaggatccaaaaggaatgcaatggaatgcattggaatggaatggaatggaatggaatggaatggaatggaatggaatggacttgaatgggatggactctaatggaatggaatggaatggaactgaatggaatggaatggacttgaatggaatagaatggaatggaatggaatggactcgaaagaaatggaatggaatggattcaaatggaatggaatggacacaaatggaaccaaatggaatggaatggactcgaatggaatacaatggaatttaatggaatggactctaatggaatggaatggactagaatggaatagaacggaatagactcgaaaggtatggaatgcaatggaatggactcgaatggaatagaacagaatagactagaatggtatggaatgcaatggaatggacaagaattgaattgaatggactggaatggaatggaatggaatgcaatggaatgcacttgaacggattggaatggaatggaatggaacggaacggaacggaacggaacggacccggaatggaacggaacggacccggaatggaacggaacggaatggaatggaatggaatggaatgaagtggactctaatggaatggaatggaatggaatagactcgaatgaaatgggatggactcgaatggaatggaacggaatggaatcgactcgagtggaatggaatggaatggaatggaatagaatggaattgactcaatttaaatggaatgaagtggaatgaactcgaatggcatgcaatggaatggaatagaatcgaatggaatggaatggacccaaatggaatggaacggaatggaatggaatggaacggaatggcatggaacggaatggaatggattggaatgaactccaacggaatggaatggactcgaatgcaatggaacggaatggaatggaatggaatggagtggactggaatggaatagaatggaatggataggactggaatgaaatggaatggaatggactcaaatggaatggaatggaatggaatggactcaaatggaatggactcaagtggaatggaatggaatggacacgaattgaatggaatggaatggactgtaatggaaaggaatggaatggaacggaatggactcgaatggaatggaaaggactcgagtggaatggaatggaatggaatggactcgaatggaatggagtggaatgtatgcgaatggaatggaatggaattgaatggattcgagtcaaacggaatgtaatggtatggaatggactcgaatggaatggaatgtaatggaatgaaatggatgcgaatggaatggactcgaatggaatggatggaatggaatggagtggaatggaatggactcgaatggtatggaatggaattgaatggactcgataggaatggaatggaatggattggactcgaaaggaatgtaatggaatgaaatgtgctggaatggaatggaatggaatggaataaaatgtaatggaatggactcgaatggaatacagttgaattgaatggacccgaaagcaatggaaggaatggaatggaacggattggaagggaatggaatggaatgaaatggaaaagactcgaatggaatggaatggaatggaatggaatggaatggaatggaatggaatggaatggaatggaatggaatggactcgaatgaaatggaatggactcgaatgaaatggaatggactagaatggaatggaatggaatggaatggaatggaatggaatggaatggaatggaatggaatggaatggaatcgactcgagtggaatggaatggactcgaaagaaatggaatgcagtggaatggactcgaatggaatgcaatggaatggaatagactcgaacggaatggaatggaatggaatggaatggaatggaacggaatggacgcgaatgaaatggaatggaacggaatggactcggatggaacggaacggaatggaacggaatggaatggaatttactcgaatgggatggaatggaatggaatttactcgaatggaatggaatggaatggactgaaatggaatagcatggaatggaatggactcgaatgcaatggaatggaatggactcgagtggaatggaatggactcgaacggagtggagtcgaatggattcgaatggaatgcaatggaatggaatggaatgcaatgtactcgaatggaatggaatgtaatagaatgaaaattactcgaatggaatggaatggaatggaatggaatcgaacggacttgaatagaatgcagttgaattgaatggacctgaaagaatggaatggaatggaatgaaatggactcgaatggaatggaatagactgaaatgaaatggaatgtaccagaatggaatggaatggaatgtactggaatggaatggaatggactcgaatgatatgcaattgaatggactcgcatggattggaatggactctagtggaatggaatggaatagaatggactccaatggaatgcggtgggatggattcaaatggaatggaatggaattgagtggatttgaattgaatggaatgtaatggtatggaatggaatggaatgaaatggactcgaatggaatggaatgtactcgaattgtatggaacggaattgaatggactcgaaaggaatggaatggaatggaatggactcgaatggaatggaatggaatgaactccaatggaatggaatggactcgaatagaatggaatggaatggaaaggactcgagtggaatggaatggagtggaatggactcgaatgggatgga

SEQ ID NO: 187 - DNA, 500 bp, Homo sapiens
  misc_feature (1)..(500): DMR1:224392301
cagtgagccgagatcgcaccactgtacactgggagagagcatgagactccgtctcaaaaaaaaaaaagaaaagaaaacatatcctcttctggagtaaatctgttactacatacctagtattttcctacttctttaaaccaagtatgtttatttgaagaaataactcccaaatgactaataaaatgagaaaagcacagattgaatcacagttgcagatctataaagactttgggtttgtaggcctttggttgaaacccaaacaggacaacacaagaaggtaaagatttctggtcttagttgatttcctagaggaatgttagaatgtcaggtagtgatctataaatacaaaaatacccttcaaggttctgggcaaatgaacagtagttctcaaactttttgactcgtgtgctcttcatgttttgtattctcatctctgattgcatatccttacccgccagtaagatgtggccaagccttctacagtctgtaccacaaagata

SEQ ID NO: 188 - DNA, 1900 bp, Homo sapiens
  misc_feature (1)..(1900): DMR1:224416901
atttttaaatcctcagaagcaggtcaatgaacattattaaagagtttaaaagggataggggaaaaaatttctaatcacttccttgtagaatatttaagatatgtaccaagtaataatctaatattttaagataaagtaaggccaatatctcaaacaattattatttttgtacttcaagtagggagagtgaggttaaaaactcaataggtacaaaagtggtttatacacatgtaaaaaattattttatatcacagtagagatatgcatatatagacaatttttacggttattcagaagttcctcgttattccaaagtcctcatacttaatatgtttttgtccttatttatgttactttcattagttctttgatatcactggtaaaagcaactgagcacatgcattgcagctattctctattctcctttttgtttggttcaccagattcaaattatttcattcttgaagtctgaaatatttcacaatttgttattcgatatcttaaaattaaagctatgctttaggcccagcatggaggctcacgcctgtaatcccagtgctttgggaggccaaggcagaagtatcgattgcttgagaccagaagttcaagaccagctggggcaagagaccccatctctacaaaaaaacttaagaattagccaggcatggtagtgcatgcctatatagtcctagctactcagaaggctgaggtgagtggatcacttgagcctaaggctatatagtagcctatgatcatgccactgcactctatcctgggcaacagagaggctgtgtctaaaaaagaaaccaacaaaaacatcaagaacaaaataaagctatactttaattttagagaccattaaaatagtaggtatatttttactcaaaatactcctaatgtcgaaagagaagcctgaattcttacaagttaaattatggacatgggtacacatggtaaaaaaaacccaaaccataagttaatagctgttgttctagccatttttagagcctgtcttctactaaaaagcagaactttcattaagaaaaaagtattaccatgatctttatgtgcagtaaataatttgggacatagttaaattgtcagacacaggaaacaagtaaccaaacctatagataacgaaaaactggcttcccaacttcagttctcaaggtatggttactaagtaaacatacagaaatttctcataattttcaattttcatagttccagctttactcgtgaacaaatgctaaatcagacatgaactgttatatagctacaggataagactctaaaaaagaaaactaaaattttgtaaaatgttaggctgtttcagaatataggaagttttcctcttacctactacaaacatggtctataagcagagacacagaatctagattattatcaagtttggtattgtgatataggcaccgatccctttgtagttccaccgcctgccgcaggagagtctgtaaacgccgtgggggaagcatcactgatggtggtaaataggctttaatagaagatattttaaaaaagagaaataataataaactgtaaacttttatttaagacatttgctcatcttctgctgtacttgttcctaccccaatagtatctattccttaaatagagaagttctgcgttatgcgatacgtgagctttacgaatatttgtcagcagcaatagctatgctgctcataaaattggatatatttggtgggaggggtttactttatatgtggattttctaggggcagggaggataagtgaggaataacaacaacaaaatgaagaaaaagaagacaacaatgaaaagaatattagatattattgtgtaccaggagaccaggtgtaagtaaaatctccacttaacaaatagcaaaattttggcaaa

SEQ ID NO: 189 - DNA, 1000 bp, Homo sapiens
  misc_feature (1)..(1000): DMR1:224634801
ttcaatttcacgtccccgattcacaccaagcctcggccctacctgcaccacttaatatgccccgctgcatccccgccaggagctgctagctcataattagcaaagttggcagttttcagcactgttcagagtataagttgttttgctccataaatgggaggcagcatccgttgtctcacaaggggtgtgttagttcattttcacactgctataaagaactacctgagactgggtaatttataaagaacaggtttaattgactcacagttctgcatggctggagaggcctcaggaaacttataatcatggcagaaggtaaggggaagcaagggacatcttacatggtggtaggacagagaatggcgggggtcggggggaactgccctaaacacttttaaaccatcagatcttgtgagatctcactcactatcatgagaacagcatgggggaatctgcacccatgatccaatcacctcccaccaggcccctcccacgacacttggggattactattcgagatgagatttgggtggggacacacagccaaaccctaccaaggggagaggtgatattatggctcaaagctatgctgtgtgctggcacctctgttaaaatgagtttcttaaagaagccaaataaagtttggtgtggcaagattattaaaatcaacagagaaatgactgtaggaacagcaagcattttcaagaagtgagtcctgctgagcaacagggaggaaaataaagtgccgggggctgtgctaggacagggatgctgactcagacctcacagcacagccgagccggcctcggccttggacatgagcagtcagcccacagcatgcaaaagtttggttgtttctgagacctacttcttagcttagtccatatatttcttcactttttcctcccttccttcgttagagacagggtctcactttgttgcctgggctagagagcagtggtgtaatcatagctcactctcaccttgaactcctgggctc

SEQ ID NO: 190 - DNA, 1500 bp, Homo sapiens
  misc_feature (1)..(1500): DMR1:225430701
tgcagaaagcctttattcataaggtagaggtacctcaaaagctgtccgataaaaacacatttctactgatgatgtttgatatggtttctattcacacagaaatggagctcacaattaacatgatgcattatgtccatctcaatagcaatttaaaaattatttgaaacttcttctacatactatatgtatgtttgcagcacttatcctcttttttttttttttttttttttttgagatggtgtctccctctgtcacccaggctggagcgcaatgacacgatcttgggtcactactgcctgtgcctcctgggttcaagcaatcttctcacctcagccccgagtagctgggattacaggtgcacgccaccatgcccagctaatttttgtatttttagaagagatggggtttggccgtgttggccaggctagtctccaactcctgactgcaagtgatctacccacctcggcctcccaaagtgctggtgagaggtgacagcgtgctggcagccctagcagccctcgctcactctctgcacctcctcggcctcggcgcccactctggccgctcttgaggagcccttcagcctgccactgcactgtgggagcccctctctgggctggccgaggccggagcgggctccctcaccttgcggggaggtgtggagggacaggcgtgggtgggaaccagggctgagcactgggcttgcaggccagtgcaagttccaggtgggcgtgggctcggcaggccccgcactcggagcggctggccggttccgcaggccccaggcagtgaggggcttagtacccaggccagcagctgcggaggatgcgctgggtctcccagcagtgccggcctggcccaccagcgctgtgctggaattctcgctggacctcagctgcctccccgcagggaaaggctggggacctgcagcctgccatgcctgagcctcccccacaccatgggctcctgagcggcctgagcctcccagatgagcgctgccccctgctccacgcgcccggtcccattccgaccgcccaagggctgaggagtagtgtgggcacaggtcgtgggactggcgggctccctgatgcaggatccactaggtgaagccagctgggctcctgggtctagcggggacttggagaacctttatgtctagctaagggattgtaaatacaccaatcagcactctgtgtctagctcaaggtttgtaaatgcaccaatcagcactgtgtatctagctaatctggtggggacttggagaaactttatgtctagctaagggattgtaaatacaccagtcagcactctgtgtcttgctcagggtttgtgaacacaccaatcagccccctgtgtctagctcaaggtttgtaagtgcaccaatcagtgctctgtgtctagctaatctagcagggacttggagaacctttatgtctagctaagggattgtaaatacaccaatcagcactctgtgtccagctcaaggtttgtaaatgcacc

SEQ ID NO: 191 - DNA, 1200 bp, Homo sapiens
  misc_feature (1)..(1200): DMR1:225662001
ttgtctaactcaggtggcattttatatctgtcaacatctcataattagtctttaaatagctcctgttttgtgtgtttttttgtaatgttcactgaggaactcattgtacttgattttattcagtgtctctcacttgcaaataatatttcccttcaaaagttcacagtctggtcttttccttcttatttttcactttattttctctcctcctactagtgagatggtgattcttgatttgctttatttgagttatttatatcttccggcctctgtttaatatcaagtctggcgtggcattcttttcctactgaatgatgcccaaattaagttaagaagcaattcctaagaaagctggcctgtgattcttcatggtcttctggtatcccaagcactggacagtctgtttaattttgaaagttgatgtaactagctaagttaatagtttatgtcaggtttgattcaagagttgctttccagagtaactctgttccaaaactagatgaggagatagaatagggaaggaagaattaaagcagtctaggtagaggtggctcacacctgtaatcccagcactttgggaggctaaggcgggcaattgcttgagtccaggagttcaagaccagcctgggcaacattgaaaaaccttgcctctaccaaaaatacaaaaattagccgggcttggtggtgcatgccttgtagatccagctacttaggaggctgaggtgggaggatggcttgagcccaggaggcagaggtttcagtgagctgagatcatgccactgcacaccaacctgggctacagggccagatcgtgtctcaataaataaataaataaagttaatgaggcaatttgctctcttggttaagttctattcatttggcatcaaccaatagaatataaggcccttcatggtagcaggtacctgttatcccagctactcaggaggctgaggcagaagaatcgcttgaatccgggaggcagaggttgcagtgagctgagatgggccgctgcactccagcctgggcaacagagctagactctgtctcaaaaaaaaaaaaaaaaaaaaaaaaaaaaaaaagactataaggcccttaactggctctcaatgatggggctccaagagagaacagtcagtggagtataataacaaggggtcctgatgccaacttaactactcccaccattagcatcacccgcat

SEQ ID NO: 192 - DNA, 100 bp, Homo sapiens
  misc_feature (1)..(100): DMR1:226452801
cctattagctcacactctcttaccgagagcaaattacagacagcatactgtggaaggaaagaggtttatagattctagcactgtagaaccccttttctgt

SEQ ID NO: 193 - DNA, 2300 bp, Homo sapiens
  misc_feature (1)..(2300): DMR1:227860201
cagacagaccgtagtgtctggtgcttggggtgagggtttaggagacaggcaggtgcacctgctcctaacccacagcaaactcttctctttttttccaggtgaactctaggacgcctgagtctgtaaactgaaccacatctggagatgttgttcacaacctggagatgtgagctgggatgacacagctgcaatctccctggggtccccggcattcgtgccagtgtctcttactgcatagaatcaatccattttcattgctgtgtcccaccgcttctccaggaaggctccagcaggtgacatccgctctcctgaccctctcagtgcctcagtgcctcaaggtcccctgtgtctgtcatgatccaagggcctctccccgtcaggaggcctccctggaagctgcccatctcatgccctcccctggcagtgcatgctctcactcaaatcactttatcttctgcccacccctgcatccaccatggtggtcaggagcctcccctgaagtgtgaaatatcctctctgaaatgtggagggcagtacaaaggctgcgacattcttctaatggcaactgtggaaggacaggatagatagaatgacgggacataacacctgcagatataatggacaataatcttccattaatgaagaaagtatgttttccacttgataaatcccactaaagatgtagatgcatatttttaagttcatattttgtacatcttagtaaaactttggaaaaccaaaaatagatagaaaaatcttaaatgctgaaaataaacagaaggagattcaaagtgaaatcaagctaataaggaacatactgaataccaaaagaaagtagggtcatatcttcaaagacaaagggaaaataattgtgagcctaagtttctacacccagtcaagccaacacacctgagtgagaatgaaatgaaagtgttttgtcagatataaaaggacttagaatggacactacaaaaactgaaggccactgaaagtcactacagaatgtacacagtgaggagaaaactgagctcacacatacgttctctgattacagtgaagttgactagaaattaataacagaaggatatctaggaaatctctgtgcgtttaaaaatggagaaatgcacttccaaataacctatgagtcaaagaggatattagaaaatagttcgaactgaatttttttacccaaactaaattttttaaaaggaaataaaaaaaataaaaatagggaacatcaaaacctgatctacaagaactaccctacgagaaatgccaaggggcccttcaggctgaaatgaaagaacacgggacaataattcacagccacatggagagataaagcgcactggttcaggtgcctacaatggtaatatgaaggccagtagaattgtaaggttttttgtaattcctcttctttccctatatgatttaaaggacaaatacatgaaacaacaattacaaatatatgctaatgggcatacaatatataaagatgtaatttgtgacaataataaggaaggaggaatagaactgtgtaagttcagggtttttgtatactattgaagttaagtcagtattaatgaaaactagaacattatattaataagtttaaggtgttaattgtaatccccaaggaaaccactaagaaataactaaaacatatacaaaaatgtaaatgagaagggaaccaaaatgatataccaaaaaaaaaaaaaaaaaaaaaaaacacctcaaactaagcagaaggcagtaatggaaggattgagaaacaaaaaaaaagaaacatttctaaaaataataaaatggtagtagtcttttcttatcagtaataattttaaatgtaaattgcttaaattatccaattaaatagcagagattggcagaatggataccaatagcaacaaaaccccaacaaaacaaagcttatggttcatctatatgctatctagaagagactccttcagatccaaagacacacataggctgaaagtgaaagaacagaaaaagataacccatgaaaatcataccaaaagagagctagggtgcctatacagacaaattaggctttaggtaaaaaacagttacgagagacaaaaagggacattatattcaaaggttcaatccatcaagaagagacaacaaccataagcatatatacacctaacaagagatctctaaaaaacgtgaagcaaaaattgacagaattgaaaggataaataaagtttcacaagaataaagatttcaatactccactttcaataatggataaaataaccagacagaagatcaatatgaaa

SEQ ID NO: 194 - DNA, 200 bp, Homo sapiens
  misc_feature (1)..(200): DMR1:229042401
acaaagacaaaaggagattctgatgaagaagttattcaagatggagtcagagtattcatcgaaaagaaagcccagctaacacttttaggaacagaaatggactatgttgaagacaaattatccagtgagtttttgttcaataacccaaacatcaaaggaacttgtggctgtcgagaaacctttaatatttgaaatctcag

SEQ ID NO: 195 - DNA, 1200 bp, Homo sapiens
  misc_feature (1)..(1200): DMR1:230069401
ttctttctgtcaacgaaccataaaatttaatgctaccccttaggatgctttagtgatttgtcggttgaggaagaggtgtgtaaatgcaatagcttttgaaattgcagtggaagactcattaacttcgtgtggtggacccagggttaaagagaagccttaagatggtttctgaaggaggtaaatagagccctgctgtcacgaatgcctgatgtataggaaaatcgtgtagtcttctttcttccccaattgtttccatggatttagacactagaagtgtctctaaatttatttcattctcataccaaaaaaaaaatgtggtttgtttggcttgtaaagtatggacataaaaaaagatagcgggccatgcacagaaaggcagaatttaaaagctagctatagtttttttagagataagtggacctatattttttctcttgcctcatactgttcaagtcagggcttttattccatatttagccagtttctgcacatcctgacgtttttcatagggtactaggctgcagtattgggctttagggatcgtctgaggggagtccaactaggatttctgctgcttcagcagcccagcccaggcttgtcattgtgtgccctgcctgttaagtaactcatcacagaactgttattctccacttggcaaaacccagagagccagctcacctcagattgcaggtttagtaaactaagcaggagggagtgctgaagaccaatctcaggcactgccgcacaactcgggactcaacacccaggctcaggacatgtatgttaaagcagtttattcaaaatattgtttaaaattatgtttcatttacatttgtgtccataccctttccccccatattttgctctttccccctaaattgatgatttgcacttcaagcgtgcctttcctttgagcttcttaaatgctttaaaattttaaccatgttaagtctcccctgggctttggtacgttggcagtggatggagccgcagaagagaggaagggatttctctggaaatgaagctgcctgtgggtgaagtgtggctgtttagggtggaaagggaagggttttctctctgctgtaagagtgtgtggagcctgagaccccttgcctgtgtgcctgcatgctgggaggtaagggacggtgttagttgagggacatgatccggagccctgggagcctgtccactttgcacagt

SEQ ID NO: 196 - DNA, 1600 bp, Homo sapiens
  misc_feature (1)..(1600): DMR1:230580301
aaattattgttgactgtagtaccttgttgtgctatgaatcttttttttttttttttttttttttttgagatggggtcttgctctctcaccgagactggggtgcagtggcctgatctcagctcaccacaacctctgcctcccaggctcaagcaattctcctgcctcagcctcccaagtagctgggactacagggatgcgccactactgcctagctaatttttgtatttttagtagagacagggtttcaccatgttggccagattggtctcaaactcctgacctcaaatgatccacctgcctcagcctcccaaagtgctgggattacaggcatgaggcatcccacctggcaggatactagatcttattaactctatctaactctatttttgtacccattaacgatgatatgctttctggacaggcagacttattctttgctaatgcctccttttcttccaatatcatttgcaattgcatggttatttggcttcttataccaccctatccccacctgttgtttgctattcccccacctctcaatcacaggtttattgtaattttggttaaatcactttaattgtcttcatattgttaattacacatctaatatattatagttcctttcttttataattaattgctaattatggatttaaccatcgcttaaatttaagtgctgaaatcactttcattttcttaggcatttatgtgcctctagccagttcttcccattttctccgtagcttctcaatataattttctacatgatgaagtaaattttaattttcttatgattctatgtatgtgtagataattcttcccatgccctctacagcttttcagttaacttttccatgagatgagagaagctatcggttgtcattttgttccagagacatccctccttggagccgtctggcttcctgttgtaattggaacgaattgacagacaggccagcggcccagctgacattctggggcttcctttcattatcatcttgcttatcagtgtgggtccaatcaggagacagaaaaaggggaagtttaatataagcaattattaaactattataggagaataactataaagatgtaaagaaaacaaaaacgggtacccgagggttgggagaaaggccctaaggaggggctgcctggaggggcgcttcttccccaggttgcatccttgctgagaaggtgcggttgcagactcctcgatggcaagggagtttctgggctactggggcctgagcttctctgccttcacttggtaagcaggaatccggcctcttgagtgtgagccagccaaggctggtggggggcatgcagagggagcggaggccacactgcagtcaaagccctgaagcacagtgtctgtcccggggctgggcagggggtggaggatggggacacagcaacgtggttcctcggccccaattaggaccgcaaagccttaggaggctcatgctctggacgtgtggctggggcagagcaccagcgatgtttccacacagagcgcactgcgggtggtcagagcggcgggtgcaggaaaagcaaagcacagccactgcagctagaaaggacgttccctaagtgcccttcc

SEQ ID NO: 197 - DNA, 300 bp, Homo sapiens
  misc_feature (1)..(300): DMR1:232058301
atctagtgcttcacactatacttgatcatgttgcccagctagtgttgggttgattattgttttctttgttttatcaagaatgacaaacaagaagctgtgttgggtgagtgtccccagaaactgatcctgagacaaagatttaggtgtgagtggtttatttgggaggtgattcctggaagcatctgtggaggactggggaggtgagacagactggaaaggcatccaatggtgactgccatgggcaactgagacttaacttgctggtgaactgtgggagaggctgcagagcacacctgagaa

SEQ ID NO: 198 - DNA, 900 bp, Homo sapiens
  misc_feature (1)..(900): DMR1:232723701
tttttgaggaaggtacatgaaaatgattgtcattagaatacacctacctgacttccaactacagggagcatcaatgacagtgggcaccagccactgccctctaaacctatcaccccattcgtggtgggccaggtttcccagaggctgttctcaggcaataaacaagagcaatagcatagtaagttaggcccattcctggaagacacaagactcttggacagccaactttggctcaaggacttccagacagcagtgctgaatgtttagacttcacagcagttgaaaacacttcaactctatttttcttgtctctctccttttcttagggtcagtcttcattatgatctgacagctctcccagcctctcccaactccttctccaatttatttcttaggcatttcccctaatacaattcttccctattcatttctatctcggtgtctgcttcttagacaacccagacaattataacaactcataaacctctgtgcacacaaaaaatagcagctgaatatatgaggcaaaacttattaggaataaaagaactgtatacaagtgtaatattactgggaaattttaatataactctttcataatcagtcataagtaacagacaaaaattaaaaacgtaaagaaatttatgaatctataatctctcaaatagataataaaaattattttctaggttgatggaacaaagaaaggagagttcatttctatcatcatccaatagagttagaatagagttataataaataataaaaagtgatgaagttaatactttgaaattatgaaatatatccttagacaaactttggaacaaaaaggcaatcaaaactgaaacctagcataactaaccctcagaagacaatgtagaaacttaaatgcttttataaaaa

SEQ ID NO: 199 - DNA, 1000 bp, Homo sapiens
  misc_feature (1)..(1000): DMR1:235194801
aagagtgaaactccgtctcaaaaaaacaagaaaaaaaagaaacgattgcaacgtggtcattttaaaatctcactatatgtgggttgggaatgacaaaattccaggtacttttgtaaagtcaagtcaggggcaaccttcctacctcagtgatatattaatgttttgagaaaagatgagaaattttctcaaattatttgtttacaaatagataagcaaaggccgatatatttcctggaaactactcttaaaaattttgttgatttataggaaaaataagctctctgaagcatgagttagcagtaagcactataaattttgagtgagagtaattctcctaaggatggtacatatctagtatcattccagatgcatagaagatgctaatcaaacatttaggaaaatttagtcttagaatgaataattctatcatacataaaagtaacattaattttccatatgagctcctaagtaaatcctcatggcattttcgtggttaataggatcctgtggggctgggcgtggtggctcacacctataatcccggcattttgggaggccaaggcgggcggatcacctgaggtcagaagttcgagaccagcctggccaacatggtgaaaccccatctctactaaaaatacaaaaattagccaggtgtggtggtgtgtgcctgtaatcccagctactcgggaggctgaggcatgagaatcgcttgaactgggaggtggaggttgcagtgagccgaggttgcaccactgtactccagcctgggcaacagagcgagactctgtctccaaaaaaaaaaaaaaatcttgtgaatatattctaagccactgactataatcagataaagaagaagagaaaaaggagttgccagatagccttttcttccttggaatggtttacagctacaataataacctatgtctctccaagtcacactgccttatggctcctggttgggaactagaggggaaggaaatggcagaaatagataaataaa

SEQ ID NO: 200 - DNA, 4600 bp, Homo sapiens
  misc_feature (1)..(4600): DMR1:236328101
gtgtttatttataaaatcatattttcctttaagtcattggacatttatactagctgttttaatatctttgatgaaatctgacatctgggccatctagtgatcatattttctagtcccacgagcctaaagcatttattatcttgcctcttacagaaaaaggtcgccaacccgtgttctagagcacggactttattcctaaggtatgggatttctgttgttttatattgatgcacgaggtgttgtaaaagtcattaactaacagggccagaacttggtcttccagcaactcttaacctctaatatctctgttccactctcaaccccatagcagccactatcagataatccttgatttgtcttcgtgcatataaatcccatccctctgccaaagatttgcaggaaacccattcagatttctgcctggcaaggattttcagaaaattcccacacacaactctgcctttgttcactatgcagttccttcttttctagtgtcctgctctgcagaatccagccatatcaatagccccaaactctaaagtccctcctcagctccatgggaccaccatgctctgcttgggttccaggttcctgcaatgcagtcaggaaattgttcctagacagagtgctgggcaactgtagaagtctttgtctgagtttcccttccctcaggattgcagtctatgttgcttttgcctagtgccttgaaactattgccctatatattttgtctagttttgtggaatttcctgttgttggccaggcacggtggctcacgcctgtaatcccagcactttgggaggccaaggcaggtggatcacttgaggtcaggagttcaagaccagcctggccaacataatgaaaccctgtctctattaaaaatacaaaaagttagtcatgcatggtggcatgggcctgtaatcccagctactcgggaggctgaggtgggaggatcacgtgaatctggaaggtggaggttgcagtgagttgagatggtaccacggcactccagcctgggcaaccgagtgagactccatctcaaaaagagaaaaaaaaaaaaaaaagaatttcttcttgtcttaaggaaagaggaaaatgggaatatttataaagggaaatattatattttaaaaactggtgacatctgatactatcatagcctgtcttttaaataagctcactatgatcctggggatattataaaagaaaacaagccgggcgtggtggctaacgcttgtaatcccagcactttgggaggccaaggtgggcagatcacaaggtcatgagttcgagaccagcctggccaaaatggtgaaaccctgtctctactaaaaatacaaaaattagccggacgtggtggcgggcacctgtaatttcagctactcggaaggctgaggcagtagaatcacttgaacctgggaggtggaggttgcagtgagccgagatcacaccactgcactctagcctgggtgacagagcaagactttgtctcaaaaaaaaaaaaaaaaaaacattaattcatctaaagttcagtaatataaaataggaatataatattctaattctgttagttcaaatcttatacaccttcatatcatacttttccataagaatacatttgagctttggataactctatgcgcccttggttatttacctgaagaatgctgagaactcaaaattggataaactaaagacatttgacctcaactttctcaacttaaaaaaaattcaattttatgtggacccattatttcaaggattgatggtactaacaggatttaaactattaattgcatttcgccagttttcagagaatgtttttttaagggtcaatattacaaaaactttgaagagaagctagaatgagaggtggtccttttgttgctattttaagtattagtttggaaatgagaaagaatatgctatatgattatctgcaacctactctcatatctaaaacaaaagtttttaaaaattaattctttatatctatctgtctctatctatctatctatctatctatctatctatctatctatctaaatatatatggatttttttttcgaggcaaggtcttgctttgtcacccaggcaggagtacagtggtgcaatctcagctcattgcaacctccacctcctgggctcaagcaatcctcttacctaagcctcctgagtagctgggactatagacgtatgccaccacacccagctaatttttttaaatatatatttttaattatttgtatctttgacaacataaaaaatcttattttatgataagatttactactaaaaaccactatgcaaaatagtggtttctgtaaaaaatttaatgcttaatattttttatgttctttgacattcccagaatatatgtctgtttaagtctcagttatgaagagactataaaaattcaatgttttgacatattaaatcatcctctcatcacaacatagagatgaggaaaatgcaaccagaatgcttcatgtctttctttgagctaggtagcagcacatggagggcctgcctttagacaagagtttttcccacaatgatgtggacagtaagatatcaagttattaggaactctcaaacttagatttgttaataatcaacaatcacaaacatttgaggaaaaccaacgtcctgagagacagtaatctctatacatgaggagactttaacgaagcagaagggggttctaaaataactatagttaatatttttggagggctaagagtcagtatcacctgcagaatgtggactggatgataagaaaaggttttgcataagaaaaatagcttttaaaggtaaaaaattcaacagacgggctgaatagcagataagacacaatccaagagcaaatcagtgaactagaatataaagcgaaggacttcttcgagaatacaacacacaacgagaggcaagttatgaaagaaaagttaaaagataggagggacagatcctcgagttccatcattcccaagttgctttgctgatgtgactgtcataagtaaagaccggcttcttgcttttcttcttagcccaaaataagttctgttagccaggcttttctcttccctggatttgaggtattgcacaccccattatagaggccaaaggcaccaccacacctgaagagctgaggaggtaccagcctggccagagagcatgccctctttttttttttttttttttttgagatggagtcttgctctgttgcccaggctggagctcagtggtgcaatctcggctcactgaagcctctgcctcccaggttcaagtgattctcttgcctcagcctccggagtagctgggattatagctgtgcaccaccacactggctaattttgtatttttagtagagacggggtttcaccatattggccaggctggtcttgaactcctggcctcaagtgatctgcctgccttggcctcccaaagtgctgggattacaggcctgagccaccgcacccagccttgccctcttgtgccacatggtctgaggtgtggtcctgctctttgtatcctggcctgctgctcctccttcccaagccaaggctttaaactaaagtttgctcctggaacagcccaaataaatgaggcttatgcgtggagtctccaaagttctttaactaatttagcctgtcctgggaccacacatagccctggcacttggcccagactttcaaaaaatagaggcagaagtacttctctctctttcactctttagcctcataccaactaggagttcttagaagtttcattagcaacttctaggtgcagcttctgccgcattttcactgaaagcccaattaagggctctcactgtcactactatttaaacacacacataaggccaggcatggtgggtcacacataatctcagcattttgagaggccaggatgggaggattgctttaagccaggattcaagaccagcctgggctacatgacgagacccatttctacaacaacaaaaatacacacacacacacacacacacacacacacacacacatatatatatacaaacacacgtaagcaattaaatttaaaaaacaaaaacaagccaatgtatatgaacccattggtggcagcccaggatgtgaacaagactagagttccctaactcgtgaacaccgacagaggctgggttcagagaccagtgaccctggaccattggcagtttccacaattgtgcaaacaaacttcctaaattctgatggacaacacgctaactctgagagggtcacaatatgtcagcactgaaagaggaaatcagtttgaactgaaaaaggaaaaagtggctctgctgtgaatcaggctcagaggacaggcagagagaccagctgcaaaggtcacgagaatcatcatttctctaaggcaggggtccccaaactcccgggctgcagactggtaccagtctgtggcctgttaggaaccgggttgcacagctggaggtgagcacgcattaccacctgagctccgcctcctgtccgatcagcagccacgttcgattctcataggagcacggaccctactgtgaactgtacatgcgattctccttatgagaatcgaattcctgatgatctga

SEQ ID NO: 201 - DNA, 700 bp, Homo sapiens
  misc_feature (1)..(700): DMR1:237309401
taaaggttctccaagtccccactagattagctagatacggagcactgataggtgcatttacaaaccttgagctagacacagggtgctgattggtgtgtatgcaatcctccagctagacataaaagttctccaattccccactagactcaggagcccagctggcttcacctactggatcccacacaagggccgcaggcggagctgccaccagtcccgcactgtgtgcccacactcctcagcccttgggcggtcgatgggaccaggcgccatggagcagggggcggcgcttgtcggggaggctcggacacgcaggagcccatggccggggggaggctcgggcatggcaggctgcaggtcccgtgccctgccctgcggggaggcagctgaggcccggcgagaatttgagcacagcaccggtgggctggcactgctgggggacctggtgcaccctctgcagctgctgccgcaggtgctaagcccctcactgcccggggccggcagtgccagccagccactccgagtgcgggacccgccgagcccacgctcaccagcacaagcgccacgcgcagctctggttcctgcccacacctctccctccacacctccctgcaagcagagggagccagctccagcctcggccagcacagagaagggctcccacagtgcagcagcaggctgaaacgctcctaaagcatggcca

SEQ ID NO: 202 - DNA, 1400 bp, Homo sapiens
  misc_feature (1)..(1400): DMR1:237879801
cgtaaggaataaagtgatttttctctaggaaaaaagatacagggatgaattacattatcctggattgatcagaacgatttagtcaggagggaaagaactatcggtttaactagaaatgagaaactaaagttaaacccatttggaggatagtgaataagtttggggtaacagtctttcgtgagttacttgatagaggctatttaaaattagacagatgcctccaaaaagaggtttaatggggcctctgaggggaataatcaagtttctggtttagctatgagactatattaaactataagttaatggttctaactgacttttctcgagtagaaactcaacttcaagctagattttggccagagactattcagagatgtttttgtctttccttgcaatattttctctgatcagactaacttctaatagattgtttgaaaaccaggaaaactaaatctgcagaaataggttctgtagaattactcttattctgaaaagaagtttcatggtaaaatatgggaaataggttttgctccctttgaaggcataccatgttaatataaacagtcccagaaaccctgctagagagaatctggcaagtcctaggtagaggcttaagtatcagggttttctttggttaactgcagtagccgttggttagtacaggtattactaccctcctcttagaggggcgagtggcctttatgccaggttctgctaaagctttcctcttttggaaactccgattcctgacttgtcaaggtcagttgcttgagaggaccctatatactcgctttgttttagagggataggctaaaaacttatgcccgtatctatttcctcatagaaaaagatgagacttagcaattcccttctcccatttacccaactttgtttccttgaatcatctgacatttgtcagagttgctgaggaagccttcctgttcattgctttattcccaatgcctactatgctgcttatatagccaatatacattttaatggagtagatttgagtcatacagcaactagctagaatagctccctgccagcagcagctgttgagcacttgaagtttggttagtagaattttagtttaaaacaggtactattcagctattggaaaacagttgggtataagttttcccaacaatctaatatctagaagtacatcgtatttccaattaatgtttaacattcaaaatttgttataagtatattcaagagattgaataggaaagcaaaaccttgaatatgatattcagtagtaggttaagtttcatctgattgccaagtaagttacatgtatacttgagttgcttaacctagacaccaaaacactaccccactgcagtcagagactattcttctctaaatgtctgacttcattacaggtcaacaga

SEQ ID NO: 203 - DNA, 2200 bp, Homo sapiens
  misc_feature (1)..(2200): DMR1:238221001
tggataatgaaacatggaactgattggaagcacagaggaaatctactaaactttagagggattcacattgctaaagagaccacaagcctggctttaaaatcttgtgactgcttaagccttaaaataatctgtaggcctttgtacttgcacagggtcacttagagacatcatgaaaatgcagattcccggcctcaaccaccaaggatactacgtggcacatgaaaaatgctgcccttctcaccccaaagatgtccagaacctaatccccaaaactgtgaccatgtaatatataatatgtagtaatttatttttaatttctcccaaacctccaatattcaaaaactaaactaacctcttctttttttttcttttttcttttttttcttttttttgagacggagtctcgctctgtcaccagattggagtgcagtggcatgatctcggcttactgcaacctctgcctcccaggttcaagtgattctcctgcctcagcctccccagtagctgggattataggcacctgttgccgcacccagctaatctttatatttttagtagagacgggatttcaccatgttggccaggctgatcttgaactcctgacctcaggtgatttacctgcctcggactcccaaagtgctgggattacaggcatgagccaccgtgcctggccactaatctcttccttatacctgtaacagctctgtgccaactacatgcatatatctgtgcatacacaggcagacacacgttgcctttcttgtacatttcaacactattagcacccaatttcttgtgatcagtgccacatagacacaaacccactgctgaatggcttttcttcacaacaatctatggctcgtgccagcatgaggagaagcccatgcagacagctgtgctcacttcactcagtgatctgaacacttcactgactgtcttcggctcatttgttgaacactaaaccttttggtcatgcattgaagatcctctgccatctaaacgtaaaacattcttccagtttcatctctcatagtagtttctaaaaacatagctaacattgtagccaaatttgatgactctcaagttcaaccaaaattcctttcctgtctctgcattttcttaagtcattttctctagttcaattatttttaaatttactcaagttaaactttctcctttcgcctttggaactgtacacattttttaagccctagcttaggtgccacattctccatgagcatttttgaaatttcatttatttgaaagaacagtactcccttggcacagtcagttggcttgtaattattctggctttcataatagttggttgtataactgtcttatgtcctttaatggattgtaacctctttttggacaagcaccagtcttaattatttttaaatccatcaatcagcccaatggcttacacaaaaagctcaacaaatatttgttgagtaaattaattgttggatgagtaaatctataaatgaacttaatgaaggctggaattttgtaccagcagccagtttttatggtgttcaaatgtaatgacattatagttatatgtatccatgtatgtggatatattatatatccacatatgtgggtatgtatgtacacatgcacacacatctatatgcatacttatatatacatatgcatacatatatttacatatttgtaaggtgacattgaggaagttcaagtttttcaaaacatattgtaaaacttattaaacattacttgtatttcatgtataaattagttaataattttaataacattttttgaccatatgatatagtctgtaaatatgaatacatgtttaaaagtgtatttcttttaaaatggtctcttttaaactgttatgtaaataatcacataggagatatcagaagtgaggacacgttccacccagtgtccttgttttctcacttgtcttgattaagagaatggggctcatttattagtccctttctttcttcctttatggaaagtgtagcatttgtagaaaataatcatgtatcactgaagcaactgaaactgaagcaaaatgtatagcctattatgacagtaatagtccagaagggtaatgcagtcctgataaaataaatatgagattgctgttgttttgtgtcacagaaaatgtaaagtcccctttctatagctgggcttatagccttgtttatctcttgtgcca

SEQ ID NO: 204 - DNA, 2100 bp, Homo sapiens
  misc_feature (1)..(2100): DMR1:238863501
gatggtgggaggtgttctttattatttttatttgcaaacatttattccttgaatgaacccaccaccaggatgacagccatcactccctgattcacgaaaaattggctaatcatcttgtttttattaatatttcttaaatatatagctcacatttatttggtgatgtctttgtgaccataaatatgctgtagaaacttagcttttgtttgtatcaattagcctgtgataaaattggcttccttttacctcattttgttcaaagttgtagtttccaagaacctatccacagcattcagtgaggtcttaactatattgtggatttgatctgttctttgttttgtggttatctcctctttagtgtttcattccttttaattaattaaccttcttgcaacctgataatgcaatttgacagaagagtttggaaatcataggctagaaactgtttagaaactggaggtaacacctatacctcatgttgagatgacttaatgaagatagtggaataacaacagcaacaaaacaacagcagcagaaactatacaatttaacaacaaatgcaagatgtggtctcctgtaatttttatgagtaaactcatttaatcctcactaccgtaagatacttagaagttgatattattctcggtttaaacataaggagctgaggcctcaatttttttttaattgcttttaagtgttttagctccacaagtgacaaaaatatttggattcaaatctgtctcttctcaaaaatgatattctttacattcaatttctctacttttctttacaacatgcctattttctaaaatttgtttcaaaattcaactcttttattttaaaaaactataacattaaaaaaaaaatcctgtccctgcatatagctcatttactttaactcttataaatcctattaaaggacacacaaggttttaagatgacattttgttgttgttgttattgatgctaagggtagtgaagcaggatatttccctgacccctttgagggacatgcaacaggggtgcctcatttattcagccactgctctcaactcttcatgggagggagggattgtgtggctgaatgaggcagaaactggagtgcatgagtgctggaactggccagccacttcagtgctgccagaagcaaactctgtgtgggtcccacagcagcatccaggttgctgggggcaggggtgcctgtgacccctgaagccccagagggagtgttacagtgctcttttagctctactgtttgcagatggctaaagcgtaaacagctgagtgggccctttgcctcattgggtgaggtggctaccctccaccagcgaaggcaaaaggccagtgtgacagccttttgtgtccacacttgtggttgccaagctcttatctggcatccaggaaaaatgaggtcgcatgaatgaattcaaggatggtaaatgtgggggattttactgctgatgaaagtggctctcagcaggaaggggagctgaaaaggggacggggaggaaggaggtaatcttcctctgaagtccggccatctctggcaggattcttctccaaagttacattgtcaaactgtccctctaaagtcaagctgcttctctccaatgtccagctgtagccctgaatccagctgcttctcccctctgctggctgagtctggggtctttataggcaaaggatggggagggacaggccatgggtagtttaggaaaaggcagcatttgagagggaaaacaggtgtggaagttctcacttggggtcacagcttcaggtttttcagcttgaggttggggttttcactgggaacccacccttttctgcctagaatctctctgcttatcaataatataaaaactgcttcatatagctaccttaaaaatattttcttccaaaacaatcaaatctgacaggaaggttttggccatcttaaaaataaaaaccaatggcaacaaaatgaaaaagcacagagagacaagtagaatattctttcttgaatttatagtgggaagcttgatagaacaaaaacttccaacaaatcttcctcatctcagcccatttggaaaggtgacaagaaccatatctctcatgacatta

SEQ ID NO: 205 - DNA, 2600 bp, Homo sapiens
  misc_feature (1)..(2600): DMR1:239906701
tttcatgcttggatctaaaatatctaaatactagaaatatttaaagctggtttggtccattcaaaacgttctgctaaaagttcatctgcatgttatcaagtagaagatagctttccaggagatagtcgtgttaccagtccttacaaggaacggatgtcttacttttttgatcctgtctcaaagaggcaatatagtgtgaattgatttacattggttttatcccttctccaggttggcattgctcattttagtaagacttaaatggctggtatcaccttaaagttgcgtatttctgaagcctcagatgggtaaatgcccagatagataaaatgcaaatcaagtcaagttatcaatttagcatgaagataaagctgtttggataattgtaatagaaatgtctgatatttttcacctttacaaaataagagaagtaagggcgattttgtctagtaacagaattacatggaatatatttagaaatgagaaaaatgtgggaaaaaagcacaatgttcagtgcatgccaccaattatataatactatctcaaacaaatcgatgtctgtctgccctagactccacttatttaaaataagagaatgaacttgatgtttggcttcatagagattcagcaccctgtaataggccttccatgtcttttaacgtatgtaatgcaaagaacaaacaaataaaggcagaaatttttctaactctgtctcttctctctttcccccagactatgtcagagagtcacaatgaccttgcacaataacagtacaacctcgcctttgtttccaaacatcagctcctcctggatacacagcccctccgatgcagggctgcccccgggaaccgtcactcatttcggcagctacaatgtttctcgagcagctggcaatttctcctctccagacggtaccaccgatgaccctctgggaggtcataccgtctggcaagtggtcttcatcgctttcttaacgggcatcctggccttggtgaccatcatcggcaacatcctggtaattgtgtcatttaaggtcaacaagcagctgaagacggtcaacaactacttcctcttaagcctggcctgtgccgatctgattatcggggtcatttcaatgaatctgtttacgacctacatcatcatgaatcgatgggccttagggaacttggcctgtgacctctggcttgccattgactacgtagccagcaatgcctctgttatgaatcttctggtcatcagctttgacagatacttttccatcacgaggccgctcacgtaccgagccaaacgaacaacaaagagagccggtgtgatgatcggtctggcttgggtcatctcctttgtcctttgggctcctgccatcttgttctggcaatactttgttggaaagagaactgtgcctccgggagagtgcttcattcagttcctcagtgagcccaccattacttttggcacagccatcgctgctttttatatgcctgtcaccattatgactattttatactggaggatctataaggaaactgaaaagcgtaccaaagagcttgctggcctgcaagcctctgggacagaggcagagacagaaaactttgtccaccccacgggcagttctcgaagctgcagcagttacgaacttcaacagcaaagcatgaaacgctccaacaggaggaagtatggccgctgccacttctggttcacaaccaagagctggaaacccagctccgagcagatggaccaagaccacagcagcagtgacagttggaacaacaatgatgctgctgcctccctggagaactccgcctcctccgacgaggaggacattggctccgagacgagagccatctactccatcgtgctcaagcttccgggtcacagcaccatcctcaactccaccaagttaccctcatcggacaacctgcaggtgcctgaggaggagctggggatggtggacttggagaggaaagccgacaagctgcaggcccagaagagcgtggacgatggaggcagttttccaaaaagcttctccaagcttcccatccagctagagtcagccgtggacacagctaagacttctgacgtcaactcctcagtgggtaagagcacggccactctacctctgtccttcaaggaagccactctggccaagaggtttgctctgaagaccagaagtcagatcactaagcggaaaaggatgtccctggtcaaggagaagaaagcggcccagaccctcagtgcgatcttgcttgccttcatcatcacttggaccccatacaacatcatggttctggtgaacaccttttgtgacagctgcatacccaaaaccttttggaatctgggctactggctgtgctacatcaacagcaccgtgaaccccgtgtgctatgctctgtgcaacaaaacattcagaaccactttcaagatgctgctgctgtgccagtgtgacaaaaaaaagaggcgcaagcagcagtaccagcagagacagtcggtcatttttcacaagcgcgcacccgagcaggccttgtagaatgaggttgtatcaatagcagtgacaaaacgcacacatcaacccacagaccttaggaggaggaaggcgagggcgg

SEQ ID NO: 206 - DNA, 100 bp, Homo sapiens
  misc_feature (1)..(100): DMR1:240912201
agataatgtatgtaaaggtgtgatgtaagctggtaagtgttattccaatttctgatatgctattatttaaaatgtagttggacaagcaggagtaacattt

SEQ ID NO: 207 - DNA, 2400 bp, Homo sapiens
  misc_feature (1)..(2400): DMR1:241681801
ttgattatggccattctttcaggagtaagatggtatcatattgtggttttgatttgcattttcctgatcattaatttgacgctgatcatttttttccatatttttgttggccatttgtatatcttcttttgagaactgtctactcatgtccttagcccactttttgatgagattgtttgttttttttctcgctaatttgtttgagttccttgtagattctggatattagtcctttgtcagatgtagattgtgaagattttctcccactctgtgggttgtctgtttactctgctggcttctttttgccgtgcaaaagctctttagcttaattaagtcccagctatttatctttctttttattgcatttgctcttggattcttggtcatgaaatccttgcctaagccaatgtctagaaaggtttttccaatgttatcttctagaatttttatagtttcaggtcttagatttaagtccttgatccatcttgagttgatttttgtataaggtgagggatgaggatccagtttcattctcctacatgtggctagccaattatcccagcaccatttgttgaatagggtgtccttttcccacttaatgtttttgtctgcgttgttgaagataagttggctgttaagtatttggatttatttctgagttctctattctgttccattggtctatgtgcctatttttataccagtaccatgctattttggtgactatggccttatagtatagtttgaaatcagatagtgtgatgcctccagatttgttctttttgcttagtcttgctttgcctatgcaggctctcttttggctccatatgaattttaggattttttttctagttcagtgaagaatgatttcactctcctgctagactccttcctctcaacctcctcttaatcttcctctcaatcaattcaggtcccagatcaaatgttactttctctggccatgggacctgatgtggccttttcagtcactgtgtatcagagcactataatttatttccttaaatgcacttctaccagaatagtagctctacaaagtcagaaactgtcttgtacatcattgcacagtcgtgctgcaatagttcttggcacacagaaggaaatatatagataaatgtttgttgactgaacaaatttatagagactgaatcctggaagagcaatagctgtatagcttagtggccccattcaatagtacaaaataagcttgacaaatgctaaatatttctgaataaacttggatggtaggatattttttcttctggtgactccttgggactttgatatttgattttcctgtttgccacccagtttaatgtcaacagtctggtaacacctgaaccttgttatgcttactttaatgttttcttataaatccaaaaaaaggccatttacagtcacgcatcagaaaaatctcattacttattggcccaggggtaggcactctactcctttctccacaaaacacccaaaataacaatgttgggctcacagcgagtgttctgtaacttttatttggttaactggtttttttctcaaattatcttataagataggtgtatctacaataagaaacagcggaaagtgaaatttttgtcaaataataggggaaatatttattgaacagagcaaagtaataattcattaaagtcatttttctgtttctaggaaaattattttgtcataaaaccaatggatcactgcctcctgtgtgtgtgtgtggtgcctttgcctgaccatctctgccgagatgacatcctcttgggggatgatgggggttttgtgaacagattcacagtcaacagtgatgactttggaataaagcaggcaaaatccaaaagaaaattacaaaatcaggtcttagactcaaagaactttaaaaggtaagagtatcatacagttaatttaattcttttaataattatagtcttttgcaagtaagctttatggtacaaagtgaaaaatgagatttaaattacagaaaataagaaattaagacaaaattaaagtaatataaacaattaattatagtcattgttcatgtatacacacacacacacacacacacacacacacacagagtgaaatgcttctggcctcaagaaaccatcagtgtaatagctcctaatttaagtgctattgacaactaaaacttacaggtacttgagtagattgaaaagttaaatgaaaaaattaaatcgtgaaaaaaactataaaagatacatgtgactagttactagcacttgaagataggaaaagttctaaatataaaagcaatggatatagaattcaaagaaaaagtttgatagatttgactatatacaaaataaaacctctggacatcaaaagctagtattttaaaagcaaactggaataaatatt

SEQ ID NO: 208 - DNA, 200 bp, Homo sapiens
  misc_feature (1)..(200): DMR1:243703701
cagtgagccgagattgcaccactgcactccaatctcagcaacacagcaagactccatctcaaaaaaaaaaaaaaaaaagaaaaagaaaaatatcctgaagaattttgttcatattatctacattgcaataaactagcgtaagttttcaactgcacagggacaatatgaaatgtaactttttaaagtgattttgcatatta

SEQ ID NO: 209 - DNA, 400 bp, Homo sapiens
  misc_feature (1)..(400): DMR1:244490001
attcagtggagattgtaaagtggttagaaatgtgtgaggatgaacaggagagggtaaggagggtacttcaagaagcaaagagtgatcaacaaggacaaatgatgctttttgttaaaatcatatgaggactttgaaatattcatttcgtaacttcaaggtcattattaatcttagcgtgagcggttttggtgatgttattgaggcaggaagcatgcagatttaagccactcagccttctgtgatgacaaatgagaatcagtaacgatattgataaataaatagacatgtgattttttgtttttacatttagcctttaattttatataccgtaatgaaatataaagagaatatgcaaaggtttagaaacatgtatcttgaaagtagaatattcgacctaatg

SEQ ID NO: 210 - DNA, 800 bp, Homo sapiens
  misc_feature (1)..(800): DMR1:245129501
ctcagtgagagaacattcagaggccccagcagcagaggaataacaggctccagtggagaagggaccgggaaggaagtaattggaaatctctcttcctcccaggttctatctcctctgctcactccccactgctgagggtcggtacaaaggggggtgacacactcccaccccatccttgtcacactgtgatctcccccaacgcatcagtgcctgcaccttccaggctccggaaagacgatgtgccctttctgctttggaaaatcacagttctcagaagaccaacagaaatgcatgtagaaaatgatggaaattactgggtatcagaggacacgatgacctgaatgagtaagaagatggtgggggccggggggtagggcggaagccagctaggacctgatagtgacaaatgcataactatttgcttattttcagtgccttttgcttcaaatgagaggtttctgctctcccacggtgaagtgtgaggcataaatcctgcttcattatgggggacttccaggggggtggcacggagcccaggagtccctgtggcatgatgagggggaagttgggaaagagaagcagaaagaaaatggaagggggccaaacgcaggaggtgtgaggaggaaagccaaggaagacgaggggagagggaatgataaaaaggagggagaagccgggcgtgggggctcacatctgtaatcctggcacttcagaaggctgatgcaggaggactgcttgagcccagaagtttgagaccagcatgggcaacatggtgaaaccccgtctttacaaaaaaaaaa

SEQ ID NO: 211 - DNA, 100 bp, Homo sapiens
  misc_feature (1)..(100): DMR1:245508001
gggttccagatctcgttcaggaagttagtagctgtgtgaccaagagcaagtcgttcagcttttctgagccatgattcctcaggtgtacacaccaagtgat

SEQ ID NO: 212 - DNA, 200 bp, Homo sapiens
  misc_feature (1)..(200): DMR1:245821101
ccaaaagaacaaagctggaggcatcatgctacctgacttcaaactatactacaaggctacagtaaccaaaacagcatggtactggtaccaaaacagagatatagatcaatggaacagaacagagtcctcagaaataacgccacatatctacaactatctgatctttgacaaacctgacaaaagaagcaatggggaaagga

SEQ ID NO: 213 - DNA, 300 bp, Homo sapiens
  misc_feature (1)..(300): DMR1:245890301
gaatgggtgaaaatatctgcaaactacccatctgacaaggaatcaataactaggatatatataaggacttcaaacaactgaataaggaaaaaaatctaacaatctaacaatctgggcaaaagatctaaataaacatttctcaaaagacgacatacaaatggtgaacaggtataagaacatcccgcatcatcaaagaaatgcaaatcaaaactacaatgagatatcatctcaccacagttaaaatggctttgatccaaaagatagggagtaacatatgctgacaaagatgtggaaaaaaag

SEQ ID NO: 214 - DNA, 2100 bp, Homo sapiens
  misc_feature (1)..(2100): DMR1:245906201
gagacaacccatggaatgggagaaaatatttgcaagctacccatctgacaaggggttaatcaccagaatatacaaagagctcaaacaaatctatagaaaaaacaaatctaataatctgatcaaaagacggacaaaagatttgaatagacattgctcaaaagaagacatacacatggcatacagacatatgaaaaggtgttcaatatcactgtcagagaaatgcaaatcaaaaccacaatgaggtatcatctcaccccagttaaaatggcttataataaagacaagcagtaacaaatgctggtgaggatgtggagaaaagggaacccttgtacactgttgatgggaatgtaaattaatacaaccactatggagaactgtttggaggttcctcaagaaactaaaaatataactaccataggatccagcaatcctactgctgggtatatacccaaaacaaaggaaatcagcttatcgaagaggtatctgcactcctatgtttgttgcagcactgttcacaatagctaagatttggaagcaaactaaacgtccatcagcagatgaatgcataaagaaaatgtggtacatatacacaatggagtactattcagccagaaaaaaatgagatccagtcatttgtaacaacatggatggaaatgaaggttattccattaagtgaaataccagtctcagaaagacaaacatatgttcttacttatttgtggtatctaagaaaaatcacacgttcttatttatttacttatttattactaaaaaatcacatgttcttacttatttgtggtatccaaaaatcaaaccaattgaactcatggacagagagagtagaaggaggcttcccagaggctgcaaatcgtacgtggtttacaggggacgtgaggatggttaatggggacaacagaaatagaaagaatgggtaagacctactatttgatagcacaatagggtgactatagtcaatgattacctagttgtatgttttaagataacttaaaaaatgtaatcggatcgtttgtaactcaaaggataaatgcttgaggggatggataccatattttccttaacatgcttctttcacattgcatccttgtatcaaaacatctcatgtactccataaatatatgcccctactatgtacccacaaattttttaaaaaataaaataatttaaagtcagagaaaacctatttaacgaaataacagccaaaaccaaaggaattcatcaccactagactagctctaaaaaaaattcttaggagagtcctatatccagcagcaaaaggacaatatttgccatcatgaaaacacaccaaagtagagaactcactgatagaacagatacgcaaatgggaaaaagaagggaatcaaatgttatcactacagaaaaccaccaaactgtaaaggcaaacaatacaagaggaagaggagaacaaaggatttacaaaacaatcagaaaacaatttttaaaatgtcaggactaagtcctctcatataaataaccataactgtaaatggtttaaattcccccaattaaaagattggctggataggtaggaataacaacaacaaaaagaatctaactatgtgctgcctacaaaaaaaatcacttcaattgtaaagccagattaaaagtgaagggatggccaggcatggtggctcacgcctgtaatcccagcactttgggaggccgaggtgggcagatcacgaggtcaggagatcgagaccatcctggccaatatgatgaaaccctgtctctactaaaaatataaaaatcagctgggcgtggtggctcgtgcctgtaatcccagctactcaggaagctgaggccggagaatcccttgacccagggagttggaggttgcagtgagctgagatcgcgccactgcactccaacgtggtgatagagtgagactccatctcaaaaaaaaaaagtgaagggatgacaaacaatactccacgcaaacagaagccaaagctgagcaggagtagctgtagtgtatcacacaaaatagacattaagtcaaaaaacaaagagagacacaaaaggtcattaaaaatgataaaaacatcaattcagcgataggat

SEQ ID NO: 215 - DNA, 200 bp, Homo sapiens
  misc_feature (1)..(200): DMR1:247002201
cagttacaaggaaattaaataacctgcttctgaatgactgggtaaataatgaaattaaggcagaaatgaagaaattaaggcagaaatgaagaaattatttgaaactaataaaaaaaaagataccgcatcccagaatctcttggacagagctaaagcaatgttaagagaaaagtttatagtgctaaatgcccagttcaaaa

SEQ ID NO: 216 - DNA, 1700 bp, Homo sapiens
  misc_feature (1)..(1700): DMR2:1143501
tgaagatggggataaacgggttcttaccaagttgggattgctggaatgcaaagggcagagagtctgccgtcgaaaatatgatatttggccaatgtcagtgactcactcctgtaatcccagcaactttgggaggccgaggcaggtggattacttaaggtcaggagttcgaggccagcctggtcaacatggtgaaaccccatctctattaaaatacaaaaaaacattagctgggaatggtggcggatgcctgtaatcccagctacttgggaggctgaggcaggagaattgcttgagcccgggaggcagaggctgcagtgagcagagatcatgccactgcactccagcctgggcgacagagcgagactctgtctcaaacaacaaacaacccccccccagaaaaagaaaatattatattcaaaaactataaaactgtcagttcttaagaggaaaaaaaacagaaatttattgcaattctcatgaaaactctggaacgcttgcacatctcccacagttgacagtgttgaagctgtggctctcaggacacgctgggtagccccatagatccatctacccaagggtgtgcttatctgacttcaaaaacggttgacatctcctctttacctcctaaatctttaatgagtttctttcagcaaactctcaccccgagacatatgggaaaggatctggagaaacatagaacctggtttctctttctgctttgagaagggaaatggagggttgctgagttgacaacggacaacccaccagccttaagagtgcaactggccagaaatggatagacccaccagacagaaatcagaaaggacataacaaatttcaacagcatcatcaatccactgcatataatggacatctacagactacttcacccgacaacagcagaataacattcttctgaagatcacatgaagaattcaccaagacagaccacattctgggccataaaaacacattttaacgaatttaaagaacagatattgtatcagtctgtttgcacattgctgatgaagacatacctgagactaggtaatttataaagaaaaagaggcttaatagattcacacttctacgtggctggggaggcctcagaatcatggtggaaggcgaaaggcacatcttacatggtggcagacaaaagagaatgagaaacaagcaaaaggggtttccccttataaaactgtcagatctcatgagacttattcactaccacaagaacagtatggaggaaactgccaccatgattcaattacctcccaccaggtccctcccgtaacacatgggaattatgggagctacaatccaagatgagatttgggtggggacacagccaaaccatatcagatactgtacagtgtctgctcttaaaccaaaatggagttaaactagagatcaataacagatagctgggaagtcacaaaatgcttggagaataaacagtacgcttctaaataacacactggtcaaagaagaaatctcaatagaaatcttaaaaatattttcaactaaaaataatacaacttatcaaaatttgtgggatgcagtgaaagcagtgataagaaagaaatatatagaattgaaagcatatattagaagaaatgtcaaaataatttttttttcaacagcaggagtttatttccccaaagctctaagctttccccttaggaaaccagaaaaagaga

SEQ ID NO: 217 - DNA, 800 bp, Homo sapiens
  misc_feature (1)..(800): DMR2:1588601
cgtgtccccacacccgtgtcccctacccacacctatgtccccacacccatgtccccgacacccatgtcccccatacccgtgtccccacacccgtgtcccctacccacatccatgtccccacacccatgtccccgacacccatgtccccacacccatgtccccgacacctccagctccagccttgctcagcaccatgggctgcactgtggcctccggtcccctcggagctcgactgtacttggcgacggcccatgagaggagggcgcacagagggcatagaggggtccacatgaggacacaggggagggccctgccctgcccgcagcccacagcccacagagaggcccaggaggaccccgctctgccggcccctagtcctggacttcccgccttcagaactgagaggaagtaaattcctgtggttcaatccaaagcctgtggtgttttgtcatggctgctccagtagattaatacacatatcacatgagatgttactatcaggggccacaaggccaaggctggaccctttatgacaaggaggctgggggtgtggaggaagaagcagggtctgacggtaggtggcagagccgggtcataccacgaatcccccaccagggccccaggcctgcgcagacctgggcagagctgctcgctccttccttggctgaacggagcctctgcctgcaacctgtgtgtgcggatgcattggcctccagccccgggcagcggcatgtccgtggtggagcagacagaccatgcagggcccaggagcaggcgcccagtgggtcccatttagacac

SEQ ID NO: 218 - DNA, 3800 bp, Homo sapiens
  misc_feature (1)..(3800): DMR2:1634601
tgaggggccaagaccaccagctggacacatcctcccacctcacacctggatcccctcggactgtgtctgggggtgggcgttgtcaggaagcaggatgggactagagagaggggggaagggacagggctttgctcttccccggtctgcccttcccaaacctgaccagctcagggacactgatgcgcgtcctctcccaatggccatggcaagagaagtgcccgggctggcgcgctgtcctccccatcctgcctcctcacactatgccccaagctttccacggagcctggttccagccagacgtctgtccattgccggcaccagggcaccctccacctgccaccagtctccctttgcagggactccagtgacctctgtaacacccccagctctgactggagatgggacagggccagtggtgggcaggtcagtgtttacccaccagctctgcagggaggagctgatctaccccattcatgggtttccatggcatgagtattcctgccacagctggtgggaggtgaagccagtgcacacaagcagccccaggtggccctgcacagagtaggggctgcccgccctctgtggggttggaccatgctgaggttctgggcctcctagcacgtcctctgtgcacagagagctgggcttgcctggtgcttccataggagtgaaggagggatggaggccagcacaggtaggcggggaggggcctggccctgacatctgggccacccacctgagtggtcacatgggactctcggacttgcgtataccttaggacatgaagatagagccccccatactcactttgcattcacaaatggtgcatgcatcttttttccacttggtgttgttggcgtgagattcgcccccggcatccacgcactctgtggtactgagccgtgattcaagtttctttatctgcagcaatgcaaagaacattcattcattgggcacttcagagtaacagcttggctcttgtattaaaagatgttatttcactgaaaataatgccttaaaataaacaacatttgaggggaatatttctgaagaacttttacagaatctccaatgtccttattagactggcggcagctgaccacacgccccaatggaagacattcccaccaccgtgctgtcaaataaaaaccgtagtcacaaaggcgacgttctcagaggactgtgggagcaagattcaaccagatgacgagaacgtcctgcacctacacttccaccagaacgaacgatgatcactcagaatccccagagtcaagtctgccttattttccgagtaacaacaccactggcttttctctggaagcacggggccccataacaaggtgacctttccaaccgctgtgccatgcacaggggtagcagaagcctcctggaagggtctccttcctcaaaccctctcttgcatcttgcagggccggggggcagacagggtgacagtggccggaaatgcctgggccatgaggtgaccttgggaagaggccacccacagtacagcaccaagctgcagcagggaccctgcactgcggagggtccagcaatctccacgactgagggaaaagtaaactcgcacctcattaaaaccatcctggatttggagttttccgtcccttgcatttgaacctaaactgtctgtgatgtctgaaatgaacacaaattatttatcataaatatcccaattcttctaataagccttcataaagcatgctcagccacaggtaaggctgtctgatgatggctgtgaataacttcagcaagccacccacttactcatgtcaattaaaacatcttctttgatctcctgtcagccataagtgtgtggtccccaacctgtgcagcagcagtgtctcacctatgcacacatcatgctgaaaaaggtggacgtcccctcaccgtaccatctgcatttcataatgacagctggacatctaggacctaactagccaaacagttactcactttgggaaatgcctcagatacggcttctaaatgaaagccatctttcctgcatgcctcattcattagcaactggcacttaagttatcaaagcttagaactttctagctgaaaccatgggggaaaaaaaaaaaaaaaggaagcctcaggaacagtggcacaggggccagagagcacttaggggtggcagccaggacggtctgcagaggttccaggtgacctgcatgtcacctctgtgtctgcggctgacctgctttaattcacagccagagagaagcagtgaccacgccggcctgtgtgtgcctctgcagtcaccaagatacacgaacacctctgcacacatggggtgcagggaaatgaccacagacggcacacaccctgtgctgtcagcagctgcaaaatcacaaggaacatccacatttctcagacccagcgctgccacccagggagctgcccgttcatcctgagggtggaaggaagtccagcattgtggacagaatcagcaacatgggagggcatagggcgttggtatttgccgacacaggtggggtggctggtccccctctgcctctgctatgctgtccagggtcacctgtgcacaaggcctgccctgaatgaccttggggttcacagacccccctccccagtggacccccctagggcacccaggccccagcacggaccccaagggtcagcctgggtttgtctctgcttctctcctagtgccaggtggagctgagtgaacactgcatgctgtccacttgggcagctgccgggggatgtgcacctggtctctaggctgcggagggaggaagacctgccacacgctgtccactctgacagctgccaggcgatgtacacctagtctctaggctgcagaaggaggaagacctgccacacgctgtccactctgacagctgctgggggatgtgcacctggtctctaggctgcggagggaggaagacctgctgcacgctgtccactctgacagctgccaggcgatgtacacctagtctctaggctgcagaaggaggaagacctgccgcacgctgtccactctgacagctgcctggggacttgcacctggtctctaggttgtggaggcaggaggacctgccacacgctgtccactctgacagctgcctgggggatgtacacctggtctctaggctgtggagggaggaggacctgccacacgctgtccactctgacagctgcctgggggatgtacacctggtctctaggctgcggagggaggaagacctgcggcatgctgtccactctgacagctgcctggggacttgcacctggtctctaggttgcggaggcaggaggacctgccacatgtcgtccactctgacagctgcctggggacttgcacctggtctcaaggctgcagaggcaggaggacctgcagctgcacgggatgagggggcaggcacaggagtagtcagggtacctctccctgtggctgggggttaccttggggctacactaggagatgatggaagtttctcccaaacctaagggctaagagtcctgtgagtaggaaaggagctgtgcttacagattaaatgtgctgcagacagccaggacctgcgcaccttgggaatcccatccacaccagcggagtgagcgcacttccttctatttagccataggtctcaatctccacccccttacgtaaaatcccagagataacccccaccacaggcactgaagaaagcagaagtaagttcctgggataggaaggagaggacagaactcatttccacagagcgccagagaagagccccgtctgaaaatccctgtggtcgtaccacagacac

SEQ ID NO: 219 - DNA, 1100 bp, Homo sapiens
  misc_feature (1)..(1100): DMR2:2189101
agcagcaggaccatcgttctaaaaatgaaattgcatcatactatataagagcttctgattgcgtttggggcttccaaaacctgaactcctggccatgccgccaccgcagcgtaagaggcggctcctcctcatccctcctgactcctgtgttgctcacaatgttctcctggagcagttcccaaaatggggttcgtgagcctgtgggggtgccctccaccctttcatggcctttcgggggtcttccctcatgcaactacatcatctgtggggttggattatcttcaaatgcttcagccaaaacaacttatgcaatatgttaagtgcagaggcagatgagaattcagctgctctattaagacacgcatgaaagacatttgctaaatgtgaaacaatgacgctctttcaataaatgtcttttttatggaaaatattatttttcataaatatataatcacttatattaacaggtactgggttttaaaaatatttttaataactaaaaagcaaataatgttttaaaatatcttagttttaattgttaatgtggtagctataactttcatgaacaaaatctctgcgagggcttcagactattaagcctatgaagagcccttgtaactgaacctggtgagaagcagcgttctcaggacctcacggtgagaagcgcattctcaggaccgcacggggagaagctcgttctcaggaccgcacggggagaagcagggttctcaggacggcacggggagaagcagcgttctcaggaccgcacggggagaagctcgttctcaggaccgcacggggagaaggagcgttctcaggacgcacggggagaagcgccttctcgggaccacacagttccttctttgtgtgcacacaccgagctctcccttcctcagggccactgcacagctggtttttctgagaggaagcccaggtaacacctcagtgtttctcctctctcccatagggctcatccttcgctttctgtattggccctgctgttttcccatgtttagggccctgatttttaatattttcttaattatttatttacttttcctcttattggaagaaggacgggcacagtggctcatgcctgt

SEQ ID NO: 220 - DNA, 100 bp, Homo sapiens
  misc_feature (1)..(100): DMR2:2224101
gagttatctaaggaggacaagcctgtctgagggcataaccccacttccagtgagcctttggtcaatttgtatgtgaacaggatcttctgcctttcttata

SEQ ID NO: 221 - DNA, 1200 bp, Homo sapiens
  misc_feature (1)..(1200): DMR2:2463801
aaaatacgcaggtgggattttgatttgaattcatgccacccagagatggagatgctgacaggcagaaactcatgtctccttattttagagaacggtggtcgtaggagacagccgcatggtgttaggcagaggcaagacgtcatgctcactgatgatgcctggaagaacatctctaggtcgacgatgtttgtggatggggaaaagccacgagagcggactggtcgctcttctgctgggaccagccccttcccactttcctgggctcccttctagatggtgggggactggaagcctatagacctgactctcacaccgtctggcttctgggaagatgtagggtgagaggtactggatgaagggtaggaagatggaggacagcatttgttttctgcttgaggcaggctatgcagcagccacagcagcagatggctcggctctaaccatggccgtagccaatgtcagtgcgagcagccttggtgacgttttccagagcaacagtgtgacgtgggctcctgagttcctcccacagaagtgaggcggcttcaacacggcggctgcagtgattccagacaggaagggcgagtgcgggtcagagggcttcagccccgggttggtagcagtttagtaatctctgggcaagaagagatactctctgtactcctccaaaagtactctgcctccctgttgctctctcagtcccatccacggctgtcggcttctgttttcctgactgaggtgtgactgacagactcacgatcctgttctaccagcacactcttcttttgcccgcccagtgaagtttggggccctgtctttatccctaaagctgccctagattgtgagctgctggaaggcagggatagtatttacccattttgaatgtggtcattttgtgcctctgactacagaatacagctcaggtgcctaatgtatagcaacttctcactaaacgttgaatgaatgacctcatttcttgtgacgacctaaatcgcatctgcctggtgatgagtctcatgtccccgtctgcagttctgacctctctcctgaattccacattagtcacctgcagctttaccggattgtctcaaagatgctccaattcatcataaaccagatcacacctgctctcaggccacgtcacaactgctgtgtctgtttgattaagggcattgccacctgtctgcatctcctattagatcc

SEQ ID NO: 222 - DNA, 500 bp, Homo sapiens
  misc_feature (1)..(500): DMR2:2882701
gaaatgaaagaaaaatatagttaatctggcatttctctgattaccgatgcattgagtatctcttcatattattttaagcacccagactcatccttttctgaattgcctgttcattttatttacacatttttgggtttcttctttttttttcattcttaatttgaagatatattaacctgtatattctgcataacaatctcttgtcagtttcaggtcttctcttagtccatcactcatctcttcactgcacggtatcctctgctgaacagaaaaacaacattttgagtcatcaaatctatttctttccactatgggttgtacttctgagatactgcttaagaattccttcctcacccccaaattatgaagacatcctccattctcttcaattatctttacagctttgtctttcacagtgagatcttcatgccttccagaggttgcccttgcttggtgcaaggcagcaatacaaccacactttctctatagactgagcatgt

SEQ ID NO: 223 - DNA, 3400 bp, Homo sapiens
  misc_feature (1)..(3400): DMR2:3717101
ttgcctgtcttttgaacactgctgttttgtagggtgctctccaattcattttctcttctagttcaggccacccccactccattctctccattatttccataatcatccatgtgccaaagacccccaggtctctctcaaagtcaggacccacatctctaggactctgtcacttggatgtcccaaagacatctcaaactcagcatgtccaagtttgaactcattggcctctgactccaaacccaattgttattttgtgtttcctattccagaagatggaactgcccacccagctcctaaacccagaaacgtgagcatttttctcaacccttcactctcccagaaacgcccccagtccctccctgcccacccatcccacctcctgatcgtctctggagtcagctcacctgctgtcatgttggctgctcctagccttgttgaggctgccaagtttggtcacctggaaggagtcccatgccttccgctggtctccttgcttccaaccttgtccctttcccatgtgatcacgtcacttcccttgttcacatacattaagtcactcctcttggctccagggaggtgaagtctgcactagttaccatgacgtttaaggcccttcttgatctggcccctgtgttcttctccagtcttgcctctcaccgctcctccctctgtgtctaggatccagtccttgatggattttcagtttcccaaaggcctcttcatgcgcctatcctcaagccagggttttgtgcatgctgttccttctgccttgtttaactcaactgactgttttctgcttataatttaggtctcaatctaacggcctcttcctccaggaggcctcctttctccctagtgagggtcagatgttcctctcccatgcttccatggcacccatgctggcctcagcagagcccctggcacctggcactgtaattgcttgttgacttgtctgtgtccctctgtgctcccagccctctgaggccaggagtggtgttggtcttttccaccactgcattctaactcagcacagttcctaccatcagaggtgggtcctctatgaataggtcttgaataaatgaatgaagcagtgattgagtacttacgggaaggctggtggctggcaggatcttaggggcaggtattctcctctccttggttcttctgtggattggcctagatgaggtcttgcttctgagtggggctgaccaggccaaccacaggctccacaaaccgtctggctgtctgattctatgggacggcttctctggctcttagagtcagcaattttggaggcatggagagcatcagttctccttatattttttagcagggagtgcctctgtgggtgcatgatacataaatcaagtgtgtggctgtttctatcaatgagattcacgtggccagaccccaggttggtcccaaggagtgaacctcacctgtgttcagctctgggacatgcctggctgatgctctctgagaaagtccagggccttgtggactagggggcagcatacaaaagatgggggtctgttttcatcgccatgcagttaacactggaaatgagcagaccctcactgagcatacactctgaaacaagctctgtgctgggtggaggcttttcctattgtgtctggagttggttcctgccggtgggtttgtcgtctcgctgacttcaaaaatgaagccacggacctttgcagtgagtgttacttaaaggtggcacggacccaaagagttttataatcctcttgctagctacagattgctgactggtgcattttacaagcctcttgctagctacagagcgctgattagtgtgttttacaatcctcttgctagctacagagcgctgattggtgcattttacaaccctcttgtaagacaggaaagttctccaagtccccactcgacccaggaagtccagctggcttcacctctcactatctcagtgccttacaaaatcctgcaggcttggtgcagctgtttccttttttttttttgggatggagtctcgctctgtcgcccaggctggagtccagtggtgcgatcttggctcactgcaagctctggctcccgggttcatgctgttctcctgcctcagcctcccgagtagctgggactacaggtgcccgccaccatgccagctaatttttttgtatttttaatagagatggtgtttcaccatgttagctaggatggtctcaatcttctgacctcatgatctgcccgccttggcctcccaaagtgctgggattacaggtgtgagccaccgtgcccagccagctgttttcattttccaggggctctttcccgctgcctcccaagcctctggctgtccacattgggtgtaattctgcttcctcattccgagctggagctgctttctttctctttcctgccttttctagtatgctgaagggtcaccgtgaagattagagttgacgtgggttggaggccatgataatggggatggggcagccatgtcaggcatccccctgcctctggagcccatcccacagggggttcgacggggctttgcctgatgtcttggaatgttggtggacactccccgtgttctaaagtgtcaggtgtaaaaacatgagagaggcttcaggtaccaaaccagcctccgacatcacccttaaaccttatataaggactgtaagtaagtttattgaatgaagaaactatagacagtagtggatgctgtggcattttctctctcctccctgtgggtgcctcatgctccttcaaatcagaggcgaggctccagagaatagctcagagctctgggatgctggaggagggaccaggtcggatgctgcagggtaaagcacctcttgagagggtgagggtgtgcttgggacgacccagcccgtgtgccaggggtttgggtttgcaggtgagtgtgcaggtggcacctgcttccatcatcctcaaagcacctgaaggatggtgggctctgtgttgcctgtgaagacagcatggggaggcagcagctgtggaaactgcacttgtcccctctggggagctggtgtggcaaaggtgtgtgtctttccttgggaggcaaatggatgccttagaaggtggccagacttgagttgtttaagaatcgttgccagccatggtaagggtctgtgaggacgtagcaaaacgttgtggtttgaagcaagagtcagctgcggaaagtatcagaaacattctgcatcaggaacagtccagcatggagtctctgtgaggttttcagaggaactcactaaagcctgcactctccctgcctccctaaagagccacatttggacacctgccgaggaagaggacataggaggtcagatgacagtagctccagttgtattagacactcttttgttctgatgccaagatgaggaggaggtcg

SEQ ID NO: 224 - DNA, 2500 bp, Homo sapiens
  misc_feature (1)..(2500): DMR2:3959101
caacatgcacaaaccctttcccatgggagcgctgagagaagcctctggagactcgtgcttggctgccacgtggcgccttgatttggttgtgaccctgggaaaagccctgcatctcctttggaatttgctgacccctctccgtgggtctcaccttgagcctttgaaagaggatccaaggccccagatagtttttcttttgtgagggtcggtttcggtggggaaacatccgtaatttgaagagtggtataaaatgaatagaataacatctagcatcttctagttattcagtaaatatctgttgaataacaaaatgcatactacttgaccatttttttttctatgtggatagttgaattgggagaatgcacagctggttatctaagtgaccactgggtgtcactgtttacccactgaccgaccatcagttttttttttttttttttttttttttttcccctctcacctggtcaggacaaaagcctctggaagctggtccaggtgcagagatttcaagcttgtttctcataagtaacctgctatctcaggggggaaaaagagcgattcctatgttattcacttcaggatgttttctgctttctgtaatctggatggagagctgatgtgttttctgtttcttcatctcccttttatcctcctaaagaagttttcttttgctaacgaaaacaagagtttttattttgcaatttatcttgaaaataggaacgctggtgtgaacattagttggtacaagacggcagggtttcatatgtaactttaataggaaactattgcaggtgctgaaagtaaattctcaccttgtcaggctcagagcatcatgattattgctgcagtgagcttcctggaaatagaggccgttctcactctctggtgaaagacaggttgggcttcaaaggccacctccactgttctgatctttggcctctaaggtgatgctcaacatctttgatcctcagagttctttggcccccagcagggcttctgaccccactcccagggctgctgggaagtaccaagttcaaacccaaaatttcttgttttcctccttaggggtgttctgctaacatctgagctgatgggtcttgaaggaatattatgtttcctctgctcttcccttcgtgatgtaatttaccatgtctttataacacaatctaatatgggttgggccaaatagctggaattcctaagtcagaagttttctctgaaaggcacgtaactgactgacttgtccgtgtttgtggatttcactgctgcagcaagaggacctagaaaatggccatcttaagacctgaagaggccttagaatttatccagtttagtgtttttttttttttttggatgcattttactctttcttcaatattccatagagggctataaaaccttacaagtgggaggtcttaaaatttccccataagaccaatgatgtgagtacaacctgcaggaaacagaaggaatccagttagacagtccctggccactcctttctcagccctcctttcctgcccacacctcccctgcgggagctgtgctaattcctcactgtatcttggtatcctctactttaaagggagaaaaaaagatgagcacttatgtttcctgaatctaatgcattccaggctgatgaagagtgacggctaccattaactgaatcctttctctgcgcaggacttgtgttcagtcttttattttcacaatttcatttaattctcactacagtcccaggaggtgctccaagttttccctaatttacagatgagaaagctggagcaccaatggaggttaaatggcctacacaaaatcacccaactaacacctggtcatttctgagtcccttgctttttaaaaattgatacacaatattttatgtatttatggggtatatgtgatattttgctacatgcatagaattcgcaatgatcaagtcaaggtatttggggtgtccatcacctcaagtactgatcatttcttttttttttaaattttttatttttgagacggagtctcactctgtcgcccaggctggagtgcagtggcgtgatctcggctcactgcaagctccgcctcccttgttcacgccattctcctgcctcagtctcccaagtagctgggactacaggtgcccgccaccatgcccggctaattttttgtatttctagtagacatggggtttcactgtgttagccaggatggtctcgatctcctgacttcctcgtgatccgcccgcctcggcctcccaaagtgctgcgattacaggcgtgagccatggcgcccagccaagtactgatcatttctatgacttgggaacatttcaagtcctttcttccagctactttgaaatatacattgttgttaactatagtcagccactctgaattgaacaatggaacttacaccttttgtctaactgtatgtttacacccattgactcgtctctgttcaatcccacccacacatcctcccacccacacacccttgccag

SEQ ID NO: 225 - DNA, 200 bp, Homo sapiens
  misc_feature (1)..(200): DMR2:4448301
gcataaagctcctgccccaaccccttctcctccaaggtgcctgtttctaatctctgcgggaggctgtgcttcccagcctgtgggatgccaccttgcagagtgtaactctttccaagaaatcatgtctccttttccaaatttattaattgtgtgtttttttttctttaagttaatagctgtttaaaggcttggggaaattg

SEQ ID NO: 226 - DNA, 200 bp, Homo sapiens
  misc_feature (1)..(200): DMR2:5329601
gatatagaaaaatatgccattttaattatctttatatcaggtttgagagttgtgacatttgtctgaaataacaatatatttaagtacattctttatagctggaagagattctagttttctcagagaccaagaatgcatgcgtaatacaaaataaaagcaaagagaatccttctaagatgaaccaatatattaacataatg

SEQ ID NO: 227 - DNA, 200 bp, Homo sapiens
  misc_feature (1)..(200): DMR2:5932901
gacaaagggagccctgctcaggtgagacaaggctcgggggttcagatgctggtcgtctggtacaggtctctgccgtgtgcatgagaacaagtccgtctgccaggctggacgctgctatcagacagattgatttgccgagtgtctttcagcatttccctaattcctttttgaaaagcaagagctaggctgatcatgcacct

SEQ ID NO: 228 - DNA, 2500 bp, Homo sapiens
  misc_feature (1)..(2500): DMR2:6080001
gaagtaaatgaactgtctgcaactgtaatatatatagttcagaaaaaattatgtaagcagatgtgcatatgtatatgagagagaaaaataaagtaggagacagagaggctagagtgacagggcaattgctgtaacgtgctaacgtttgagtaacctgggtaaagagtatccaagaattctgtagcattcttgccagtttttgaagagtctgaaatatgtcaaaaatacaaaagaaaaacagaagattgaaattacagttgtgggacatactgataggagctgaagaatgggagttgaacagaaaattagggaaaacatgagtggggaaagaagaaagataaggacacattcagagagggagggagttggacagaggaggaaaagagagacctaaagagagaatggaagagaatgtgacctgggtgcacaagagcttctctagagctcggccttcatcatcctaagactaatttttaatttgtacaagggaatctaaaagacctctccgtcaggccgggcgcggtggctcaggcctgtaatcccagcactttgggaggccgaggcaggcggatcacgaggtcaggagatcgagaccatcctggctaacacggtgaaactccgtctctactaaaaatacaaaaaaattagctgggcgtggtggctggcccctgtcgtcccagctacctgggaggctgaggcaggagaatggcgtgaacccgggaggctgagtttgcagtgagccgagatcatgccatttcttcctgggtcctcctggagagagtgaggttgctcatgcagcaccagctggatccaagctccctgagctccaggaaggtggaatgaacagccactcaacgagccaccctgccttggagaggccccactaggccagggcttgctgtcctggtgtttcccagaagccagaagccccttcccgctctccacatcacgggtcccggtgccttctctcccactcttgcccgcagaggtgcctggttccgtattccacacagaagctgctcctgcctcctactgttgtcaatgtgtgaagaatgccagatgcggggtgtgcagtttcaatggccctggctgcaatccagggtctcagagctgggaatgtgtcttgccaacccactcagaaattgttcggatgaaatcaagggaggccagaatgtgataaccatggccagcggtggcctcacagaccattgggtaaaagtttatcgtgtcttggaggagggagtcacatcaatatcgagttggtcggctcgactctcgagggccgtgcggatgctccacactcctttgtctctcagtgcatcatttcacagtgtaagttgaagacagcaagttctggcaacagcttgaagttccatctggctaatggagaactcgctctcctggtgcatattggtacctaaccccggtcttctttaggatgacagctggggcatgatgctgtgctcagcctgctgagcagtgtgcaatctgattcatcctctcccgacctgagaaagctgaattccctattgagagcgactgtgaaatgccccattgtgaaggcagctacatccaccaacaatgaatggccgccaatttggggctatttaaattaggagtcaaaggtcttctggatctttcccatcaaagattaaatccctcgttccaggaaaagagaaagtgaaactcctattatcaggaagctataggaggaaccataaaccagtgacaccgatgatcttttccaattaggcttatgtaacttatagtggaaaacacttagctgatggcttaaatagttttgttttccctcgattatatgcagaatcaatccattggtgctgattcaactaattctgattgctttggctgggtcagtttattattcctctggattaggaacttccagtttcctaatgcttataaaatccaatctaatttttttcagtctggagtcctaggccacctctcgacagatgccttcccttcttatggaatctcattttaacactgctcaaacccagccactactataatttatcttcctgctaattttgatttatttatttattttgtgttttccaagcctccccagatatgtggtcctgtttttcattctaatggctgtttagtcagcaaattgaaaattgtcacccagttgaaaatagacagatccacattcaaatgctgctactgcttcctgctagctaaataatgatagaaaatttatttaaacctgtctgacccccagttttatttcctctaaaaatgggatattcatctcacaagatatactgcattgttatataaaatactcaattaactcacagatgcaaattgtctagcatgagacaaggcatgtagggagagcacaagaaagtttgctcagtctctcccctccgcacaaatccctctgcttcccctgcctgtacagtagaggccttttcccctctctacatataaaatgcatttatccgtgtcaaacaatccagccactcaa

SEQ ID NO: 229 - DNA, 1700 bp, Homo sapiens
  misc_feature (1)..(1700): DMR2:6776401
cacttgctttttgtccttacaatagctgtctgatatgatcaggttgtgttgcaataggtctcatttattgtctaaaacagtggtttcccttgttttctgattatttatttagtaggacaatctgagaacataaagaatctactcctattatgtattaattaattatgtattaataattatgtaattatatacacgtactactgaaaaagatgaatacattacaacatgggttcccaacctctgacctgttagaaaccaggccgcacggcagcaggtgagtggcaggcgagtgagtattactacccgaggtctgccttctgtcagatcagcagcaccactggatcctcatagtagcacaaaccctattgtgaactgcatatgcaagggatctaggctgcacactccttatgagaatctaatgcctgatgatctgaggaggaacagtttcatcccaaaaccactaccaccccaaccctgtccttggaaaaattgtcttccacgaaaccagtccctggtgccaaaaaggatcactgctttacaaaacaaaagggaaaaacaaacgaacaaaaacaaaaaaacaaaaagaaaaaaacaccttaaaggatgagttaagggaaaatgaataaggttttaaatcaatttttaatttttgcttatcactaaaaatacaaacctctgtgctttaatgaagaaatattttatcaataataattttaatgagaaaatatgattttttatgttgctttgacactttgggatataataaaggtgaagctgtaaattcagttcattttttgtactaaatcatagttgaaaagtgcatatgacaaaagtacataaatccaaacagaagggcattatcaactgtgccttttacattttggtatcacatttcaattccattcaacaattatacctagacctgttgctgttactaaaatacacctactgaattttctttttcatcaatgtaagtgagttgttcttgcaagtgaattaagaaattagtgcactttttaaattttatcaaatggattcaaaacactataactcattttagaaaatttaaaataggttaaagatgtttttgtacattttcacaatgtacagatttgagagtttcgttgtcattgctgagatatgttttgatgataaattcacattatcatagaatcacttccagacatctaatttcgaattgcccatttactctccacagcgtacgtttatctcaaaaaagcagtcactttctcatttgttgtttataaatcacctatgagttgacgttatatactttaggtaattatttttgtatgtgtgaatttatttatatttaatttagtaatttaaaaaatacctggttggtagcatctgcggttaactagcactcagcacctgtgtcccccatggatcacttgcattcaaataataataattttcataactcttttctaaatttgacagctcttctgagtactttgccatgtgatctgcagcaaacgtatgtgtgctatgaaatattttcatatgtatttcccttgtctttaaaagatattgcaacattttaattgacactttatcaggaataaccctgtgaatgactgatacctgaccggatcttgttgtattataactgttgttgttaattgcacaaagcatcaccgattacccttctataattttttccatgcaatattatt

SEQ ID NO: 230 - DNA, 1100 bp, Homo sapiens
  misc_feature (1)..(1100): DMR2:6828401
gttcaaaattagcgcttttcctccctctagtggaaatgtaatgtatttgatctaaattgaattggtttcagtatttatcaaatttttaaaaaaagagagaaaaagagttggcatatctaaaacataatcagggattgaaccaaatgcaatttgttacaggttttccacacaaatgtcttaaatattttacttgtttaaataaattcaaaattaacaatgaaaagctgcaaagtagatttagatcaattgaagttctccaaatgaaatagacaagtccaggctgggtgcggtggctaacgcctgaaatcccagcactttgggaggccgaggagggcggatcacgaagtcaagagatcaaaaccatcttggccaacatagtgataatcccatctctactaaaaatacaaaaattagtctggcatggtaccatgtgcctgtagtcccagctactcaaaaggctgaggcaggataatcgcttgaacccgagaggcggaggttgcagtgagccaatatcgcaccactgcactccagcctggcgacagagcaagattcagtctaaaaaaaaaaaagaaatacacaagtccacattagatgcttggtatttaatttatgcccacatgcatctgaaaatcagtccacgtataaaaattactaggtcaaagcatgtcactgaataggacaagaaacacagcactaacaacattaataagaaagaaatgtttactccattgtaattcgatctaacatgtatggtatctgttttacatgagggttttctgattccctctctctgaaacctttgttaactccctcaggcaaagtaaatcagaatcagaccaggtttgtctgacccacctgtgccagggtgggcaggaccacagtgatgatcaccaggtgtgtatgtctgcctctctattgagggagactcttcttctaattatttttctctccttacagttgtagagcaacagagagacatggcgaattggagaaattgtgactccaaaggtattcccattccattgtctaataatctgaacagttgtttgtttgttgtaagtaaaatcaaatagcaccatgctggctgaattcagtctgca

SEQ ID NO: 231 - DNA, 700 bp, Homo sapiens
  misc_feature (1)..(700): DMR2:12509001
acccttccccaacaggctccagtgtgtcttgttcctccccttgtgtctatgtgttctcattgttcagctcccacttataactgagaacgtgcggcgtttggttttctgtttccgtgttggtttcctgaggataatggcttccagctccaacaatgtccctgcaaaggacatgatctcctttccttttacagctgcgtagtattccatgctgtatatgtaccacattttctttatccagtctatcattgatgtgcatttgggttgattccatgtctttgctattgtgaatagttctgcaatgaacatacgtgtgcacgcatctttataatagaataatttctattcctttgggtatatatccagtaatgggactactgggtcaaatggtatttctgattctaaatctttgaggaatcgccacactgtcttccataatggttgaactaatttacgtttccaccaacagtgtaaaagcattcctatttctcctcaacctctcaactcttgtttcttgactttttaataaccgccattctgactggtatgagatggtatctcattgtggttttgatctgcagtcctctaatgatcagtgatgttgagtttattttcatatgtttgttggccacatgtatgtcttcttttgagaagtgtctgttcatgtcctttgcccacttttcaattttttttttctgtaaat

SEQ ID NO: 232 - DNA, 200 bp, Homo sapiens
  misc_feature (1)..(200): DMR2:14187101
acacaggcctacaagctaaaagaaagaaataattttgaaataatcacctccaaatcagaaaccgaaacatgttactatttatatcaaaaggaaaaaacttgtgttaaaatccttgatttgcacatttgtaatcgactaaaaaataatgagatatttcccactcaagcatcaaaatatatcagtcaaaagtacggtaattt

SEQ ID NO: 233 - DNA, 2000 bp, Homo sapiens
  misc_feature (1)..(2000): DMR2:15258701
aagatgtttatcaagacaatacgtgcacagctgaacatagacccttatcaggagtttttgattttgccctttgccttgtgatctttattggcctcagaagcatgtgatctttgttctcctttttgccctttgaagcatgtgatctttgtgacctactccctgttcatacaacccgtccccttttgaagtccttaataaaaacctgctggttttgcggctcagatgggcatcaaggacctaccgatatgtgatgtcacccctagcggcccagctgtaaaattcctctctttgtactctttctctttatttctcagatcagctaacacttagggaaaatagaaagaacctatgttgaaatattgggggtgggttcccccgatacatcaatgctgctctgatcaaatatatgctgcaataattgaaaaaataactgaatatagattttttaaaaaaacccttgaaaccctagagtcacaagacattttttaaatgttactttctatttgattatttctgatgcagagaaacatgattttaagcacaaagacgttgaattgcattacaataaaattatacgaaagtgaaaactacacaaactctccacacaaaatgactccatccaaacccctgcattaatacgcttgaccaaattttagcagggcttctagcaaggccatgtccctagaatgactccagtccccgtcaaaatgccaagaaagttcaaagctgtcagtagaatgcattgtttgttctagccaacacctggtgataagccaataggctcctcaacccctctttacagcagttactttagaaagcttgcaattataatcctttctctgtccctttgagatgtaaatcttctaccacctagtgtgtttcctgaaggacctgggatcagtctctttgcaatataaacactcaaggagccaactctctgtgggagggtaagggcctcacttccatggatgccttgttccaacttgcacaactacctgctgtcataaagacatgagcagtttgtttcttctccagataagtgccaatttgcaaaccaagatggttcagttacatggaccaaacctcccttaacgccccttgtgcctttcctttcacacaccccagtgttgaaaaagtattctgccttttttgttttggtgaagctgagcttggtttatgctgggctctcttccctctgcagtagttagtacttaagaaaatctgtctttactgcctttaaaaagtatctggctttctctttgacaaaagacacagtagaaatggtttgaggaaaaggaaagatgcaacctttctgacagctgtagatgtgttcttgtatgtttttaagtgatagcagtagatatcaaatcacatatgttgtatacaaatagagctatgttacagttttactttaaatgtgaatatttaaaatgtgctggaaactatgccttcctttgtaatcatttaaaattataaaatttttagatatcaagtgtgtgagaggtaatcaggtgattttaatttagctacatgagtaaaaaaggttcaagttcacagctttgtagcactgttttcctaaagtgtgattttcagaccacctgtattgaaattacctaagtgcaacctcaaaaaagcaaattccctggctcttatcaggcttactgactcaatccgtgggtttgggaaagacatcggcattcgtggaaagaaaccagtatcttgcatgagcatttcctggttaattctaatagcaaagaaagtgtgcagctctggagcctttaagcttctgagtgacccaaccaactggccaatggtgagtttaggaggtgaatggaggtgggtcctgggacttgaaacaaaggtacagtgaggtggtcactgcaagagtctggacagagtggatggggttgaaggagacaggcgatttcggttgtaaatgacattatgttaaaggactgaaaaacactcctatgctgtcttatgccagctcctggagcagg

SEQ ID NO: 234 - DNA, 1100 bp, Homo sapiens
  misc_feature (1)..(1100): DMR2:15522001
aaacatgagagggtgtaataggaagctagacagattaaaggccaaaccacaaagggcctttaatactaatctaagaagttatatatctatcccaagggctaaagaaaatcagaggatttttaagtagagaagtaaatgatcagagtagtactttaagacctgtaattctttctgacaacagaaatgaaaagaaattagaggaagaggaaacaacttgataagtaaattgggtcagaagtaatgagggtctgaagtataaggatggcactagaaatggggaggaggaggcatactaaagaagaagaatcaataaggcttgaagatcatgagttgagaattatctaacataaatctcaagttttggcctggtggaaatattatacatcaagatatgggaatacatgagaagaagcaggtttgaaggaggaaaatgatgaacacagaatataataagtaggaggtacttgtgagctatccaggaaaagatgttcagtaagcgagtgaataaatagctctgtggcctaggagtaacttctgggatacagacttcaaagatattacatatgcattcaagtggttaaaaaccattaggtctggataaggctgcctataaaaatatatagaataggtaagggaaaaaaatatggccaaaagattccattaaaacaccatgagaattaataaccaagtttaacgtaggagcgatatgcagttgacccctgaataccacagggttatgggcgccagcccccaagcaggctaaatccacgtataacttttgactgccccaaaatttaactactaataggctaatgttgacccaagccttattgataacaaaaacagtctattaacacgttttatatttattacatactatattcttacagtaaagtaagctaaagaaatgaaaatattaagaaaaatcataagactaaatacatttacagtactgtactgtatttatcaatactgtatgtttacatagtctgtttacaagatcgatcatctatctgaaacggtgcgcaccacagctgcagattcaacctatggcacatatcgagcaattcaactttttcttgtcatgtcatgacttttcc

SEQ ID NO: 235 - DNA, 1000 bp, Homo sapiens
  misc_feature (1)..(1000): DMR2:16079701
atatagtctctgttgcaactcctcaactctcctattgtcctgtaaaaacagccacaggcaatatgtaaatgaatgagtgtggctgtgtgccagtaaaactttatttacagaacctggtggtgggttggatttggctcctgggctatgacttctgatctagaagaaaagatagaccttgaacaaatcttgataacctggtggcagctctcagtaatgatttttcttccactttctggaccacagtgcggagggttgagttactctgcagttcatgaaacattacctcattgcttcatgccaggctcctcttctcatttatccacttagtttaaattcccatcccatgcccctcttctcataggcaactgctccaacgcatctgctttgtatccttgaaattacaagcatctctctaaagcacgttgccttgtgtgatgtattctaaacttatataaatgatattgtgctatcaactgttctgtttcttactttttccccgttcagcattgtgtttttaaaatctaagctgtgtgtacatctagttaattgtttccaaatgctgcaaaaaatttcacatcgtacatcactaagttttccttactcattcctctggtgatggccactgagtttgctgctagttgcccccaactcctgagtttgggccaggcatcctcctgagtttcctgtgtggatgctgcacacccctggctttcccccttggcatgcccccttgttgtaccatttgtccactggatgggatctggtaagcctggtgctcagtagagccaatagtatcgggtgaatgaattagttttcctggaaaggactctgccagcttcctttttgtctgtcaaacagtctagtagaacacttggtatgtcctggttgtccccaaacagcagatttagcccccaccctggcagcacctgttctgtggggcatcttttccctggcaaagcgctttcccattattgcttcttatgtagtgactgactgttag

SEQ ID NO: 236 - DNA, 1900 bp, Homo sapiens
  misc_feature (1)..(1900): DMR2:16520001
tcctgtgtaagcccaggggtacaaaaataaatatgacatttaccatcaaggccccctaacctagcagcagtggagccccctgtgattctgctgagactctactgtaccttgctgcctgacacaatcaattcacaattcagggagaaacatagcaagtgaaagtctatggagagttatagaggaagcaagaatgggcaaatactgaaattgagtgattgatacctggaggttcaccatattactttccttacctaattaacatctggaaaacttcacatcacaggcttgtaattgtgtcttttctgaaatagagacacccaagtttaaaatggagcacatcttctcagtaatcaagactcctaaaaacaaaaaatttcaaaacagatatgtccttattgggacttgttcttgctctccggtttacatagggttttacaggcaaacatggccactcagaaaggagaacatatgcaacgagcaacccacactccatctgccattagacacagaagacaggagagccacatggaatgagagacctctgtccaaccgggacataataagatactcaatcctgtttttcaagacttctgtgcatatatcaccaaagacactagaaacaacttacagtactccaagacacgtagtcttataggaaaccattctccctgacattggagtctccacttctgagaaggaaatagaataatcaatttcctacaagcttgctttgtgcagggaaaatagcttgattgaaaactcaaacagatgtttctacttcgcgtctgctctgagcaggcttttcttcctggtcctttgaaatctttggctatgatggctactggtagaatggatccatctctgcatagaagatggcaacaggcagagtcctttgccgatgccagatcccttcccactcaaaacattgccatgtgacaatctcagaaagcagctcctctggttctgcctgcactgagaatgtggttttagctgctggctgacatggtgcttctgctgctgcacaatctggatgttgagactggcctaatccagctatttaggtgggtcatttatatcaggccacagggaatggggtgatggtgccaatctatcattcagtgtttttccctgagcacatcctacatgctgaggcttgtgctaggagacttcaggaatcaaagaggagcatgatttagtccatccacatggcagctggggcaacagaaaataacataactcaagctacatgttcaaaagcttgatctgctccttttgtccacagctcactcctgtttcagtgtgtgaccctccactccacccactcataccagagacctgggattcattctggatcttttcctgacttttctccccacatataatcagtcattaagtcctccagagctttcttctgcattctgtggggctgcccccactcagccatttccttctcccgctcccctcccaggatgtcccgcgccatcttttcttcatctgaggctggaggaaggttcacggcactttccttttcaatgtttctcagtgactccccatgatccttctgatcaagcctgtccagtcacctaaaactcagatgccctccatgctgcactctcatgaggcatctcccatttcacgccctacttctgtcctttgggagtcaaaccaggctcttgactccttgcagtattcaactcacattttcctgatacctcctctcacttcctgacttttattctgtctggaatatatcttgctttgtccaaatactactgcctgttcttcataccttgctcagataccactcctgtatgaagccttccttgacctgccagtctaaaggtgtcttgtttttctttaaatccctttaagacttctgtttgtaaaagcattgaggtta

SEQ ID NO: 237 - DNA, 300 bp, Homo sapiens
  misc_feature (1)..(300): DMR2:18356801
tggtctcagagactgcccctggattttatacagcttgagaaatgactcatctctgagcaaggaacctttgtgcctgtgatgtcttcctaggttgtgagctccgtggagactgtgccttcctattgacaactctatggcagcagtgcttgcacacactcagctatgttaatatttcctgactgaaaggataagtaaactaccatcggagggatcagagagaggaaagcatgacttcttttggggaagaagcaggggatggttgtgaaagggtttttagaggaaggggcattttagctgaga

SEQ ID NO: 238 - DNA, 1800 bp, Homo sapiens
  misc_feature (1)..(1800): DMR2:19955801
agaattagaaactagtctgatggtatgatgttaattgagtgggttaacaactcagggattaaattcaataatttttatatgctaaataactcagtccaactgagtaattttttttttaattcttttttcactgtaactgtcaagattttttcattcaaaatgtgtactattaccaacctctggagggagctcaaagcctttcttggaaggagcactttgctgaaagccaggcatggagactgacagcaaagcctccagggtgcgctcctgccaggtcaggctgcgctctcctttccctgacctggtcttcactaaatcttaagaattttttaaatatttagtaaattccaccatggatactctaatgctggtaactattatgcccttagtgtaatttgaagcaagtttgcacaccttaactgctttctaataaaatctcattttttcctaagtatataaaagcattcttccaaccaatgtttacctacaattataaattacactcatgttcctttctttttgatagatcctaaatactcacaagggtttatcattagcctgattacttcaaaattaaaatgttagtggttcaaggtaagagtcagacttcttggattcaaatgacaggcacttgttaattctgtggccttgaataaattatttgttctctcagtttacttactgtaagttgaaaataataataatgccaaccctacagagctgtttgaaagtttaagagagataacaatataaatataaatacaatataaattatagcatagcacagtgcctggcatagagtacacgcttaataatacttttttttttttttttttttgagacggagtttcgctctgtcgcccaggctggagtgcagtggcacggtctcgactcactgcaagctccgcctcccgggttcacgccattctcctgcctcagcctccagtgtagctgggactacaggcgcgcgccaccatgcccggctaatttttgtatttttagtagagacggggtttcaccgtgttagccaggatggtctcgatctcctgacctcgtgatccgcccgtcttggcctcccaaagtgctgggattacaggcgtgagccaccgcgcccggccaataatacttttaaaagacagtatttattgaatgtttaaaaatatgacaggcagtgttctaaatatataacacatattaactcacaacttccctataaggtaggcgttattgtcctcatttagcagataaagaaactgaggcatgtgaatttgcccatatcacacagttagaaagtagtagagctggacacaaacctggtcaatctggctccagaaactgctcttaactactagagcagactgaccctcactaaggattaagaagtattagttagacatggttgctattgttcttttcacttttatcacctacataggattttataataaaaccatatataaattctcagttactacaaaaaatagaaatatatctgaaaaatatgttcttttgaatcagtaaggtggtaatttcagcaaattcatatgggtagataatcctatctatacatattttgctagatctttattaagattcatcccatctagactaagcttctaggaaaagcaaaacaaaatcttaacagatacaatgttttaggacaagaacacagccaagatgaaggccctccatgccctttttgactgttcaatatctgaaaagaaaaaaatttgaaatatctagaaaggttattggattttttttttttttgagacggtgtcttgctgtgtcacccaggct

SEQ ID NO: 239 - DNA, 300 bp, Homo sapiens
  misc_feature (1)..(300): DMR2:20094301
ccatacacaggggtgctgggccctgtaggagacagtggcaaggccctgctctcaggctcctgggtcccagtggggaggcagcctcatgcatggatccttagcccgtgaggagcaggatggctgcaataaggaggaggaagcctgaacagctgattcctccttgggcggtgggtggggttggctctgtgggatctgagaaggcttcttgggagaggttgggtttaagttaggaccttgagacaggcaggaggaagccattctagagaaaggtggcagtttctgggaggggtttataattga

SEQ ID NO: 240 - DNA, 1000 bp, Homo sapiens
  misc_feature (1)..(1000): DMR2:20459401
agaggaaggaacaggcagcaatctttgctgttctgcagcctctgctggtgacacccaggcaaacagggtctggagtggacctccagaaaactccagcagacctacagcagaggggcctgactgttagaaggaaaactaacaaacagaaaggaatagcatcaacatcaacaaaaaggacgtccacacagaaacctcatccgaaggtcaccaacatcaatgaccaaaggtagataaatccaagaagatgaggaaaagccagcacaaaaaggctaaaaattccaaaaaccagaacacctcttctcttccaaaggatcacaactcctcaccagcaagggaacaaaactggatggagaatgagtttgatgaattgacagaagtaggctccagaaggtgggtaataacaaactcctctgagctaaaggatcatgtactaacccaatgcaaggaagctaagaactttgaaaaaaggttagaggaattgctaactagaataaccagtttagagaagaatataaatgacctggtggagctgaaaagcacagcaagagaacttcgtgaagcacacaaaagtttcaatagctgaattgatcaagtggaagaaaggatatcagagactgaagatgaacttaatgaaataaagtgtgaagacaagattacagaaaaaagaatgaaaaggaatgaaccaagcctccaagaaatagagggctatgtggaaagaccaaacctatgcttgattgttgtatctgaaagtgacagggagaatggagccaagttggaaaacactctttaggatattatccaggagaacttccccaacctagcaaggcaggccaacattcaaattcaggaaatgcagagaacaccacaaaggtactcctcgagaagagcaaccccaagacacataattgtcagattcaccaaggttgaaatggaggaaaaaatgttaagggcagccagaaagaaaggccaggttacccacaaagggaagcccatcagacta

SEQ ID NO: 241 - DNA, 1400 bp, Homo sapiens
  misc_feature (1)..(1400): DMR2:22588801
ttcagggggagttggaaatggaagtaattattgaatgataaataagacatggattagtggaaagggggagtcaaacattgcatgaaagcatttctattaaactaatgactcaaatgaaaatataggcaaagacacatagccaagtcttaaccacggattccttcaggaaagtgaaatgtagaagtgggagtagcaatataatgatgaagaaacttcattttttaatttttttttttttgagacagagtttcactgttgttgaccaggctggagtacaatggcgggatcttggctcgctgtaacttctgcatcccgggttcaagcaattctcctgccatagcctcctgagtagctgggattacaggctagcctcctgagtagctgggattacaggcatgcaccaccatacccagctaattttgcatttttagtagagacggggtttctccatgttggtcaggctggtctcaaactcccaacctcaggtgatctgcccacctcggcctcccaaagtgctgcgattacaggcatgagccaccgtgctcagcccattttttaatttatttatgtagtttattcatccattgacttaatgatattaatagaaaatttgtgcattcaaggaggtacaagctagacaatgtctctgccctcttggagttcacattaaattcagggagacagataaaatacagaaaagccaaaagtaatacacattaaaaatgtggcattaaagagagaaaaaagagactggctagaaatagagcggaattgcattttacataggacaatcacagaaggcattctggatgaagtgacatttaaggtgaatctaaagggtaagaaagatccatcgtgtgaacagtataaggagtaaggctaaatgcagattacataagatttacaaataattttttaaaacttcaaataagaaaaagtaagatatattttaaatactgaaataattaatttctagctattaggagaagagagagcaagatgaatattggcgttagctgaggttgaagctgaaggtatgggtcagatcattatcttgtagggtacagaaaagcattttgttttattttaggtacagtagtcaaccactacaggatttcagacagatatagagtcatattatttattttttaagaagctaaacacagatttctataaaaaagcaatggaagtggggagcaataattgaggttagaaaacagtagactgggcatcaggttggtcccccccgggacggagctcccagaggatggagcagacagccacctttgctgttatgcagcctccactggtgacacctccatatgtggcagggaccctggggaatagggtctggagtggacccccagcaaactgcagcagtcttatggaagaaagccctg

SEQ ID NO: 242 - DNA, 3900 bp, Homo sapiens
  misc_feature (1)..(3900): DMR2:24390401
tacttagattgagtaatttttattgatttctcatcaagttttctgacttttttctcctgtcaccttcaatctgcttctaagcctgtccagtaaagctttaaatttcagatattaaacttttcaattgtataatttacatttggttactatagtttttatttctctgcttgtattttctttcattaattatgagtaatattttcctttatatatgtactctgtttggcacaattttaatagctgctttaaagtctttgttataactcaacatttgatgcatgtcagcatcagactcttgagtactggggtcacatttcatttttatgtctagtaatttcagattgtaccttggatattgtaaaagataccttgtagaagttttggattctgtcacatttctccaaaagggtttgtttgtttgttgttttaagtaggcaatacatatatccctttcttcttttgtttaaatgtcaattttagttttgccagttgggtgcagtggctcatgcctgtaatcccagcactttggtaggtggaggcaggaaaatcacttgggcccaggagtttgagaccagcctgggcaatgtagacagacatcatctctacaaaaaataagaaattcgctggatatggtggcatgcacctgtgatcccagctacttgggaggctgagggaggaggaccccttgagcctaggaggtcaaagttgcagtgagccatgatcatgccattgccctccagcctgggtgagaccctgtctctaaaaaataataataataatttttgtcaaagtgagatatacacataattttaaaaagtctaacacaatgacaaagcttgtaatgacaatagtagaacactataccaccatttccaccctgaaacctgcccctcaggaagaaaaacttttaattctttcagctgtttcttctatttacatctacttttctaaaaatatttctaaaaatattcatatatatagatatacacacataattttcatatgtacatatatatgtatattcatatatacacacacacttttttttttgagacaggatcactctctgttgcacaggctggagggcagtggcgtgatcatggttcactgcggccttgaactcctgggttcaagtgatcttcccacctcaacctcctgagtagctgggactgcaattgtgcaccactatgcctagctaatttttaatttttcttttgtaaagacagggtctcactatgttgaacaggctggtttctaactcctgggctcaggtgatcctcctgcctcggccttccaaagtgttgggattacaggcatgaaccaccatgcttgacctctcatatttttatttatatgttatctattgacgttctattatggagtcacaaaatttagcacacttaaaacctccttccctctcttcatactcccaatatatttgtagtacatttttgtttatatcaatatttatactgtttatattatctcactatataacacttgctcaatgttaagccaagtaatataatactgataagataaatttttattcatattagaattaataattgccctgtgggttgttttagcagttttctatgtaataattactagttcaaccttaaacttagcaatataatggtgatacccctctgaatgttgataattcctattgccttcagctatgcctggtatccctatgtttagatgctgtaagtttcttaacacacagtcagtcttctgctggagtgggaaagaaggtccatctgtctttgaaaaaggagttctggccggggccggtggttcgtgcctgtaatcccagcactttgggaggctgcggcaggtggatcacttgaggtcaggagttcgagaccagcctggccaacatggcaaaaccctgtccctgccaaaaatataaaaaattagccaggtgttgtggtgcacacctgtagtcccagctacacaggaggctgaggcaggagaatcgcttgaacctgggaggcagaggttgcagtgagctgagatcacaccactgtactctagcctgggtaggcaacaaagtaagactctgtctcaaaaaaaaaaaaaaaaaaaaaaaagaaaagaaaagaaaaatggagttctaggggtctgagtgagccatgtaaggtttttcaatggatccttctcttttcatctgtaacatgaatttctgcctttagagatacctggtgcctccaaattctgagcatgtccaagatcctctggcaatatcagttttcttctcattagcatactcttggttttaagctttcataatttgagtaacactagtaatttctatcttccagaaatctgctgacattgcttgtctgcacctgtgttcgttctgtgttttgtccctccacatccattagccatatttttctgccccgctccgtatcctgagaagataacacctatggacttgcactcctttgatttttggcatccagttcgattcagctaactggagtgactggaagaagaatgcagagtgggaggggatagaataatagatgtaagcgcatttattgccattgctgtgccccctttttatgtgcctcttccctggaggctgctgtgttggtagtggcagaaaacttgtacctaactccatggctcccctagggtgactttctcctatgcctggagttcttaccaggttacagtaattattctttccacttgccccttgaggcctagggatggtgacagcttcccagtgttgctagtgcctgggtactttagcatctctttttggttctcttaatcctgcccacacctctgtaaatagtttcctcattaaattttcttcatttctcctttgagcatgccaatctgtttcctgccagaactctaactgctatgttgctgttcacgttccccctttactatgtttattcatttcaaaaattttattctcattttagcagagtttctggaggcaacagaaataagtgtcatatgctcaatctgatgcgtttaattattgaatatccttttctccactatccctatgcataagtatttgactctactttctttttctttcttttttttctttttttttttttttttttttgagacagaatctggttctgtgctcaggctggagtgcaggggcacgatctcagctcactgcaacctctgcctcctgggatcaagccatcatcccacttcagcctcccaaatagctgagagggaccataggtgcatgccaccactcctggctaatttttatactttttttttttttttttttggtagagacaggttttcaccattgttgcccaggctgctcttgaactcctgagctcaggcaatccgcccgccttggcctcccaaagtgctgggattacaggcgtgttttatctgagttccttcctcaggaaagaaccttcaggcctctcaaaaaaagtgtcaaagaactaaaactcaccagatcaccacatcctaacagtgagatgctggaccgctcattcatcataattgcttccgtgtccctccctagttctggatttcttgcacattgttacatttcttccctcctatataaacccctagttttagtcggtcagggagatggatttgagattgagctgctgtgtcctcggctgcagcaccaggttaaagccttcttccttggcagtactcggcatcttagtgattggctttctgtgtcacgagcagcaggacctagaccgcacccctggtgtttcggcaacataagcagtatctcaccaatgttctgtgactttcttcctttgattgccttgaagtttctgatcttgctcttctttcttcagaggccagttgaaggccacacccctgtctgctgttggctctcactgatttgtctaaaggctgtgggtacttggg

SEQ ID NO: 243 - DNA, 1200 bp, Homo sapiens
  misc_feature (1)..(1200): DMR2:25243301
aaaaaaaaaaaaaaatgtagctttatatcgcttgacatgaaaaagcaatcataatataataaatgcaaggcaagttacaaaaccgtgtgcattcactacccacttaatttatctatctatggatgtatggttatataaacacaaacgcacagaaaaaaatctgaaaaggacatatgccaaaatattaataaaaggataatgggtgatttaaataagtcttctttagactatcttgtgtataatcaaaacacaacagaactgtgtatgtttctgtcttgctgaatctgtcctttgaggctctgtgaaatctctgtgaatctgactaatgatcactcggcctctgtggctgaatcttccttactaaggaagcgcccagcaggcaggctgctttaccacctgttttacttttttatttttggtcaaatctaagtccacggactgcatacgtttccacttcacacacaagcttcccctttgggataatattttaacagctgtgaagctaaccatcatttcgttttgccagagttgcccacacacctggctcccccatcctgggacaaggcggccagcacctcttgggcctgcacccctcacctgtagcgattccatcaaagagagacagcacccggatgggcttcctcttctcagctgggacaggtgggtaaacctttggagggtcctaagcagtgagcacaacaggtcagatgcaggcccagcggtgtcccaagctcccacccagcgctggccctccagccaggctcctagacccacacaccctgcgcacagctcaggccccacaaccaaggctcagccaagggagctcgagaccgcgccccaggcccagcactcacaaattcctggtcgtggttattagcgaagaacatctggagccgggagggccagtcctctcgccgccgcagcagcccgtaggtacccttgtgcccgcacatgtagcagttccaggggtcttccttaatggctgcctgggcagcccccggccccaccaagaggtccacacactccacgcaaaagcacctggaaggagacccagtgagcagaggagactctcagccctggtccggggaggccaaggtgtgctacctggaatggaaagaccgggtctggagcatggctagggggtggagggtctgtggggaagggagaggaggggaggcggtgggcggcgggagcctgggg

SEQ ID NO: 244 - DNA, 1700 bp, Homo sapiens
  misc_feature (1)..(1700): DMR2:27241201
tccgtccagcagttcaccaaggatcaggtgcctggggcagggaggatgggaccacccagagctttgaggatttggaaagctggggctaggacctttctagctaacttgggctctttcttagatgtctcacctgttcaatgtggcacacacactgcgtatgatggtgcagaaggagcggagcctcgacatcctgaaggtcaggatcagggccgggggtagggtccaggccatcgcctgcccttgggccgcatcagcgcagggccgcgcagtggtcagagtgggtcttcctccccctgccatcccgtccccttatgctagtccatccctctgctgctgtagatcttcccccacgttttccctccccaaagcaggatttagctggctggggaggccctgagcatgagaccatcgccccactagtggggtcttctggtctgggctgctgcaatcatgggagagagctagggtgtgtcctcctttcccagctcgttcagacacttaatgatgggtggttttctggaggcagagcctttagctcagagtgacaccagtggtggaaacgtcaaggctctgacaggtcacaggggaggtttgggtgcagaagggtcctcacagcacccctcaagtgtcagttggggtggtggtgcctagctggggtttccccagggtggacacgcatacgtacaccttccatcttgctctttccctaggggaaggtcatggcctccatgttctatgaagtgagcacacggaccagcagctcctttgcagcagccatggcccggctgggaggtgctgtgctcagcttctcggaagccacatcgtccgtccagaagggcgaatccctggctgactccgtgcagaccatgagctgctatgccgacgtcgtcgtgctccggcacccccagcctggagcagtggaggtgaggccagcctgggtactgagatggggttaagaaggctggacccaggggcatgagaacccttctgcccacgttttctgtgttttgggccagatgagtgaggggaccccagaagagggggactggcagttggggggcctctgagctgcaaaagacaggattttccccttttttccagctggccgccaagcactgccggaggccagtgatcaatgctggggatggggtcggagagcaccccacccaggccctgctggacatcttcaccatccgtgaggagctgggaactgtcaatggcatgacggtgagggtggtggcagggtttggatccctgccaggggacgatctagagagggaggcaggaagtggttaccccggtacaggacagctgcatcaaggaggccttcattctgctccagaggcttttaaaagcttggaaatgatgtcggggggcactcagtctgggatccctgtggtgactggattcctctcctagatcacgatggtgggtgacctgaagcacggacgcacagtacattccctggcctgcctgctcacccagtatcgtgtcagcctgcgctacgtggcacctcccagcctgcgcatgccacccactgtgcgggccttcgtggcctcccgcggcaccaagcaggtgagaccctcacagccctgcctggaagccatggagatgtgggttgggcagtcagagcccagcgctgcatccaccatggctctcctcaccctccaggaggaattcgagagcattgaggaggcgct

SEQ ID NO: 245 - DNA, 1600 bp, Homo sapiens
  misc_feature (1)..(1600): DMR2:28260801
atttatttcaatctttcatttcccatagcaatgttttgtagttttcaatatacaagtcttgcacatcttttgttaaattaatttctaagtatatttttaagctatcgtgaatgaagttttcaaaatttttcattttctttcttttttttttttttttttgagatgacgtctcactctattacccaggctggagtgcagtggcacaatcttggctcacttcaacctccacctcctagattcaagcgattctcctgcctcagcctcccaaatacctggtattacaggcacacaccaccatacccagccaatttttgtatttttagtagagacagggtttcaccataatggtcagactggtctcaaactcctgacctcaagtgatccacccacctcagtctcttaaagtgctgggattacgggcatgagccactgcacccagactaaaaattttcattttcaaattgctaattgttaatatatagaaatataattgattttgtgtattgacctttagtaaattacttagaattttttttttttttttgaggcggagtcttgctctgtcgcccaggctggagtgcagtggcacgaggatcttggcttactgcaagctccacctcccgggttcatggcattctcctgcctcagcctcccgagtagctgggactacaggcgcccgccaccacacccggttaattttttttttgtatttttagtagagacagtgtttcatttcaccctgttagccaggatggtgtcgatctcctgatcttatgatctgcccaccttggcctcccaaagtgctgggattacaggcgtgagccaccgcgcccggccaattacttagaatttttatgtatatgatcatgtcatctgcagatgacagttttactttttcctttccagtgtgagttttgtccttccttccttcttcccttcctttctctcccctcccctctcctcctttcccctcccctcccctccccttcccttccctcccttccagtggcctccagacctgacctatgcaatactttattcatttatatattgatttatcccttcggtcatcatgtatttgaggacctgctttggttccggtactgtcaagactcagggataccagaatgaatgataccttgtctgaaatagctcacaatctagtggggaaaatgaacatatgaaaataacaaagaaatattacttaaagtgcatttctaggcatacaccagatgttacgagaatacagtgaagcgtcacccaacacagtaagggaggagggccataagatcattccaagctgagagcctggtgtaaacaaaggcacagagggaagaaatcttagagtggaggtgaggaactgaaagtggtttccagtctcctaaatgtttagaggatcccaagaagtagtaagagattaagctaaagaggcagtcagagggcagaacacagatataacgttgcctaggaggctgacaaatgtgactttatcctaaggatagcaaggagttattgaagagtgctcagtagaaaagtggcatatatttgcttttataagaatacacttttcaggtattatgtaaaagatgatttgggatgg

SEQ ID NO: 246 - DNA, 200 bp, Homo sapiens
  misc_feature (1)..(200): DMR2:28738601
tttccccactatatatatgtgagtctatttctgaactctatactctcttctattgatttgtctgttctcgtactaatatcacactgtcttaattactgtaatttcatattaaattttaaaatctgatagtataatccaccaactttgttctttctcttcaagatggtcttgtctattttagatcttttgcggttctatat

SEQ ID NO: 247 - DNA, 1900 bp, Homo sapiens
  misc_feature (1)..(1900): DMR2:30297601
gaaagagcagagctcacagcagaacagtcctgacagcaagtaggagaacttgagccatgtcaagagggtctgtttcatctgttggaaaggttaggccaaatgcaacccctacagtgggtggccaggcagtctgggtaccagacccagggcaaggctgctgctacccatctcccctgctgcttggtgcagcgttccagggcccaagcattgacctccatacaggccacgcagcccaggccccgggtgactgggaagctgcagtgggaggtggcagcttcctgcagtgagagggtcaagatgggaagttacaaactcacaggtgggggaaactcagtattcagaagaattacctgctggaatgggagctctctgagatcaaaacttttctttgcgcctgtacctagagaaatgcccatagtaagggcccataaatagctcttaaattaataaatgaatgaacaattcattccttcttcaaagtgtccagtggatccactaatgggtagttaggagacttagataagttaatgatacaaaagtattttgtcagctttttgtgtttttaacttacataaaatagaagtcactttggatgtagagtcctctctgagttttaatacaagcacagattcatgtaaccaccactactaacaagataaagaacaattcctatatcacaaagcatttcctcatgctatgcctttgcattcaggcccttccttcatcccaagctctgtgcaaccactgatctattttctgttcctgtaattttgccattttcagaatgccatataaatggaattacacagtatgtaacctttcgaaactggcttctttcacttagagtttaaagaaaggggaaggaggatggaagcagtgagctctgatttgtgacaggcctttcatttagcatcatgcatttgagagtcatttaagtcgttgtatgaatagttttttcctctttactgcacagtagtttccattgtatgaacgtcccacagttcgtttatccgctcatccaatgagggacatttgggttgttttcacatgttggagcttatgagtagtgccgctatgcatattggtgtagtttttggtaggagaatgttttcatttctccggtagaaatacctagaagtgggattgctgtgttgtatggtaaatagattctactttataagaaataatcaaactattttccagtgtggctgtaccattttgtattcccaccaccaatgtatgagagttccagtttcttcacatccttgtgagcatttggtattgtcagtatttttagccaacctaataggcatgagatggtatctcattctggttttaatttgcatttcctttttttttttttttttttgagacggagtttcgctcttgttgcccaggctggagtgcaatggcacgatctcggctcactgcaacctctgcctcccgggttcaagtgattctcctgcctcagccccctgagtagctgggattacaggcacgcaccactacgcctggctaattttgtatttttagtagagacgaggtttctttatgttagtcaggctggtctcgaactcccaacctcaggtgatccgcccacctcggcctcccaaagtgctgggattacaggcgtgagccaccacgcccggccaattcgcatttccttaatcactaatgagcatcttttcatgtattcgtttgccatttctatatcttaattggtgaagcatcttttcaaatcttgcctagtttttaaaaattggttgtttctgatcttacttttacgagttctttttatagtctagatgtctgttgtctgatatgtgatctgcaagtatttccccccagtttgcagcttttcttctcattctctttaaaatgtctttcacaagagtaaagg

SEQ ID NO: 248 - DNA, 1200 bp, Homo sapiens
  misc_feature (1)..(1200): DMR2:30366501
ttactgacttccttagcctgtcgggggattagagcaggatcctctgaaacagggaacagcatccttcacaacaggatgtagcagggaccacacactgctctgagtcaggccgccagtgctgagcaagggctggtggcctctgagccccacttagtcactggcagacaacctaaccctgccaggagcaggaggagacatagctgagggcccaaaggggtcatggaggaagaccctgggaacaggccctctacagcctcagggtcccagttcctgcacctggggcccacccagcacacgaatcttgagtgggaaatagagggtgtctcaaggattctgctcatgtaagaaggcatgcttgggctagtgtgcatatgtgcatgtgtgtgtgtgtgtgtgtgacagagagagacagagagagagtgtggcgagagtaagtaggtgcagaagaaactagaaccatcaacgaacatatgagaaaacaccaggaaccttgtgcctggaccacagtaggggttggtagggtccctgctgcaagcagaagtgcaaacctccatctttaatatgtgtgggaatcagtatgcatgtaggtatatgggttggggagtagagtgaggataaaactgtttatagtgacccaagaaaacttttagccctgatgacagattgtagctaaggaatccaccaaatgagaatagagaaactgacattttggctaagttacgcaaaagtaatggtatactcactcacgttcagggactattcatcgtttaggtctaatttctatatagctccatgattgtgcttgtcattgaaccctatgtgggattaactttactgtagattttgttgctgttgttgttgttttgaggtagggtgtccctctgtcacctcggcttcagtggcacaatcacggctcactgcagcctccacctcctgggctcaagcgatcctcctgcctcagccttccaaagtgctgagattacaggcatgagtcactgagcctggcccattgtaggttttatttgttgctttaagctctgctcatacatcagccttcagtgagtgtcgttcctaatatagggctgttgtgcttataacttaaaacagccctgagggaatgtggcagatcctcagaaccagttccaattactgtccagaaaacagccttcttgagaaagaagtggctgctcagagatgtgg

SEQ ID NO: 249 - DNA, 1200 bp, Homo sapiens
  misc_feature (1)..(1200): DMR2:30885801
gagggaagttggaaggcccccaactctctgtcgccaaagcttggctctgctcactccaggctgaggcctccatgcctgtttcaggctggacacccagtcctttctagtagccagagcttcccctttgagccccagaattcctctgctgggccttggactttctgaacacactcccttgggcatccaagaagaagtggctccccattcaggcaatgcctactctgcacaatgataagcacactcctgacattgctaaatggttgtctacttctaataaaccccatgctggtgggtgcagcatgagaggtaatattcgctcttcctggctgcctcaaaccatagtcaggattataaagacgcatgaatcagagatggcagcctataacaaaagctttacctccagctgttttgctcattttctaaacaacagaacactccctacttccccaccccctctgcttgttcctttgtgtttgagattcatcatcaccaaatgctttggtctaaacccccaggcttacacaacaattgagagagagagaggccagaaatgcctgaattccaggaagctgcgctgtgtcctgtggccactcgtttttgcctcccctcgctgcccacctggagcagctgctggtaacttcccacctgaaaagcgaatctcaggttcctctctgcctggctggacacagatcatttttcctgctggctctgaccctgcctctcttccagggctaaacctgctccaggagcactggctctatagggtgagacttagcctgaggtcccccttgtaccacataactgggctaccaccaggtacgaaagatttgcgtcctatcttacttgtacctccatttaagtaacagggagcctgtcttggtccctgcctgatgccatggatgttctaaagtcctaagttactcttttatttttctttttagagtgaggtgaaattcacaaaacaaaaaattaacctaaccattttaaggtgaggaatttaatggcctttagtacattcataatcttgtacaaccaacaccttgatcttgtcccaaaacattttcatcacccccagagaaaaccctgtaccattaagcatttactttccatttccccaagcccctggcaactgccagtttgccttctgtcttcatggattgacttttcagatatttcatatgaatggaatcatacaatatg

SEQ ID NO: 250 - DNA, 4600 bp, Homo sapiens
  misc_feature (1)..(4600): DMR2:35752601
gaaagtcttattcattctttctaattttttctacacatttaccatccccactttcccactatccccgccacacccttcccatcctctggtgaccatccttctactctctatgaccatgagttcaattgctctgatttttagattccacaaataagtgagaacatgcaatgtttgtctttctgtgcctagattcattcacttaacataagaatctctaattccatctgtgttgttgcaaatgactggatctcatactcttttatggctgaatactactctccattgtgtatgtgctaccacattttctttatccatttatctgttgatggacatttaggttgcttacaaatcttagccattgtgaacagtgctgcaacaaacacagaagtgcagataactctttgacatactgatttccttttggggggtatatacccagcaacaggattgctgaattgtatggtagctctgtttttagttttttgagaaacgtcctaactgttctccatactgattgtattaatttgcattcctggcagggtgcagtggctcacgcctgtaatcccaacactttggaaggccaagggaggcaaatcacttgagcccaggagttcaagatcagtctgagcaacatggtgagaccctacccctacaaaaaataaaaaataaagtgtagtttacgttcctaccaacagtatacaagggttgacttttcttcacattctcgtcagcatttgctgttgccagtcttttggatatcagccattttaactggggtgagatgatatctcattgtagttttgatttgcatgtctctgatgatcagaaatgttgggcaccttttcctatgcctgtttgccatttgtatgtattcttttatgaaatgtctgttcaaatctctcacccatcttttgatcagatcattagattttttttgccataaaattgtttgaactctttatgtattttggttattaattccttgtcagaagggtagtttttgaatattttctcccattctgtgggctgtctcttccctttgttggttgtatcctttattgtgcagaaactttttaacttatgttatctcatttgtgtccatttttgttttggttgcctgcacttatgaggtattgctcaagaaatttttgcccagaccaatgacctggttgtttttcccagtgttttcttgtgatggtttcatggtttgacatcttaaatttaaatccactttgactttatttttgtatatggagagagataggagtctagtttcattcttttgcacatggatatccagttttcctagcaccatttattgaagagactgtcttttccccagtgtagattcttggcacctttgtcaaaagtaagtttactataggtgggtggatttgtttctgggttctctatctgttccattggtctatgtgtctgttttaatgccagtaccagccgggcacggtggctcacgcctgtaatcccagcattttgggaggctgaggtgggcagatcatctgaggtcaggagtttgagaccagcctggacaacatggtgaaaccccgtctctactaaaaacacagaaattagccgggcgtggtgatgcgtgcctgtagtcttagctactagggaggctgagacaggatgattgcttgaactcagaggttgcaatgagccgagattgcaccactgcactctagcctgggcaacagagtgagaccctgtctcaaataataataataatgccagtaccattctgttttagttactgtagctgggtagtataatttgaaatcaggtaatgtgattcctccagttttgttctttctgcttaggatagctttgggtgttctgagtcttttgcagttccacataaattctagggctgtttttttgtttgtttgtttgttttctatttctgtgaaaaatgttattgatactttatagggactgcattgaatatgtagattgctttgggtagtatggatattttaacactactgattcttccaatccatgaacatgaagtatcttttcattttttattgtcttcaatttcttttattagtgtgctatagttttaattatagaaatctttcacttctttggttaattcctaggaatttaattttatgtgtggcaattgtaaatgagactacttttttatttctttttcacattgttcactgttggcatatagaaacgctactgatttttatatgttggttttgtatcctgcaactttactaaatctgtttatcagttctaatagcgttcttgtggagcctttggatttttccaaatataagatcatatcatcagtaaacaagaataatttgacttattttccaatttgaatgttctttatatctttcttctatctgattgctctagataggacttccaatactatgttggataacagtggtaacagtgggcatccttgtcatgttccagatcttagaagaaatagtttcaatttttttccttattcaatatgctattagccgtgggtctgtcatacatggcttttattacattcggatatgttccttctatcccgttttttgaggatttttatcatgaagtgacattgaattttatcaaattctttttagcatcaatttaaataatcatatggtttttattctttattctgaagatatgatgtagcaccttgatttgtgtgtgttgaaccatccttgcatcccagggataaataccactttgtcctgatgaatgatctttctaatatattgctaaactcaatttactaatatttcgttattttgttgaggattttggcataaatattcatcagagatattggcctgtagttttctttcttttttttttttttttttggatgtatctctgtcttgttttgatatcagggtaatactggcctcatagaatgagtctggaagtatcttctcttctattttttggaatagtttgatttggattggtattagttctttaaatgcttggtagaattcagcagtgaagccatcagctacctggattttctttactggaagactttttattagggcttcaatctcattactcattatttatctgttcaggctttagaattcttcctggatcaatctttgtaggttgtgtgtgtctaagaatttatcaaggaatttgtccagttcttctagattttccaatatattggcatacagctactcatagtagccactaatgattctttgaatttctgcagtatcagttgtaatgtctcctgtttcattcgtgattatcttttttttatcttctctctttttttcttggttactctgtctaaacatttgtcaattttgtttaattttccaaaaatcaacttttagtttcattgatctattgtgttgtttatttcaatttcctttatttctgctctgatctttattattttttttcttctactaattttgggtttagtttgctcttgcttttctagatgcatcattagatggtttatttgaagattttcctctgttcagatgcatgcacttttagctattaactttcctcttagtagctttagctgtaacccataggttttggtatgttgtgtttccattatcatttctttcaaaacatttttccatttccttcttaatttcttcattgactcactagtctttcaggaacatattgtttaattttcatgtatttatgtagtttttaaaattccttaattccttaattaaattattttcagttttattccattgttttcagagaagatgctcaatattatttcaatatttttgaatgttttaaggcttgctttgtgaccttacatatggtatatctttgagaatgatccatgtgctaaggaagaaaatgggtattctgcagttcttggatgaaatgttctgtaaatgtctattagatccctttggtctatagtgcagatcgagtctgatgtttctttgttgattttctgcctggaagatctatccaatgctgaaagttgggagctgaagtctccagcttttattgtattgttattatgcttctctttagctctaataattttctattatatatctgtgtgctttagtgtcgggtacatatatatttaaaatcgttatatcctcttgctgaattcactggtttatcatcatgtagtgaccatctttgtcttttcttacagtttttgtctcaaaaactaggcatttaattttatgtgtggcaatcttatgcaagtataatgatgcctgctcttgttttccattggcatggaatatcttttaccatccctttattttcaatctatatgtgtctttataggtgaagtatgtttcttctaggcaacagaccaatcggtcttgttttttttaatccattaagccagtctatgtcttttgattggagaatttatgccatttgcattcaatgttattattgataagtaagaacttactcctgccattttgttatttgttttctggttgttttgtggtcttctcttccttcttccattcctgtcctctagtgaagatgattttctctggtggcatgatttagtttctggatttttattttttgtttatccattgtatgttttttggtttgaggttac

SEQ ID NO: 251 - DNA, 300 bp, Homo sapiens
  misc_feature (1)..(300): DMR2:36991401
aggagaatcgcttgtaccggggaggtggaggttgcagtgagccaagattgtgtcattgcactccagcctgggcaacaaaagcgaaactctgtctcaaaaaaaaaaaaaaaaaaacttggacaatttcctgaagacagtgttctaagaattttaaggaatttcttgccattacatttattcaggaatagatacaacttgaacagaaatatagtacgtaattagaaataactagaaatatgaacatttattctaaagaacaatatttctgaacatataaaatacgagttccaaacattttgt

SEQ ID NO: 252 - DNA, 1300 bp, Homo sapiens
  misc_feature (1)..(1300): DMR2:37870401
tttattattctgttcttatccagtaaccaggttattggtggggaaggtactaagggccaaatcacagcttcacatgaaagtaacttttttttctttcttttttttttttgagatggagtctcactctgtcacccaggctggagtgcagtggcgcaatctcggctcactgcaacctccagcttctgggttcaagagattctgctgcctcagcctcccgagtagctggaattacaggtatctgccaccacacccagctaattttttgtatttttagtagagacggagtttcactatgttggctagtctggtctcaaaactccttacttcaggtgatgcacccaccttggcctcccagaatgctgggagtacaggcgtgagccaccgtgcctggcccaaaagtaacatttttaaggagaaaatgcttgatgcatttttttaagtcttgccttttattttctgattcctgattctttcccctttttttaaacagtaagtaacatttttaaacagtgtagtttgttcccactctgactccggagtctggtttttctctcgggcctgctgctgtgttggaggacttgacatgccttttgtgttctgtaatgtcttcatctgaacaacaggcctgtaaagactgatccccagtgattacgccaaatgttactggagagaagtggatgaatttatacaggaactaagtgattcaaatctgctttccttttctatgtatgcaattctctgtctgcattccaactgttggcacagaagccctggtccactgccccggtttatcaccttcacacagagatgggggtggcagacataggggctgcgcatcggggccatgttgacctgcttctttccaaactgctccaagtgttatgcatttacatgtacccacagaatgcatttgggatggttacttttcaacaccgtgaatctaatgcacagaatgacacccgtttttaagttaaaagtcaagatgtttttgcttggatttaacctaaccttcttttcttttaatccaagctccatgttgcttgatatgatacagacttcctgagtgacccaggcatcattagtaacagacactttggcctttttatccttttttttttttttttgtaaaaagggaaaagcaatttctgttcatctgcgaagcaccaaaatgaatatatttgcagattagatgatacaatttctgtaactgccatggatctcatgttcaaaggacagtgtgtgggtgggtgtgtgcacacgtgtgtgtgtgcatgtgtgggatggtggcgaggatagggag

SEQ ID NO: 253 - DNA, 1000 bp, Homo sapiens
  misc_feature (1)..(1000): DMR2:41503601
tatgttattcgtggtttcttttacatcaaactacatattctcaattctgtagccattttttctttcatctaacttattcattcttgccatcttagtcattccccttatatcacattccggtgtgacagtattttactagcagaactcttaatgtagactgaccatcagaaaaatgatttctgggtttggaaactacatgtctgtaaaggcagtctaggaccacgttggccacattagcagtcaccgaacactgctggctcattgcaaacttgaagttaactaaactattccacacaacctgttcagaagctgggtctcctcccttttatactttgagagctaagacaaaaatactaaaattgaaacgatgaagtttattaagaacattaaaagagcaaatataaaaaccagataataggactcaagaagtataacaagaaacaaagatccattcacacctaaataatgcctgagaaatcatggcagtgcaactcagtacataccaatgattatagtaatgaccctgcattgttaatatttcagaaaacaagaaaatgcaccatactttttagaaaagtgacccagcaaaattattttaagatttatgtgtggtaggctgatcattttcatgaaggcaaaacattctcttaaatggttttagaagcctctgaacctttaacatgacagattctcttcagtgtttattgaataaattaaaatagtgtacatcccacgttctgggaaaatagcataaacaaaacctcagaagtagtgatttccccacattacacttatgagcaatctttcattgaactccttctataatcttgtgatatgcagatgtcatttccaatgaacaacactaaaaaatagtgttatgcctattttacagatgaggaaacctagacattgagaatttatgctaattgccaagttcacacaacatgtaattggcagagctaggattcaagtccaggcctgtgttatctgaaagcttgag

SEQ ID NO: 254 - DNA, 2400 bp, Homo sapiens
  misc_feature (1)..(2400): DMR2:42306401
agatatcacaaatgctaaagtccttgaaataataaaagtaagagatatcatttattcagtgtctgatgaccttgtgctaaatccttttttttttttttttttttttttttgagatagagtctcgctctgtcacccaagctggagtgcaatggcatgatcttggctcacagcaagttccgcctcctgggttcacgccattctcctgcctcagcctccaaagtagctgggactacaggcgccctgccaccacgcctggctaatttttttttttttttgtatttttagtagagacagagtttcaccgtgttagccaggatggtctcaatctgacctcgtgatcctcccgcctcggcctcccaaagtgctaggattacaggtgtgagccaccgcacctggccgctaaattctttttatatgttactcttcacaagaatgtaacatagtgtttattaatatcgtgattgcacagacaggaaaccaagacccatagagttctgttacctgtgattgagctcaggttctgcatggttccaaagcttgtcctttcctctaatccaacagtactctttgagatatttacagcattaattagaaatattgttaggaaggtttatctttgacaattaaatcactgattgacattgttaaagcatactatgtatacaagggagttaaacactaaatgggcgattgtaaggctagcggggtttgaatcatgaagataaactgctttggttgaagaaaacactgtgtgtttacaaatagacatacacggccccaatttgtagggaaaattgttctgaaaaactcactgaaattactttccagcatttacatagctgtgaagtcatcattgacaagcttaaaatggaaagtcactcaattttagtgacttaaactaaaggtaagccaattggtttctcttggagttgtaagtagaaaacacttcatgagagtgatgtgataactaaattgaaagtgctggcagtccatttggggattgattagaatctaggggagatgtagttgtcagtgttcattctgtatgtaactcctgtctttggtttcagatctggttaggttctgttgatccttggggaactttctcatttgtttttatttttgccttggatctatgaatacctgaatgtattgtctaaaatggaaaaatcttaatgtagccattctattactatcactgaccctaggcctgaaaaaagtcacacctagggttaagaaatttttattttattttattttatttacttatttagagacagtttccctcttttgcccaggctggagtgcaatggcatgatcccagttcactgtaacctctgcctcccaggctcaagcgattctttagcctcaagcctcctgagtagctgggattacaggcgcccaccaccatacccagctaatttttgtatttctagtagagacagggtttcgccatgttggccaggctggtctggaacccctggcctcaagtgatcaccttgcctgggcctcccagagtactgggattacaggcgtgagccaccacgcccagccaaggacatttttctagtagaatgcaacacatgtccaagttgtgcatgatccaaaaaaagtgactagtaaaaaaaagtaatgatgtcttcatgtccagatctagatatcttctacttcatgtaactaaagagtaagcacagtgtgaataaagcatcaaataagtacaattatcattttaaaataatgtcttattaatgtaattttaagagaaaaaaattaaacatataaccttaagtggacatagtacttccttaacacgttaatgctgcagggcacagtggctcatgcctgtaatcccatcactttgggaggaggccaaggcaggtggattgcttgagcccaggagtttgaaaccagcctgggcaacatggcaaaaccctgtctttacaagaaaaattttaaaattagccaggcgtggtggtgtgtgcacctgtagtccctgctactcgggaggctgaggcaggaggattgctttatcccaggaggcagaggttgcaatgaactgagatcacgccattgcacaccagcctgggcactgtctcaaaacaaaaaacaaaagttaatgctcacatagaaaggattctttttaacaactttgttgagatataattcacataacccccccaaaaaagaaataaaaaataattcaaatactataaaattcactgatttaagatatataattcagtaagttcacagggttatgcagctatcctcacagtctaatttcagaacaatttttaacccagaaaggaatcctgtacccattaatagtcattccccatgaccccacccacctccccccttactctaggcaactgacccactttctgtttttataggttg

SEQ ID NO: 255 - DNA, 200 bp, Homo sapiens
  misc_feature (1)..(200): DMR2:43147901
ctcagcttccttgaagtgtaattgatggggcaaaggaatgagcaattcgcattatgatagatatcatccaatagtcctctaaaaatttgcaccaaattgtacaaaaaatcactttttggtctctgccaatctgagatatgaaaaaaacagtatctcattttaatttgcattctttatgatgagagatgttagcttttttt

SEQ ID NO: 256 - DNA, 400 bp, Homo sapiens
  misc_feature (1)..(400): DMR2:43969001
caccttgaatatatatagtttgtgtcaatttttaaaagtggggtaaagaaagtcaatgaatcttctaacaaaagtataaagtaatttctccaagatcacaagcataacttgagtaagaaaccaagtctcagtccgggcgcagaggctcacgcctgtaatcccagcactttgggaggccgaggcgggtggatcacaaggtcaggagatcgagaccattctggctaacacggtgaaaccccgtctctactaaaaatacaaaagattagccgggcgtggtggcgggcgcctgtagtcccagctacttgggaggctgaggcaggagaatggcgtgaacccaggaggcagagcttgcagtgagccgacatcaccactgcactccagcctgggcgacagagcgaga

SEQ ID NO: 257 - DNA, 400 bp, Homo sapiens
  misc_feature (1)..(400): DMR2:45411601
aaatgttcctgatctcaacagcagtttggttacacagaagtaggtatttgtcaaaattcagctaatataaacttaaaatttaattgttacgtaaatgtgacctcaaaagaaaaaaatcgtaaagaattatcaaattgtagttaattatatgaatgcttaagtatttagtgcaaagtgtaccaatgtctgtctgcaatcttctttggaatgcatcaaaaacataagatgggccaggtgcagtggctcacgcctgtaatcccagctctttgggaggccaaggtgggtggatcacttgagtccaggagtttgaaaccagcctggacaatacagcgaaactctatctctactaaaaatacaaaaaattagccagaccgtggtgctgcacacctgtaaccccagc

SEQ ID NO: 258 - DNA, 900 bp, Homo sapiens
  misc_feature (1)..(900): DMR2:46175501
ataacaaatatatgggaaggcctactaatgtccccattttatggatgagaaaatggcggcacagagattacataattggcccaaggccacaaagttagtaactggagaagcaggcatggaattcaggcagtctggctgtagagcatgaaggctaagccactaagctacctctcacagatcggcatttaaagaaaccagtctgattccatgagagttctcagatgtcctgattttataaataccaatataaaatagaccaagaagtcatgaagctgagaaggaatgccagtatatagcatgaacttgctatgtgttggaggaggccaaatctagtatggtcttaggctcctgaaaaagcctttggacaacaatgaaaacaggccttttgaaattgttaaaagaagaaagaaagagacccacggcctttatatggagggactccaccaggctgcccaccagaatcacttatggagctttaaaaactcaccgtctggagattccaattcatcaggtctaggatgactctcaggtgtctaaatggctgtgtttggtttttatgcacagccaggattgagaaccactgtgttaaaaaatggcaaaaagcagacctgttattttgcctccaattttccccaaagagaaatagctccaaagtacaaagataagggtgaaaaccactaagaggaaattgaaacccaagagaggcaaattacatttaataaagctcacctggggagccctattattccatgcccagaccagatcccaaagcagttcaacagaatccctagagtgggacgagcagctccgtgcgttgaagctcccccaggtgactccagtgtaggcccaggtgaattacattccaggttacggaagaatctgctctgcctactgcttggt

SEQ ID NO: 259 - DNA, 400 bp, Homo sapiens
  misc_feature (1)..(400): DMR2:47490801
agggtagggggactattaggcctagtcatatcaaacttttttttttttaaaaaagagtaaatgtcatgatagtatactgcccacctcaattgtaaaattttattttatttcgtttttagatggagtcttgcactgtcgcccgggctggagtgcaatggtgcgatctcggctcactgcaacctccgcctcctgggttcaagcaattctgctgcctcagcctcccaagtagctggcattgcaggcacccgccaccacgcctagctagtttttttgtgttttttgttttttttttttttttttttttttgagacggagtctcgctctgtcgcccaggctggagtgcagtggcgggatctcggctcactgcaagctccgcctcccgggttcacgccattctcct

SEQ ID NO: 260 - DNA, 100 bp, Homo sapiens
  misc_feature (1)..(100): DMR2:47866301
aaaaataacgtggaaagcaggtaattcaaatacactctatctcatcttttataacatacaacatctacaaaatgagggtgctgtgttacagggtatctaa

SEQ ID NO: 261 - DNA, 1900 bp, Homo sapiens
  misc_feature (1)..(1900): DMR2:48451101
tgagggttaagttagcatttggtgttgctcaaagcaggttcattgggttttctgggttaaagttccaactctgacactgattcactagggataggggacagtaatacagtcttttgtggttaattttcctacttgcttaggtaagaacatgaggtactttgatttccttagctaaaaattataaaaaaaggtattatgtgactttgtctaatgcattactcctgtgcctcaaggcctttacttagctcggtttatctggattattaaggcttcttatcagttgtcatcacagacagctttctgagggaggctatgtcatattcctatttgaatccctctcactcagcagatggcaggtctctaataagtggattccattgtgtgaatcatttagtccctaaatcttgcctttagttgagttatttaatagtaataacctgtgttaatcaggacactctttgagtgatacattttaccatcagcatttttgttaactgaggggagaaatatgatagatgaaggaatttgtttctgcctcatttctagtaggcatgtagtaaatattgcttagtgatatttttaaatggataaattaagtctaggatttggatttcttcttggccaagtttcagttaaatatactgtctagctcactcttttgctctttccctttcttgctccctctgctctctttagacagatgggattaggattcctcttacttctgtctctttttggataagcccctgatcagtaatatgtctgaggtggctccacttaggcaactaagccccagaaattgtccttttacgtagtcagttgttggatcctacaggagagaaatctgtctctgagtgtctcctcctcaggtgctgttagcacactctcagggttgagatggttctgaacaccccacccatacttccaggctctctgcacccaagccaagatgattaaaaaagaagctttatagtcaggatttattagtcaagttattgtttcaccaaaattgttgaaaaaatgatcattatatctccaaatgatatttaaacttattgctggggaaagtctttccttgtttgtcctagtagcctgcgctggtgtttcataccctcctgttgctggttgtgtttgattaactctgtgatggcagtaatggtaggaacagtggtaggcgtggtgacagctggttctattgattgagcactcactgcataccaggcattgtgctaagtccattatgtccattatcttatttagtgttcacaacaacccgatgaggtcagataacattatcatccccattacagaaactggagtttagcgaaaggctgggatagatgttttctgaaattaatgattggttaatggagttggagcattagtttattttaagaattataagcataattatatattataattatataatataaattatgagaaaaataaattatttttttttttactgtttattacagtagtcattgtaattatagtacaacaagtgacaatttgccagtttgctagacaggaatatttggatttcctgtgttacaggaggcttttagttttattactgggtttaccctttcagtgcgctgttaggtgtaatcaatgctcattgatttgaatttttaaaatttgaaagacatgatagtttggacatgggctaggcctaaatttgcctttgaactacaagtaaaaattaaggttttactaaacaaatgtaggaaaaaaattattttctccttaatgggagcatattgttctatccctctagcacttttctcaacatgcaggtaatgtcagtagagtgtagacactagcctatggcttttaagttgctgttcctttttttttttttttttgagacagagtcttactctgtcacccaggc

SEQ ID NO: 262 - DNA, 300 bp, Homo sapiens
  misc_feature (1)..(300): DMR2:48510601
cacttcctctttgctttagattcatttatcagattaattaggcacacaggattagattttaggcagcagaagagagcatgagaaatgggaagagagatgaagggtgcttctttcagggacggtgctgccgggagggctgtaggccatcgaggcataggatggaggcaatgtgttgtaggcctcacctatggctcagcaaaacctgagggaatttggaaagataatgaggccatatggcttttcttacaattttatacctggcatagaaagaaacccttaaatttttgcaaagaaattatg

SEQ ID NO: 263 - DNA, 3600 bp, Homo sapiens
  misc_feature (1)..(3600): DMR2:49184501
taaggttaatattgttatgtgtgaatttgatcctgccattgtgatgctagctggttattttgtccgttagttgatgcagtttcttcatagtgttgatggtctttacaatttggtatgcttttgcagtagctggtagtggttgttcctttccatgtttagtgcttccttcaggaactctcgtaggacaggcttggtggtgacaaaatctcttagcatttccttatctgtaaaggattttatttctccttcacttatgaagcttagtttggctggatatgaaattctgggttgaaaattcttttgtttaagaatgttcaatatgggcctccactctcttctgtcttgtagggtttctgctgagggatctgctgttagtctgatgggcttccctttgtgggtaacctgacctttctctctggctgcccttaacatttttttctccatttcacccttggtgaatctgacaattatatgtcttgaggttgctcttcttgaggagtatctttatggtgttctctgtatttcctgaatttgaatgttggcctgccttgctaggttgggatagttctcctggatgatatcctgcagagtgttttccaacttggttccattctccccatcactttcaggtacaccagtcaaaagtagatttggtcttttcacatagtcccatatttcttggaggctttgttcttttcactcttttttttcgaatcttgtcttctcactttatttcattgagttgatcttcaatgtctgatattctttcttccactatcaattcggctaatgatacttgtgtatgcttcacgaagttctcatgctgcgttttttagctctatcaggtcatttatgttcttctctgaactggtcattctagttagcgatttttctaaactttttcaaggttcttagcttccttgcattgggttagaacatgctccttaactcggaggaatttgttattacccaccttctgaagcttacttttgccaattcgtcgaactcattctccatccagttttgttcccttgctggcaaggagttgtgatcctttggaggagaagagccgttctggtttttggaattttcatcctttttgcgctggtttatccccatcttcatggatttatctacctttggtctttgaagtcggtgcccttcagatggggtctctgagtggatgtccttttttgttgatgttgatactattcctttttgtttgttagttttccttttaaaagtcaggaccctctgctgcaggtctgctggagtttgctggaagtccactccagaccctgtttgcctgggtatcaccagtggaggctgcagaataacaaagactgctgcttgttcctacctctggaagcttcgttccagagtggcacccaccagatgccagccagagctctcctgtatgaggtgtctgtcagcccctactgggaggtatctcctagtcaggatacacaagggtcagggatccacttgaggtggcagtctgtcccttattagagctccaatgctgtgcttgtagatccgctgctgtcttcagagctgccaggtagggacatttaagtctgctgaagctgtgcccacaaccgccccttcccccaggtgctctgtcccagggatgtgggagtttcatgtataagtccctgactggggctgctgcctttttttcagagatgccctgcccagagaggcagtctggccacaggggtgttgctgagttggggcgggatccgcccagttcgaacttcctggcagctttgtttacactgtgagggtgaaaccgtctactcaagccttagcaatggcggacgtgctttcctccaccaagcttgagcgtcccaggtccatcttagactgctgctgtgctggcagcaagaatttcaagccagtggatcttagcttgctgggctctctgggggtgggacatgtctggttactccttagtcagcattactacttcttccttagcttcctacccctactagtgagttggccccaaaatcaatccttgaatctcttcttttctgtctacactcacactctggatgatgtcaccgagttgcacatttactgatgactgtcaaatatataatttctaactgtgcccctcccctgaactccagatttgtttatcggactgcctacatgatgtctctcctgcatgtctaattgacatccaaaagttgacctgtccaaaatggagcttctcttcctcccacagcctctccttttaggaaatagcaatccatctttctggctgtttggaccaaaaaaccttggcatcttgcttgactttaatagtgtgcatccagtccgtcagcaaatcccacggactctacttcacagtaaatccagaacccagccatttctcatcactttgactgctaccaccaagttccaagctgctgtgatttctcacttagttttgtaatagctccctaacttgtctcctggcatttgttttgcctcttcagtccattggcagcataaatgtcagagtggtattttgaaaatacaaatcaggccaaattctcttccaatgtaatcctttctcactcatagtaaaaaatgaacatttcttataatatctttggggtccacctgatctggcatcccatatctctcagaccttattgcccgctatgctccttcaggatcattctgctttagctacatcacccaccttggtgaaacaatctaggcatccatcaatcccaggcccttcttatttcctcttttgtctgcctggaatgctatccctccaggtaccacatggctccctccgtgacctcttccgggtctttgctgaaatctgtctttctccatgccctacctatctaaaattgatactctttcccactctactccctttcctcatttatagttttatttattctcgttattatttatcataatctaatatactatatgctttacttatttattatctgtcttcttccagcagaatataaggtccatgaggtagtggtctctgttaacatttgtaaagattccatgtgtgcctgaaaacaaagtgttagttacaacattcttcatattcatattcttcattcttcatattcattaattaagctttctaatatttaaatcttcgctatgcttactaatttttggtctgtttgatttatacatcaatgaggatgttagtatctcccacaaatggaagaatttgccagtttttccttatagttcctttagtttttgtgctacatattttgagatatcttagggtaatgcaagtttagaattattacatctctcaggaaaactgaacctttttttttcattatggtgtaaactttaactctggttttacatgtatttgtgggaaagcctattttgactggtatgatatagatataccagatagatatctaggttaatttgcctactatgtttatttcgtctctttatttaaacatttctgcttctttattgtgaggcttgtttcatctaaagcgtgtatattccttgaatttttataatcaaatctgacagttcatgccatttacccggagttcagtctattttcatctactgcaatttctaaaatattttgatttattt

SEQ ID NO: 264 - DNA, 1500 bp, Homo sapiens
  misc_feature (1)..(1500): DMR2:49688801
gatatataaagttttcacattcattgcaaaacatctactccttaggaaatttaatttgtgaggaaaacaaacaaatctgagagattattagcagcagttacaaatagcttgtgctaagtgtagtgtgccaacctcccagtcctaaaccacacccatcccttcactccattagctcaccatctcttatttcagtcttatcatcttataatccatattccatgctatagctagagtttttaaaaattattttttatttttaaatcattgtaaattccattcaattgtaaaaaacaatacaaggagtttcgatgtgccctttactcagtttctccctcatggtaacatcttgcaaaactgtagtgtaatatcaccagcaggatactgacatttatacagtcaagacagaaaacatttccatcatcacaagcctccttcattttacccattatagttacactaacttccctttcccatcccacatccctgatctggtctcgatatttataattttgtcattttaagaatattatataagttgaatcacatacaatgtaatcttttgcgattgcttttttttttttcctcacttggcataatcttctggagattcatctaggttgttgggtggatcaatagtatgttcctctctttgccaaatagtatccaacggtatgaatgtaccacagtttaaccattcactcattgaaggaaatctgggttgttttcagctattggctatagtcaagttgccataaaaattatatacaggtttttgtgtgaacccaggtttttatttccatggaacaaatacccaggggtgaaattactgtgccatatggtaggttcttgtttagttttaaagaaaacaccacacgtttccagaatagctgtacattttacacccctaccagcactgtataagtgatccagtttctatgcatcctcactgcaatttgctgatgtcattattttacatatatacttatatactgctatctcattgtggcttaaatatctatttccctaaaggctagtaatatcgaacatctattcatgtgcttatttgctatatgaatctttggtgaaatgcctcttcatttgtttgcccattttttaattagattgttcttttactattgaattttaagagtttatgaaaaaaagagtttatgatacattctagataatagttctttgttggctatgaggtttgcaggtattttcaccactttgtagcctatcgtttcattatttttgacaagatctttaaataaattttataacttttgatgatgtctaattgattttgccttttatggaatatgtttatggtgtgaactcttaagaactttttgcctttccctagattccaacgatttttctactatatatttttcctaatacttttatattttaatgttttacatttaaatccatgatctattttgagttaacttttgaataagatttgataattaagttgaggtttttttttttttt

SEQ ID NO: 265 - DNA, 700 bp, Homo sapiens
  misc_feature (1)..(700): DMR2:50756601
atttagatggacagagctttagaaacaacctaaatatccaacaatagtaaaagagtaagtatattaagatatttacatacggaataggtggttgatttacaaagggctagtggaatagaaaaaatttctcatgttaagatccacatcaaaattttttttgtttacaatatgcacataaaagattaagttataaaatcaagatttaccaaagttgaaagcatacattttttcactctcttataagagcatatttgcatgttcctaaaagaatcaataaatatactcttataatccatacatgttgggtatttacgtgttaaaactgaaagtctaatcttgtgctgtctttgaaaaacggctgtgttgctgtggctaaagaatgctttacagaaaagaagcatggtatactaatgtgagaaaacgtgctttgtttttaaatgtgatggttttcttggtgacattttgaagtcaatcttttctctcttgaatgacagaatttctatattaagagagtatgtggagacaaatagtgcctctcagttgcgcaaagaagcatatttagtatccaactacagaattccacggaaattatagaatcttcagtccagatttaggtaccagagttaagtagaaatggttatagaaccagtcagtaagagtatagcatatacgcagaccgccacacagagagtgaggcatg

SEQ ID NO: 266 - DNA, 200 bp, Homo sapiens
  misc_feature (1)..(200): DMR2:52126401
aaagtcacccctctgctcactgagataaatgcatatctgattgcttcctttggagaggctaatcagaaactcaaaagaatgcaacaatttgtctcttacctacctatgacctggaagcccctccctgcttcaagttgccccacctctccttgaagttttgctgcctttccggacctaaccaatgttcatctcacatatgc

SEQ ID NO: 267 - DNA, 100 bp, Homo sapiens
  misc_feature (1)..(100): DMR2:55402401
gtatgtaattagaaaaaggaaaattatttgattggcatattcatacaattattgatattcttctttgatattaccaaaattcagtaagggttatttctta

SEQ ID NO: 268 - DNA, 3000 bp, Homo sapiens
  misc_feature (1)..(3000): DMR2:58508401
aactctacccttgagaaaaatcacagcacagttggggaaatataaatatttataattatatctaaatacgtcttcaaatcaacatttatatacacacattgcagtagtaacttacatttgtagagcacagctctttatagtttagaaagtgttttcatcaaaattgttttaagaggatgttcctacaacattttgaacgatgtctaggagctatttctgtccctaatttaatgatgttcagaataagacttttagggtaagcaaggccaagaacctttcagaaaagatggtttcattcctgcatttctttaaccaggtttatttatttatttatttatttatttttgagacggagtctcgctctgtggcccaggctggagtgcagtggtgcgatctcggctaactgcaagctccgcctcccgggttcacaccattctcctgcctcagcttcccgagtagctgggactacaggcaccccccaccacgcccggctaattttttgtatttttagtaaagacggggtttcaccctgttagccaggatggtctcgatctcctgacctagtgatccgccctcctcggcctcccagagtgttgggattacaggcgtgagccaacgcgcccggctaaccaggtttattttttaatggagccatccttggctctcaacacctaacttatggagcatctttgttttttccccaggagtgagagtatacaatagtttggtggacatttaaactgtatatagtataaattgttcttggggctggagatctgggagagaacaagacttgacatggtccctgccctcatgcagagtgtgtttgtgtgtgtgtgtgtgtgtgtgtgtgtttaggagggatgtgcatgcagggcagggaaggcaaggataatagatatgtaaacaaataattagcattgtgataattatacagcaggctggtatatggtacacataattattgacctgaccttgatagatatcaaagtgaactttctgaggaagtgaccattaagctgagtatgcaactgcttaggggaagcaggaaggccttaagggagggagcagaatcgcacattgaagaatctggaaaaaggtgggaagcactggaataacaaagttctctggaaacaaagctagggagtgggttgggggccagattatgcaggcttgtgggtcaaggagaggataatggaaattatccttaggagccgtgagaagtttaggagtgacatggttctattagagtgctatggctggttcagagtaagacataagaagagaggccagttagaggcctgttgacagaattgaggtgataaatgtgggtaacttggactggaatattggtagtagaaagggaaagaaatgaacagatttgcaaagcatttaggttatagaattcacaggtcttagcaattgattcagtctggggagatgtcgagtatatctcccaagcttttgacttgggcttgaagaaaagactatttataataattggggctgggtgcagtgactcacgtccgtaatctcagcactttgggaggccaaagctggtggatcgcttgagctcaggagttcgagatcagctgggcaacgtggtgaaaccccatgtctacaaaaaatagaaaaattaggcgtggtggcttgtgcctgtagtcccagctacttgggaggctgagacaggagtatcacctgagcccaggaggcggaagtttgcagtgagctgagatgcactattgcactccggcttgggtgacagagggagaccctgtgtcaaaacataaaataaaataacaattggttcaaaatattttgaaaattgttttggttctatctgcattggtgcaaaaggcaaaaaagaaaaaaaaacaggaatgtgcttatgtagacattaaagccataatgacacaccaaatatttgctttaactaaagagggctatggttgtacagagctgacacaaatatgatacactattgataataaaactgaggtcttgccctctataaaagttaaactaattatttacacttgcatattcactcacattatttattattttctatttaaaatcattatttttattgcaaaacagacttaattttattctcagcctataaaccttactataacttatctatatctgctaagcacagagtcatttttgttcctttaataagtgtagtaattcgcattggctaatggtataactatgataattacataatgtagttgtactcttaaccactgccttattacaacaattttaaatcttgttattttttcctagtggagcagagcatatggttatccaattttttttactacattaaaaaaacacacaacttttcttgcttttctcttatcttttgcctcaatccagttagcaaaattttacatgtagtttggagattatacttgctattgggtgaaattatataccctgtgcttttttcctcgtcctggattaatttgggttttcttcttagatcttttacttccgggatagtgtgtacagtttttcatggcaaatcataaacttagcacattttactgaacaattcactcatcttttcaactacattatggtagatagttgtggagaggagggtttggtgttagtgattaaaattatgaatagaggagctgggtacagtggctcacaccctgtaattccagcaatttgagatgctgaagtggcgggatcttttaaggccagaaattggagaccagcctggataacatcgtgagatcctctcataggtgggaattgaacaatgagaacacttggacacagggcagggaacatcacacaccagggcctgtcgtggggtgggggcatgggggagggatagcattaggagaaacacctaatgtaaatgacaagttagtgggtgcagcaaagcaacacagcagatgtatacatatgtaacaaacctgcacgttgtgcacatgtaccctagaacttaaagtataataaaaaaagaaaagaaaa

SEQ ID NO: 269 - DNA, 1600 bp, Homo sapiens
  misc_feature (1)..(1600): DMR2:59030701
ctgggcgtggtggtgtgcctgtagtcccggctcctcaggaggctgagaagggaggatggcttgagcccaggacttagaggctgccgtgagctatgattgcactgctgcactccagcctgggtgtcagagtaggacccagtctctaaacaaaacaaaaggaacttgccagaatatgtgacacccacccttaaagtaaaatgaaaggccctggaagtgttgacaacatctagatgatgggcagaatataacgaggcatgcttctggcagcctgtggagtaaccagcacagcgagcctcttttcaatgcaagagaaggaatgtcagggacctaagctaaggcccagaagtcaattgacttgcctggcatccgggaacattttccaattgctttcataacacacgtccacaagcatctgtatgtataagggtcagttgagggggtgtgccagagaatggggaggcagaaagtaggagttacataagctctgtgagcctctgtgtcctcatctgtcaaatgggctagagcttcatgaatcccacagctgtgaggaatgagtgggataatgtagattaaacctcatcccagtgtctggctcagaggaagcactcaactaaaaggtagcaatttttattagaaggaaacataactcttcgtctttggagaagccctttctctctccttgcctcctccttcaaacctttgaggcacctcagtagtaattggctgctaggacttggaatctatctgtggagaaacagtgtttgtgaaagggctctaaggtgatggtgtgaggcatttatttgtgatctaagggaacataagttgcctctggtgcttattgactatttctagctggaggcacagaaatacacaggcactaaagggtgagttactgttggacgctcctctctggaccagcagggacttggaaagctcttggaggatgtagtgtcttgcatcaatcaccagtgacccctctggctgaatatgtacaggcagaaagaggctcctaagcctctgttctccttagctagatggatggaagatgaaatgcagcccctggaggaggaggaagtgtgtgcggtggaggattgacctgtaccctggaaatccaagctgattcctcctttccaaaacaaatcggaaatgtctttattttctatgagcctattaaagcatatacatttaataaattgacatcgtgggagacgagaaacagaaaggaggagatggggagaggagagaatggtcaagaaaaataatgcccggaactacttgtttgacgaatgaattaaaatagagcaaaagtggcttaggactaattccagcattttttaaaagtgtacgttgagatggattcatgctaggagcagaggtgtgaggtgtggtatcaagccggctgatccattttaaataacttccagaaaaatttcacgtgcttatgaaaaatttcattgaatattaattcacctaagaatgctgaagatttggctaaaccgcataaaagctaggagtcatagaaaaggtgctcttccaggatatgctaatgacactctagaaataatgcttctgtttttgagaattgttagcatatatccag

SEQ ID NO: 270 - DNA, 1700 bp, Homo sapiens
  misc_feature (1)..(1700): DMR2:59188101
tgtagtagatctctgggacttactcatcttgcatagctaaaacgttgtaccctttgattaatacctgcctccccctagctcctgacagtcactattctactttctgcttctatgtgtttgactgttttagattcctcatataagtggtatcacgtagtatttgtcattccgtgtctggcttacttcatgtccctgaatgtcctccaagttcatccatattgtcataaatggcaggatttccttctcttttaaggctgaatgatattccattgcctgtatacactacacttcctttatccactcatctatcaatagatgttttggctggttccatgtcttccctattgtgaataatgctgcaatgaacatgggactgcagacatctcttcaacatacgcatttcatttcctctggatatacacccagaagtgggattgctgtatcatatggttgttagtgatacgtttaactttttgagacatctccatactattttccatactggctgcgtcagtttgcattcttaccaaaaatgcacaagtattccctgttgtctacatcctcaccaacacttgttaacttttgtcttgataatagagaatggatgtggttataaatgcctgagtcattcacttacctgcctcacggccttgagtgagttacttacgtctatgaacatcagttttctcatctctaaataggaaagataataatacctaccttaaaaagttattaagttagctcataaagcacctagtgcatagtatatgctcaacagctgttgatttcttggtcccctcctgctctgttctttttggtgtcgttataattaacccatgttgagtcctatctaaacacaagttatcacccaaacccctgttgtacattcctggctcctcatcttgtatccctccttgttccattgcacctcactgcttagaatttccatcctctggtcctgtccgaatcacactccttctatgagatcctgtccaaattctgccctacccataaagccttctgttaccactttagcttgctgtgttctctccacctctgaaattttctggcatgtattgtcttttccacttagcactgattccttcccatcctttttatagtttagtgtatctctgaattattctctaacaaaattctactacttgatggaaggcattgtgcctcgtattcactcgtgaccctcagagtggccagcatggcactttcagctttgtttgctagtttcaattggagagtccattctcctttttgggagaaaattgagtgagtatgagacaaatgataccaataacatattcccaggctccaattgtgaatcaagccaaactgcttaacaatagaaatgtgtctgtttttcctggtttggtttaacgattttcctgtagatccacatctctttctatcacaaagaaatcactttatcctgctgggtaattaatatgaatgtacagtatagcaaacatattcctaaattcctgcttattttgctggtaaattacaggaaatcctatacagtacacctgggataccctgcagtttgaaattagaatgtaaagtgtctcccagttcctcctacttggccaggatactggtctgattgtgaaaatctttctagttagacatgtaatgaactgggatgatagcaaattcatttatttccctttagcttaaaattaata

SEQ ID NO: 271 - DNA, 200 bp, Homo sapiens
  misc_feature (1)..(200): DMR2:60179901
gtgtataaagtcagatcatttccaaatacgtttggagaaagagaagctggaatggaagagtttattttgtttttcccagtaggtcagttttagaatcacaaagtgttctggggtcacttggaaaataaagaaaacagaatgtatccaattgctgcccaggctggggaagcaaatctccaaatcacacagaactaggaagg

SEQ ID NO: 272 - DNA, 100 bp, Homo sapiens
  misc_feature (1)..(100): DMR2:61223701
tctacttctgttgcccaggcgggaatgcagtgatgtgatcgcagctcactgcagccttgaattactaggctcaggggatccttctatgtaaccaggattc

SEQ ID NO: 273 - DNA, 300 bp, Homo sapiens
  misc_feature (1)..(300): DMR2:61230701
gggcacggtggtgcgcgcctgtaatcccagctacttggaaagctgaggcaggagaatcacttgaaccctggaggcggaagttgcagtgagccaagaccacggcactgcactctagcctgggccacaagagcgaaactccgtctcaaaaaaaaaaaaaacaaaacacaaaaacaaaaaacagtttaccagttctaaaaacatacacaaagaagtgacaaagtatatccaaacaaaaacttgtactaaaagttcctaacagcattactaaaaacagccaaaaagtagaaacatctcaaatat

SEQ ID NO: 274 - DNA, 900 bp, Homo sapiens
  misc_feature (1)..(900): DMR2:62832901
gattaagttttgtggggaaggcatgtctaaaccaaagataggccgaatgcagaggcctcttgtgccaaacagttaaacaagttgtgaatgcaaagaaaaaaattctagaaggaaattaaaagttctaccccagtgaacacagaaaagatttaaaaaatgcataaagccttattgctgatacagagaaagctttaatggtctggatagaatatcaaaccagccatagcattcccttaagccaaagcctaatccagatcaaggccctaactctgtccaattctgtgaaagctgagaaaggcgaggaagctgcagaagaaaagtttgaagctagcagaggttggttcataaggtttaaggaaagaacccatgtccataacatgaaagtgcaaagtaaagtagtaaatgctaatatagaagccacagcaggttatccagaagatctcaccaagatcattgatgaagctggctacattaaacactgattttccatgtagacaatacagccttctattggaagaagatgccatctaggaatttcacagctagagggacaaagtcaacacctggcttcagagcctctaagcttcaaacgacaagttaactctcttgttagcacatctttttatcgcgtggtttactgaatattttaagaccattgttgagacctgccgtacagaaaaaagatgctttccaaaatactactactcattcctttttagtacactccctgaaaaaacaacaccactgctcattgacagcgtacctggttgcccaagagctgtgatggagatgtacaaagagattagtgttgtttctgcagcacatagttcaaggagtaattttggcttttgagtcttattatttaagaaatacattttataaggtgtagctgtcataggt

SEQ ID NO: 275 - DNA, 2800 bp, Homo sapiens
  misc_feature (1)..(2800): DMR2:63155001
ctgttgagctttgagagttctgtatatattctggatacaactcctttgctggatatgtgacttgcaaatatttgctcccatcatgtagcttgtcttttcaggctcctaatagtgccttttgaggaacaacagttgatgaagttaccaatttttttaaaatggatcatgcttttggtgtctagttggagaattctttgttaatcccaggtcacaaatatttcctcctatgctttcttctaaaagtttgatagttttacattttatatttagatctatgatttatttttagttaatttttgagagtaatgtgtgaggtttagtttgagattctttgtgtgtctgtgtgtgcatagatgtgtattgtgccaataccatttgttgaaaaactatcctttctccattgaattacctttgtacttttgtcaaaaatcagctgggcatatttatatgggtctatttctgggttatatgttctgtttcattaatctgtgtgtctgtccttttactaatactgtaatttcttgattagttatagctttggggatggcaaaccacagtccctaggccaaatccagttcatacatattttagtaaataaagttttattggaacaccttcattttatattatctatggctgcttccttgctatgatgacagttaagtagttgtgacagactatgtgacctgcaaaaccaaaaatctttactaaatggcccttcacagaaaatgtttgtcaacccctgctttagcaaaagtcctaagatcatgtatgatccttccaacattattttcctttttcaaaatgttttttgttattctagcttctttgtctctttgtataaattttagaatcagcttgttgatatctttaaaaaatccttctgggattttgatcagaattttatcaaatctttagattaatcagaaatctttagattagtcaggagacagctgacatctttactatattgagtccaaaccgtaaacacgtctatttatttgtttatttatttatttgacagagtctcgctctgttgctcagactggagagcagtggcgggatcttggctcactgcaacctccgccccccggattccagcgattctcctgcctcagcctcccgagtagctgggactacaggcgtgtgccaccacacccggctaattttttttttatttttaacagagacggtgtttcaccatgttgcccaggctggtctcgaactcctgacctcatgtgatccgccctcctaggcctcccaaagtgttgggattacaagcatgagccaccatgccaggcccatttattttaatcttcttaagtttttagcatacagatggaatgttttgttagacttataacacagtatttcttttattttggagctactgtaatttaaaaagcttttttggttttcaattgtacattactagtatatagaaatacaattgggccgggagcggtggctcatgcctgtaatcccagcaccttgggaggctgaggcaggcagatcgcctgagttcaggagttcgagacccgtctggccaacatggtaaaaccccatctctactaaaaatacaaaaaaattagccaggcgtggtggcatgcacctgtaatcccagctactagggaggctgaggcaggggaattgcttgaaccagggaggtggaggttgcagtgagccgaggtcgtgccattgcactctagcctgggtgacagagcgagactctgtctcaaaaaaaagaaacaaaagaaatacaattgatttttatgtgttgaccatatatcttgtgaccttgctaaatgcacttattagttgtaggaaccattttgtctgcaaaaagggatggtttcatttcttctttagtacagtgttccataagagtggtaaaagtggacatttttaccatgtttccaatcttaggaggagaacattcagtctttctctatcaagtaggataatagctgtagtattctctttttccttcttggtagaaactctttatagtttgaggaagcccccttctactcctagttttctgggctttttttttttttttaattatgaatgggtatggaattttgtcagacatgcgttttgtaccagttgatttgatcagttgatttttcttatttatattgctaaaattgtggattacattaatttttgaatattgaataagctgtgcattcccaaggtaaatcccacttaattctagtatactattatttttatatattactaaattcttaatccttgttgaggatttttacttctatatgtatgagagacagtagtctatagttttttgtacttttttttctttcgttttgtaaaaaattccatgggactgcttgatatctttttttgtactgtctttgggtaatagcctcagaaaatgagctgggatgtgttgaattatcatctcatattttctgaaagaaatgtgcacaattgctagtatatttttctctcaacgaattcaccagtgaaaccatcgggacctggagatctcttttacagagttttttgttttgttttaaactacaaatttaattcctttaatagccataggattcagatgatctctttcattttctgccagtttggtagtttgtggctttcaaggaattattccattcaaactatgttgttaaacttatttgcatacagtagttcatgacattattttttatctacttaatgtcggtaaagtttaagataatgtaccctctttcgttcctgatatcaataatctatgtcttctttttctctttgtctgactagagttttttca

SEQ ID NO: 276 - DNA, 200 bp, Homo sapiens
  misc_feature (1)..(200): DMR2:63927901
gaaagggtatcagtgactgaagatcaaattagtgaaataaagcgagaagacaagattagagaaaaaagagtgaaaagaaatgaataaagcctccaagaaatatgggactatgtgaaaagaccaaatctacgtttgattggtgtacctgaaagtgatgggaagagtggaaccaagttagaaaacactcttcaggatactat

SEQ ID NO: 277 - DNA, 3000 bp, Homo sapiens
  misc_feature (1)..(3000): DMR2:64403701
catctccactgtctcatttggtcctcccttagagctctccctccccgagttcacctgcctgatcagccagagcagatttcctgcacatctaggttctttacaccctctagcctacaaagcacgaagaggcccctattggccctctggctctaatggactgagaaggagcttagcaggagaaaaagtgagtttcccagccccatcctaggagagagtctagaaggcttgttcttcctcagaaatgtgaacagtagagatgatttttctatctcattattccaaagaattctcaggcagtgaccatgaatagcttataattctctgtctttaaaaacgaaaacacacacccctgggaataattgcgcccacaggaagtaggctggcccgagtgcacacagccaggaagaataagaaccctccatgtttacttcagagcaaggtttttagcagggaaaatgttgctaggttgtgtctactccctccagtgccctcttccctcctccctccccacaaatcccccacttccgtcacatattggcaggaacttgctgttccttggccagctgggaggcctgccagagcccttccattttccggagggcttctcttctatttctaaacagagttgtttgaaaccggatgctacacagagccaatctcctcacccttcaaaccccctccctgacccctgaccctgtgaagcaggcccctcctccctttattgttcttgactctgggcctgtccctgtaaccaaagccaatgagttgggggcaggggccggcacaggctgcaggccaagggggaaagctgccagaggaaatttcacagggtaaagaggctcccagaagagccacgttgtccctcagcccctcccatttccctctccctctgccctgctgtcctggagggcacaagaatgagaccagcccatcgaggaagtccctcacttgagcagggccagacttaggccatcacagaacacagggagagatttctagttggaaaaacaaccaaaggactgtctatgcccttcattcatttagctgtaatagatggctcttttaacaggtgtccattcattcatactgtcactcattcattttctattcaacaaggtgaggtaggaggtggcactcaactccagaggcatggcttggacacttggacacgggaccagattgaggactagctaaaacggccccagagaaagccgctttcaatcagacacgcccactagtgtgccgggtcaattcaccgttgccatagcaacatgtgggcgttaccacccttttccatggcaatgacccaatgacccaaaagttactatcccttccctagaaattgctgcataaactgttcctttatctgcatgcaattaaagtgcgtgtaaatatgactgcagaatggccctgaacggctactctctccctacacagtagtcctgctctacaggagcagtcatggaactgtaacacctcttgaacccgggaggcggaggttgcagtgagctgagattgcaccactgcactccagcctgggcaacagagcgagactccatctcaaataataataataatagtaaaataatgataataataataaagctgttttcttctgtctccagcttgcccttgaattcttcactgggcaaagccaagaacccagtgggctaagctccactttggagcttgcctgccctgcgtcaaaggcatccactgtacctgctattgttcatcacagccattgggctatgacagtagataaaacaggccaaaatacctgccctcctgggttttgtaccgatggatgttagaaatttcatacaagggaagaaggaataggaagtccttggaaatatgataataaagagagtagtcaatgacaatagccgttgaccctgttgcaatcttaaagggatatgccgggtcaccaggcccgaagccagatctgacagtcaggaagaccagaaaccagccaagagtctaatggctaacagaagtggcaaatcagaaacatggctttggatttcctgctgcaacagatgtgtagaggggaagcagatgggctctgctcaggtttgggaggcagggcattctggaggtttccctcaggctggcctccatgcctgctgccactgtcttggctgcaccatcataaccacacatcatccacagcaacgggggaggacccaaaaacaaacaaccttggccttcctcaagagctgtggtgatgttcaagtcattgcaaaaaaatttcattttcctcagtgaactagtcctcacgtgtgggggaggctttgtcactggtcctgattattgcttcttgggcaatacctccaacattttgctttcagtttctctgcttccagcgtatctgtcccatgctagcgatctataattcattcaaacatacactaggtagcaaccatgtgtcaggccctgcacagggtgctgaaaatgcccttctggaggagagagacacgagtggtgccttgagggctgtcatgagagaggcaggcatgccatgaacagcacacacctgggctgagctcttgtggagggatagtgagccaggagctctgcgggcagccgggaaggagggcactcctgactcagccttgggtccttgagaattcgcttggcattttttggtaggttgcactgtgctaggcactgccatttcaagaaggcatagcttagctcagaagggacagtgaacgttcatttgagatgaatgaatagaactttccaaggcaggcaggcaactatggagaagaagtgggggaggcgtgcagtcagagtgagcagcctctgtagagctgagagctgggaaagggcagggttcatgggaaggccagggagtggtgctcatgatgggagcctgagggtgggggaagggaggtggctgattggagggaagcttggtgctggagggtggagaggacagagggcatggaggccatgccaaggaaagtttggactttatcctatagtaagcaa

SEQ ID NO: 278 - DNA, 200 bp, Homo sapiens
  misc_feature (1)..(200): DMR2:66467601
aaagaaaaaaaaaaatccaatcgtgggcattctaaagagaatgtacataagatgtgtaattacaaaaatatcaaggtactattattcagggatttaatgtttattcgcgatttacacaatatatctttccctcaattcaaattatttatcatgatgaccctttttatgatatctacttccattcaatattaatacttgtg

SEQ ID NO: 279 - DNA, 2600 bp, Homo sapiens
  misc_feature (1)..(2600): DMR2:69518101
aacagagcaagaccatacctccaaaaaaacagatatactcatcattataaaatgaatacattcatagtaaaaaatgtgaaaaaaatatatgaaaagataatggaaaacaatatagaccaactaaatacaatctgttagtattggatactgattcaaacaagccaacttaattatgagatatcagaaacagttaaacactaatggatatttgataataagaaactattgttattttttcctctcttatgataatggtgttacagttgtattagaaaaaagaagaaaaaaaagcagtccttaaaaaaaaatagtttttttttttttttttttttttttgagacagagtcttgctcttgttgcccaggctggagtgcaatggcacgatctcggctcactgaacctctgcctcctgggttcaagcgattcttctgcctcagcttcccaagtagctgggacgacaggcttgcgccaccatgcccagctaatttttgtatttttagtagagacagggtttcaccatgttggccaggatggtctcgatctcttgacctcgtgatccacctgtctcggcctcccaaagtgctgggattacaggcgcgagccactgcacccggccaaaaaaatagctcttgtactgatgttcctcaatcagatgacagattcctcatggcctgagtaaaagggtgaaaggggtgtgagtgatggatccgcttctcaatgctttagtatctacatctatgagaaacagtgatgtaatgtttaatggctctctgggaagacacctttacctagtgggccttttcacagtcatgactcagatatgcaagcaagggccacactctgaccaccttacctgctgagtctgggcctgctgctgctggtaaaacgtgcctgccggctgctgctgtgctggcggtggctgttgctgctgctgttgctgcttgaggaagagttgctgctggtgctggggtgtggcctgggcctgagcgggcagaccctgggcctgagtagaaggcgtctgctgtggagtgggaggagcctgtggctgcttggcctgagtttgcggcagaggctggctgggtggggcttggggttttggttggggaacactggctaaaaggccaggctgattgctggatcctgcaatgagaataaagtccatgtaagggttccaaatgcttccacacaaaaatggctttctgtcttgccaaaacaactaatagggggtgacaagtgtgcagagtatctcaagattcgtgtcctcctcactgtctttccacatgctctgtcccacctggaatgtctttctatcttcttgctaaattatgtgcttcaaatttttcaaaacaaggttcaatattgcctccttaagaaagtcttcccttattaatcatcccatttagtcaattacaactttagttggcaccccaaatgtctacatattcaactggcctttggtacatatgcacaagctttgcccctcttggcatgcagcatgacaacatcattccctggtgttctacatgtagcttatcccagtctggatgcgtggctataagtagatggccaccaaattcaccaaaagcagcttcctggtagggttcagttactcgatattttggatcaatcctttttatgaaacaaagcttacttatttcattagaaacagaatgccaaaacatgagggggtgttagatacttcaagagacaaagcattaaagaaacaatattcttctgtgaatgtcaaaagagaggagtcttgtttctattttttttttaggcatgtatgaaaataactcagtttctttgtatctcagcccatcagaccccaaacttcctaaaattgaaagtaagttgtctgctagtccaagctcttcagcctctttagtcctgtctcttccaggcatctttaactgttgatgtattagacccaagcaggcatttttgtaggctgggaggcaaatgaataaaataatgctttctacccaatcatctcccctagcccatttcaatgtcccaaagtttaattaacagaacagggaagctgccctggactgaactcaacactttggaagagtcttatttctttaaaggcaaagggaaatatatgaaataaagagggaggataaggttccaaactgcaaaaatcagggccaagtctagaaaaagcgacaaagggctttagtggttttggagatccatctcagaattcaaggaggcctctccttttgccagccatttgcgatacaattcttttctttttttttttttttttttgaagcggagtttcactcgtcacccaggctggagtgcaatggcacggtcttggctcactgcaacctctgcctcccaggttcaagcgattctcctgcctcagcctccccagtagctgggactacaggcgcacaccacaatgcctggctaattttttgtacttttttttttgaaaaacagggtttcatcatgttggccaggctggtctcgaaatcgaactgacctcggatgattcacccgccttagcctcccaaagtgttgggattacaggcatgagccaccacgcccggccactgccatacaatttcaagggcagcttcctcctg

SEQ ID NO: 280 - DNA, 1000 bp, Homo sapiens
  misc_feature (1)..(1000): DMR2:70565001
agaatggtttggttggttacagagctacaggaatgagaggtgggagagtttctcttcctttgtgggtagagatgattagggggtcgtggagagtgaagtttgaacatcaactgtttgcactggtgcaccagggcaggcaggaatcagaggctgtctgggccaatctcactgcctggacacaggcgcctcagtgtgaaccggggcctgtgatgggccgatactgctcgttcctggaacaagggccctgtgtcttccactgtccaacacaaaggacagagttcccctgtttactttggattagaaatgttcaaatgaaggacagcaacaacatttgagtttttcctcttttcagtttcttacaaaaaaacaaattgtagtaagtcagagatttttttggcatcttcggtgaataaaatcaatcagactagatcgctgaaggagtcttaaagagcttcccttgtttactatgttttttagatttatggcttaaagcttaagaagtagcagtgactgactaggcctctgaattgtccattcatttcccaagaaatgaggcattcccaattccttggtcagttgggcgaagtgacctttgacctttggcaataagctcattctaggctggaagtaatcacataattatggaaacactccttccttttgtccaacctcccacacacttcgaaatactcctttcctttcagatgctcattcaaaacccccctcaattagacctgctaagacatagagtttgtatcagacatagaagtctttaaatcatcaaagtctaagtggtcccatgttgaaagactgtgcctaacactatagggaataagaccttgaataccatggtggtaaggtggaaactgtgtggccttttgtgatgtctgggttcaaatcttagctccagcactaatggctaaggacaactttctgaacgtttctgatcgtcaatttccttacctgtaaaatgggggatatgatagtacccagcatataa

SEQ ID NO: 281 - DNA, 700 bp, Homo sapiens
  misc_feature (1)..(700): DMR2:72417601
ttatccagcatactctttaattttagattatagtattttgcacatacacaaaattcaatttttaagacaaatagattttgtaacagagaaaaatgtatatgtttagtcttttaatcctcctggtgtgttgtacatttttatggtatgatatataactcccttattcaattttgagtttatatttgccttaagttctattttatgtaatgtttatatcgcaatatttatttccttttccttcacattcgcctgtagtatcttgtcacacatttattttatatatttttatcttattttgagtagcatctcttataaaacacacagaggtgaattttgttttaaagaaatcctgggagtttccatgcttaaaatttattttactattttcatatttaaagtgattattgacatgtttggactcattactatcatcttatttcatattttctatcttaccacagtttcttatcttctctaattctaaactggtaaaatttgccttttatggttttcccttctgctattatatagctttctattatgtatccataaattattactctgaaattttaaattcatttaaaagatgtaattcagttagtgtctacagttaatcaatatattgtattaatttagtcattcatattctcgtacaaacatcaccaacatccatctccataacactttccattttgcaaaa

SEQ ID NO: 282 - DNA, 1000 bp, Homo sapiens
  misc_feature (1)..(1000): DMR2:73701601
acttcttcatctatagaacaggggagaagaaaacctgccttctagagttgtttcgaagattgaataaaataccttctataaagccctgatagatgaactacccaccactcttccctctgtttcctttttctggctctctcagcttcttggtgcattgagagagtacctacctcaggcaggccacatgcccaaccctttggtgcttctccagggaccatacatcgcagaaatcctgtgaccaagcacaagtttcaggaaaggctccctccagctttattgtaagtttttaggttgctgaggtggcataagtgccaagcataaaaaacagcccagcctccagatcccaaggaaggtgcatgctcagagcactgtccttccacccagtcccctcacctgtcaccacaagagccttgagtgtccagggagcttcagctgtcagccgctcactggcatccaggagataccgtctggggcttgctcacccctggaaagcaggctgcctgcctcattgcttggctcctgaatgtttggtaatcatcaaccctagggtcaaagagctgggctgtaacacagcagggagcccagtgtgcattcccctttatagtcaaagggaatggcctggagggggaaactcagggtctggaaccgcctgggttccttgcccttctggaaggcctgccacctctcttgcctgttcaggccctgggcatctttctgccacctggcacacttgatactctctgagatccaccttggtccctgtacacatataccacgagcctgagaactgtgccattcaccctgcactcagtcaccattggccagaagccgagtccccacacttggcaacaaggcccttcccagctaggcttctccatgctgaggtttccctggtccacaaagcatcgattgttggcagttctttgcactcacctcaccaacccccacctccacccattcattgattcagtcaacaggtgtgtgcgatgcacttcccatg

SEQ ID NO: 283 - DNA, 300 bp, Homo sapiens
  misc_feature (1)..(300): DMR2:74901901
ttaaagatccacagacgctgctatgtgtatgtctcacgcgtccgtgtgaagaggccatcaaacaggctttgtgtgagcaacaaggctgtttatttcacctgggtgcaggcgggctgagtctgaaaagagagtcagcaaagggtggtgggcttatcattagttcttataggttttgggataggcggtggagttaggagcaatgttttgcaggcaggaagtggatctcacaaagtacattctcaagggtggggagaattacaaagaaccttcttaagggtggaggagattacaaagaacctt

SEQ ID NO: 284 - DNA, 500 bp, Homo sapiens
  misc_feature (1)..(500): DMR2:79822601
cctcaaatcattctgcctttttctaccctcagcacctccaattccaaatccctattgctctcttgaccattacagtggtctcttcatatggctattctcatcctccctggccgctagtggccttttctctacactgtaaccaaagggctcttcaagacacacaccttatatctggcctgcagatttaaaacacattaggaatctctctgtacgcttaaagacaaaactcctgagcatagcctataaggccatatatgatctgcctgctctccctcccttcagacacatttcataccccacttgcctaccaccatccccattcagatcaatgatcatacaggtcttccatcccctgaacttgacaggctcttttctgatgtatgctggtcttttgccagatacaatttttttctcttcatcttttagatgtcagtaaaatgtcctttccacagggaagagttccttatcaactttacctgggtcagatgctcccatcatag

SEQ ID NO: 285 - DNA, 200 bp, Homo sapiens
  misc_feature (1)..(200): DMR2:80134601
atgactgggtgcctgcgccatgccattcatgaggccagctttgtctcttcagcatctcactcaaaagagcacttctgccaaaaagccaccacccctgttctgcctttccggttgtgcttcaaagccgttattgtgtcacttgctctgggcttgaaattgttccttagatttcttccccgaaagagtttacagacattgta

SEQ ID NO: 286 - DNA, 1100 bp, Homo sapiens
  misc_feature (1)..(1100): DMR2:86880201
gaaataaaggacatccagatttgaaaagaggaagtcatactatcactatttgctgataatatgattatatacctagaaaaccctatagactcctccaaaagacccctagatttgataaataaattcagtaaagtctcagattacaaaatcagtgcacacaaatcaatagcaccgcaatacaacaacaatgacaaagctgaaaatcaaatcaagaactcagtctcttttttttcgagacggagttttgctcttgttgcccagtctggagtgcagtggcatgatctcggctcaccacaagctctgcctcccaggttcaagtgattctcctgcttcagcctcctgagtaactgggattacaggcatgcaccaccacgcctggctaattttttgtatttttagtagagacggggtttctccatgttagtcatgctggtctcgaactcccgacctcaggtgatccgcccaccttggcctcccaaagtgctgggattataggcatgagccaccgcacctggccagaaattcaatcacttttataggagcagcaaaaagccaaaaacaaaaacctatgaatacgcttaaccaaggaggtgaatcatctctataaggagaactacaaaacactgctgaaagaaatcacagatgacacaaacaaatggtaacacatcccatgatcatggatttgaagaatccatattgtgaaaatgatcatcccgccaaaagcaatctatacatttcaccataattctcatcaaaatacgatcttttttttaatagagttagaaaaaacaattctaaaattcatatggaaccaaaagagcccaaaatagccaaaacaatcctaagcaaaaagaacaagtatgtagccatcacatatactgcaaggctataattaccaaaacagcatggtactggtataaaagtaggcacatagaccaatggaacagaatagagaaaccagaaataaagccaaatacttgtaatcaagtatttgatctttgacaaacaagcatacaaaaacataaattgggggaaggacatcttatttagtaaatggtgctgggaaaactgataccttttttagaagaatgaaattggat

SEQ ID NO: 287 - DNA, 1100 bp, Homo sapiens
  misc_feature (1)..(1100): DMR2:87760201
cttagttcatttgggctgctgtgacaaaaatatcataaactggagagtttataaacaacagaaatttatttctcaccgttctaggggctgtgatgtccaagaccaaggcactagcagtgtctggtgaggccctgcttcctcatagatgacacattctggctttgtcctcacatggtgtcaggggctagctaattccctggggcttctttcataagtgcactaatctctgtcctgagggtagagccctcgtaacctgattgactcccaaaagccccacctcagtactatcacattgaggattaagtttcaatataacttttgaggagacacaaacattcagaccatagctttatctatcatgaatttgggggaattttcagtcactgttgcttcaaatgtttcttctgtttctttctcttttttttttttttttttgagacagagtcttgctctgttgcccaggctggagtgcagtggcacgatctcagctcactgcaagctcctcctcccaggttcatgccattctcctgcctcagtctcccgagtagctgggactacaggcgcctgccaccacgccccgctaattttttgtatttttagtagagacagggtttcaccgtgttagccaggatggtctcgatctcctgaccttgcgatctgcccgcctcggcctcccaaattgctggcattataggcgtaagccaccatgcctggctttctctttttcttctctttctggtatttccaaaaagtctccatgttccaccttttgtaattgtctcacagttcttgactcttgttctgttttttctttttcattcttttctctcattgtgtgtcagcttttgaagtatctattgacatctctttgagctcactgattctttcattggccatatccattcttttgatgaacccatcaaaggcattcttcatttctgttatggtgttttttatttctagtatttcatctttatttcttcttagtgtttttatctctttgcttacattacccatctgttcttgcatgttatgccatttttacattagagcccctagcatgttaatcttagttattttaaattcctggttggatactt

SEQ ID NO: 288 - DNA, 1000 bp, Homo sapiens
  misc_feature (1)..(1000): DMR2:87983601
aaaacaaaataagtaaaacatacagtatattatatttaattaagtgagaagaaagaaaaacaggtaaatggcactaaaggtatggaggcaggtgtaattctatagagagagacaggacaggcagcactgaggtgacatctgaataaagacctaagcacgtcttgtcggagggaaagcattctccatagaggtaatggcaagtgcaaacactcagaggcagaaacatgctggcagtgctcagggaacagagctgaggccaatgtggctgggatgatgcgtgcaaagcattaagaaataagaccaggaaggtgagcaagggctaggtcacatggcatcttataagcctatggcctttactctgagtgacatgggaagtcactgggggattctacgcagaggcgtgacgaacgcaacctgacgttatcaaacaggattactttggccactggtctgagaagagactggaacatagacaaaggacatgaaatatgaataaaaaaataagaactataaataactgatgaaaatttgaaaaaaccattcccatttacttatagagaaataagataaaatttctcaggaagctggcaaaggttcaccacaccacaaataaacactgtggtgaaatgggcgcttttaaatgatgctagtaagaatggcaccggcgaacccctttccaaacattacttgacctcacagtttctcttttaagattcaattcttgggaagtaactagagatgtggttaaagagtcgtgaaaaaggatgtttataaattacaataacgaaaacaacagattcacaaggtacaattattagctattggttaattatgataaaactacactatgaagaaatgatggagatattttagaaaaaatttttaatgataacgggaaattttcattggtatttttatatagaaggtaacatcaaaaatatttagagtggttatctctgagtagtataattattttcttaattcctccattttccacatt

SEQ ID NO: 289 - DNA, 1700 bp, Homo sapiens
  misc_feature (1)..(1700): DMR2:88190201
gggccagatgccctgggcagggggcatggagccaggagctttgggaagaacttccctctgacttagggctgcatgtggagctgagctcctcactgtgaggatggttgggagcaggtgtctggtcaggggagggtggtgttgtaggaagaaagtgagagtggttctggggatttccagctgctggcagggaggcccagctgggtgggccctgctggaagagtaggggagatagacgaggcctgggagcatttgctgagttttctcagctgtgtccccaggaaaacggggtgagcaacacagcgagggcagggccatcagcctcctggaaagaggacagggtcagcttctgtgttgggagcttactgcctttgcccaaaagagtcttccttctcagatctgccctttcagatcccacccatcagtcctccacagccggggagcctcccaggggccaagagctgggcagatgctgaggcctaccatgtgctgggcagtgttggataccaagcgagaggtaaaaattaagaaaagatgtggctggggttgatggaattccatggccgtgcccaggagctgccccatggcttgagcaatgtgctctcccatgcaggcatccaggcacctcttacccttccacccctgcactgaccttggtgtttgagaggttggtttcggggtccgcttccccactacccattcctcaaaggccactgccataaacccaggccctagccccacatctagccttcactgcgaatgctcaaccggagaagaaccagtaggaggagctgcaggcccagaaagatgcctgggttgggggctgggggtgtgtggagaagaacggtctgggtcttgaatggctgcgagagcccagggagccttctagagtcaggactattttcttctcctcagtggtgtggtcattgcaaagatttatcataaacccacaccctggagaaggcacagggcctcctgttgcaggcagaagtgtctttgcagctggggaggggacttccttccccttgaatggatgctcaggagctaaggtaaccaaggccaagaagccctgcaatagacgcagttgagaatggaggcagggcttgaactgttcaggacagggtgaaactgcgggaacctccccttgctttggccaccagggaggccatggaggtcaccctcttgccccttcccttcatctcatccctggcttggatcatcgttttcctcccaccatcccttatccaaggttccctccaaacagggacagtgcttgcttgtaaaattggctcaattcaggccatgagggcttaggtgggttgaggcgagctctgtgcaacggtcctgcaactaaaggtcactatgacctgccacctgcccaaagggccaaacacaccctccaaattttccaagcccaagataaactcagcaatgatttgtgtggccagaagagggcagcatagtacacccaaggtcctccctccaaagaggactgaccacccttcctgcccccacctcacccccagccccactcccacaccccacaggcaggcaagtctgagcttgttctctgggaattcgaggccctgcaggtcggagggcggggtggcgaggaaatggggccccaaatatatattttaaattgattgcttttcagatttcatattgggacttccctcctttaaaagaaaaaaaaaatcaca

SEQ ID NO: 290 - DNA, 2700 bp, Homo sapiens
  misc_feature (1)..(2700): DMR2:89010901
gacatacatactacatttttgtaagcatgaaattgatctttttttaagtaaaaaagaacacttagtcatgagcaagtaaaatgttctcaaaagcattttgtaatggccctaaaccaatgttattaccagtctaagctgaagaggtttactgcagattgacaaagaagatgatattgggattccttaaagcatatgacatccacagttcctgcattgtccagagctataagtctctttaatgctcgagttttaatgggattcattttattctctgcttggggacccccatattctacccccttttctgtcattgtgaattatttcccatggtccatcagcataaaagtctgactagcaatgctaaatctgattactttaaaacaattttttttcttcttctactacaggagccttgattagcataaacttgaatctttgtgttagtttgcttaggataatggcctccagcaccatccacagtgttgcaaaagacatgatctcatttttcatagctgtatattaagtattccatgttgcatatgtaccacattttctttatccaatctacaactgatgggcatttaggttgcttccacgtctttgctattaggaatagtgcagtgatgaacatacacatgcatgtgtctttatggtaaaatgatttatattccttagagtatatatccaataaagagattgctgggtcaaatgatatttctgttttaagttctttgcaaaattgccaaactgctttttataatggctgaactgatttatattcccaccagcagtgtataagcattctcttttctccataaactcactagcatctgtcatttttaagtttttaataatggccattttaactggtgtaagatggtatctcactgtggttttgatttgcatttttttaataattagtgattttgagcactttttcatacgctttttggccgttaatatgcttttttgaaaagtgtttggtcatatactttgtccactttttaaaatagtttttttttgcttgttaatttgcttaagttagttggaggttttttaaggaaaaaaccagaataagagaaaaagaggaaaatataataccacagaaaacacagactgtggtaagtattgcctcatggatatatatgtgtgtgtgtgtgtgtgtgtgtgtgtgcatatatatatatatatttatgatacatgctgtgtttatgtgtataatgatgatccagaaactaaagggtgactggtttaaggactgcctatgttgcactgaggcttccttcttttcaaattatgaactaaagggtacagcagtacttgcatgactctcaaaaattctagcagcatgagatagaggtagaggagatttactgagatagatgcattggaagctgtagaagctcgtcctgtgctgttgtggatgttgtgattgtagtagttgttgttagtacagtgggagtaaaagcagcttgaagatttacaagctcttctcttcctcatacttacaactccctctagagatgcatcagtgattgtacaggcatctctgacacctctggagaaatcttgttagctcaatccagaatcttacctgagaaatgttttgagtctcaaattatgtgaaactagggtgtagaaaaaggactagagcaagggaaaataatgttcatgcctgcacagtggttgtagacaggtaaatggggggctttataagtgtgatgatgtgccaaacctctgtcaccacggggagagaagcatcaaaccaggatcacttctggaagaatcattaggttattttagatggaaggaactgtgaattccttgccaaatagatttttaaaattcaaagctactcattacgtgttaatattatttaacttctttaaatataccatgtggtagagggcacatccactatttcaattcagggtttgtatgcctatgtgaattacaccattaaaaacacagcaaattccatattggttggggaagaatgtttgaacagtaatcaatttcgtgaagaagaggtttatgtcacagcactttccacagtattacatacaaaaacagtgaatgatctcatatccacaagaaccagcatttctcatgtgccacatatgccctcccagaaagaattgaagcctgtgacaagttgatgaaaggggtagaaaaaagaataaaaccccaaaacacagcactataaatggaaaggggaaaatcattgcagagcctatgattataaaaatacaaaaggtggatattctgagtatttttatggcaactagcttgacagaagtaacaataactttgtattataaatttacccagaacgaaatttccaattttatatctgcctgactggtgtcttgataccttatcaaaattacacaaattttcaagagattcaaaaagaataaatactcccaaacttatcatatgagatcaccatatactccagtccaaaaacaaacaaggacgtaacaaacggagaaattaaatgctggtatctcttgtgaacataaacacaaatattctgaaaaatagggaaagaaggaaaatataatcatttttatacctatatgtttgtgaacacacatggttaagtgtattacagtttttatgctaagaacacttgatatgtaattacaagttctaaaaaattgatatgaaacggaagatgtgacagttccattttcc

SEQ ID NO: 291 - DNA, 4500 bp, Homo sapiens
  misc_feature (1)..(4500): DMR2:89801501
tgattccattcaaatccatttcatgatgattccattcgtgtccattcgaagattccattcgagtccattcaatgatgattctactcgattccatttgatgattccatttgatttcattcgatgatgattccatttgatgctgttcgatgattccattagatttctttcgatgatgattccattcgattcctttcaatgattccattcaattccattcaatgatgattctattcgattccattagatgattccatttgattgcattcgatgatgattccattcacttcctgtcactgattctattcaatttcattcgatggttcctcttgattccattcatgatcattccgtttgagtccaatcgaagttttcattcgattccatttgatgattattcctttcgagtccattcgattattccattcaagtccatttaatgattccatttgattccatttgatgatgactccatccgatgccattcgatgattccatttgattcaatttggcgatgattccattcgagtccattcaatgactcccttcaattccatttgatgattttccattcgtgtccattccatgattccattcgattccattcgatgatgatttcatttgagtccatttgatgattccattcgattacattcgatgatgattccatttgtgtccattcgatgatcctattgaattccattacatgatttcacttgattcaattccatgagtccagtctattcatttccatgatgattcctttcaattcaatttcatgatatttccattagagtccattcaatgattccattcgattccattcgatgatgattccatttgtgtccattcgctgattccatttgattccaatagatgatttccttcgagtccattcaatgattccattcgaatgcattcaatgattccattctattccattcgatgatgattccattcaagtccattcaatgatgattccattcgattccatttgattccattcgatgattcatttcaattccttttgatgatgattccattcaattccattcaatgattccattcaattccattcgatgatgattccgttcaattacttttgaagatgattcctttcgattccattagatgataactacattcgatcccattgatgccaattgctttcgagtccattcgatgattccattcgagtctatttgatgattccattctagtccactcaactatgattctattcgaatccattcgaggatgattccatttgtatccattcgatgattccattcgattccattcgatgatgatttcatttgagtccatttgatgattccattcgattacattcaatgatgattccattcaatgccattagatgatgtatctattagaatccattcgatgatgaccccgttaggttccatttgatgatgattcaatttggttccattcgatgatgattccattagatttcactccatgattccattcgattcccaaatggaatcgtcatcgaatggaatcgagaggagtcatcgaatggactcgaaaggaatcatcatcgaatggaattgaatgaaatcatcacacggtttcaaatagaatcatcattgaaaggaatccaatggactcatcattgaatggaatcgtgtggattcatcatcaaatggaatcctatgcaatcgtccaatgtaatagaattgaatcatcatcgaatggaatagaatggaatcattgaatgaaatcgagtggaatcatcattgaatggaatcgaatgtaatcatcaatgaatggaatagaatggaatcatggaatggaatccaaagtaatcatcatcgaattgaacacaatggaatcattaaatggactcgaatgaaataatcatagaatggaatttaatggaatcattgaatggaattgaatggaatcatcatcaaatggaatcgaatggaatcactgaatggactcgaatggaatcatcatcaaatggaatcaaatggaatcatctaatggacttgaaaggaatcatcatcgaatgaaatcgaatggaatcacttaatagacacgaatggaatcatcatcaaatagaatcgaatggaatcattaaatggactcgaatggaatattatcacaaggaatcaaaagcaatcaacgaaaggactcaaatggaattatcaaatgggctcgaatggaatcatcgaatggactcgaatggaatcatcatacaatggactcaaatgaaaagactgaatggactcgaatggaatcattgttgaatgtaatcgaatggaatcatcaaatggaaacaaatggaatcatttaatggaattgaaaggaatcagcatcgaatgaaatcgagtggaatcatcatcgaatgaaattgaatggaatcgtcatcaaataaaatcgaatggaatcatcatcagatggaatcaattggaataatcaccgaatggaatggaatggaatcatcgaatggaatcagacgtaatcatcatcaaatggaatcgaatagaagcatcaaatgaattagaatggaatcatcatcgaacggacttgaatggaatcattgccgaagagaatcgaatggaatcatcatcgaatggaattgaatggaaacaccatcgaattgaatcaaaaggaacaatcatggaattgagtcaaatggctcatcatcgaatcgaatcgaatggaaaaatcatcgaatggaattgaatggaatctttgacaggaatcaaatggaagcatcatcgaatggaaacgaatggaatcatcattgaatggaatcgaatggaagcatcatcgaatggaaacgaatggaatcatcgtcaaaaggaatcgaagggaaacatcaaatgggatagaacggagtcatggaatgtaatcgagtggaatcatcaaatggattcaaacggaatgatcattgaaggtaatcgaatggaatcatagaatggaattgaatggaatcctcatcaaatgcaatcaaatgaaatgattgaatggatatgaatggaatcatcatcgaatggaatcgaatggaatcaaatggaatagaatggaatcatcattgaatggaattgaatggaatcatcattaaatggaattgaatggaatcatcatcgaatggaatctaatggaatcatcatctaatgtaatcaaatggaatcatcaacgaatggaatcaaattgaaaaatcaaatggaatctatggggatcatcatcgaatggaaccgaatgcagtcgtcatcgaatggaatcgaatggaatcatcaccgcatggattgaatggaatcatcatcaaaaggaatcgaagggaatcattgaattgaatcgaacagaatcatcgaacagaatcgaatttaatcctcatcaaacggaatcaaatggaaataaaatcgaatggaatcaaatggaatcatcgaatggactagaatagaataatcgaatgaaatcaaatggaatcattgaatggaattgaatggaatcatcaaaaagagtcgaatggaatcttcatcaaatgaaatcgtttggagtcattgaatggaattgaatggaatcatcgaatgggctcgaatggaatcatcatcgaatggaatcgaatgggatcatcatcaaaaggaatcgaatggaatcattgaatggacccgaatgtaatgatgaaatggacttgaatagaatcatcaaatggaatcgaatggaatcattgaatggactcgaatgaaatcactgaatggactctaatgaaatcactgaatggactcgaaaggaatcatcatcaaatggaattgaatggaatcctcgaatggaataatcaaatggaatcgaatggaatcatcatctaatggtatcaaatggaatcattgaatggaatcgaaggcaatcatcattgaatggaatcaaatggaatcatcgaatgaattcgaatggaatcatcatcaagtggaattgagtggaataatagaagggaatcaaatggaataaatgtcaaattgaatggaatggaatcaatgaatggaattgaatggaatcaccaaagaatgcaatggaatggaaacatcatcgaatggaatcaaatagaatcatcaaatggactcgaatggaatcatcaatgaatggattcgtgtgaaataacctaatgggcatgaatagaatcatcatcgaatggaatcaaatggaatcatctaacgtactcgaaaggaatcatcattgaatggaatagaatggaatcatcgaatggaactgaacagaatcatcattgtatggaattgagtggaatcatcgaatggactcgaatgtaatcatcagagaatggaatcaaatggaatcatcagatggactcgaagtgaatgatcatcgaatggattcgaatggaatcatcgatttgactcgaatggaatcatcatcaaatataatcaaaagcaatcatcaaatggattcgaatagaatcatcgaatgggctggaattgaatcatcattgaatgaaatcaaatggaatcatcg

SEQ ID NO: 292 - DNA, 900 bp, Homo sapiens
  misc_feature (1)..(900): DMR2:89967301
tccaaaaattagtgaatctacattaatgtctctaattacaatccacatctacagtttctccttttttatatttgtagctttttttccaaactgagaatcttggctgtaattattcataccatatttacttaaatgatcaaacattttgtgtgacaccaatctcccactgtccctgtcacctaaactttccttgcggacaacttccctcttatgcctcacacaccttcattagtcttgatactccgtgccagtccaccgtgaactttgcatccctgcatagctgccctttcccccccggggctctgacattagcaacagtgtcctccacccttgtgactgtcctgctcatcctcatccagctgtgatgtcctgcataagtgggatgaggggtcttgcatcctgcacacccaggtagggatacttgtctctgctaactatagcttcaacgcacaggtaggctttcctctacaccccacaacacgggtgcactttctatattgtgtaggctcagtatctcatacaattccctggctttttgttgcatagttttctttctgaacctgctcggatcaagtgccctaaacccagtcattaagaactgttttctcttaggagctggaagagattggtgatttggaaatgtgcaggtataagaaacagagtagtcacagggatagagggtgacaacttggtttagaggacacctcagcttctgaaggggaatggcttggataagagaaataaaaggcataaataaaattcagggagcacagggaaatatctagcatgagactgtaggatggcatacagagctagaatatagctgagaactttcagaagtaaagggagaaaatttatcatgttggctggcccagctgaaagaggtaggaaagaacattc

SEQ ID NO: 293 - DNA, 23700 bp, Homo sapiens
  misc_feature (1)..(23700): DMR2:90378801
agaaaattttgaaaaatgtaaaatgtggacagaatgatgaagagacatggaagatacagtgagaaagtgtagcatgtgtttagagagcgttctcatagaacaagggaactgggaagggacaatatgtgttggtattttgtctgaaagttccctagacttttgtaagacactgatctgcatattcaaaaactccatgcatgctaagcaagctacaatggagatacacctacacctatgtatctcctagagaaatagtaaacacccatgaagggaaaaatatttcaattaccactagaaaaatgaaattacttttaatcataccgaaatctgaaaaaatgaaaggtaaaataaacaatattatttgttcagaataataatgccattctgaatttctaaacgaagaaaaatattcatcaacctgtggctaaataacatatttagagaaaaaaacaaaacgccaccagcagaattccactaaagaaactaaagagaaactctgaaaatatgcttcagaaaggttgaagttctgaaatcaaagaatgaacacagagtaaaatttattgtaaacaaacagatagaacaaataagaaactggatgttgaaacaaaaatatatttaaaattagataagcactgcaatatgtatgataaaacgaaaattattagggctgaagtactcaaagaaatcttaattgtatgacaagtgcagaaaagtgagtatgactttgcaacaccttttcttcttcgaatggaaaggaaaggaatggaatagaatggaatggaatggaatggaatggaatagaatggaatggaatggaatggaatggaatggaatggaatcaaatggaattgaatggagaggaattgaatggaatgggagatgagattgtgccattgtgttacacaatgggtgaaacaatgagccactctcgaaagaaaggaatggaatggaaagcaagggagtggagtggagaggagaggagtggaatggagtggaatggaatcagatgtaatggaatgtagtggaatggaatggaatggaatcatcatcgaatggaatagaatggaaatatcatcgaatggaatcaagtggaaacaccatcgaatggaaacgaatggagtcatcattgaatggaatcaaaaggcatcatcatccaaaggacttgaatggaataatcatcgaatggaatcggatggaataatcatcgaatggaatcagatggaataatcactgaatggaatcgaatggaatcatcatcaaatggaatcgaatgaaatcatcattgaagggaatcgaatggaatcatcaacaaaagtaatcgaatggaatcatcgaatggaatctaaaggaaccatcatcaaatggaactgaaaggaatcatcattaaatggaaccgaacacagtaatcagcaaatggaatcgaatggactcatgatcaaatggaatcaaatggaatcatcatcaaatggaatcgaatggaatcatcatcgtatggaatcaaattgaatcaatgaattgaatcgaatggaaagatcaccgaaaggaattgaagggaatcatcgaatgggatcaaatggaatcatcgaagggaaacgaatggaatcatcgaatggattcggatggattcatcagtgaatggaattgaatggaatcatggaatagactcgaatggaatcatcattaaatggaatacaatggaatcatcgaatggacatgaatagaatcatcattgaatggaatccaatggaatcatcatcgagtggaatctactggaatcattgaatagactcgaatggaataatcgaatgggcttgagtggaatcatcatcaaatggaatcgaatggaatcatcaaatggactcgaatggaatcatcgtcaaatggaatcgattggaatcatcatcaaatggaatcgaatggaatcctcatcgaatggaatcgaacggaatcatcatcgaatggaatcaccaaattgaatcgaatggaatgatcatcaaagacaatcgaagggaaacatcgaatgggattgaacggagtcatcgaatggaatcgataggaatcatcgaatggattcaaatggaatcatcatcgaatggaaacgaacggaatcatcgaatggacacggatggaatcatcatcaaataggattgaatggaatcatcgaatggcatcgaatggaatcaccattgaatggaatcgaacggaatcatcgaatggcatcgaatggaatcatcatcgaataaaatcaaatggaataatcgaatgtactcgaatggaatcatcaaatggatttgagaggaatcatcatcgaatggaattgaacagaatcatcaaatggactcgaatggaatcctcattgaatggaatcgaatggaatcattgaatggagtcgaatggaatcatcagcaaatagaatcgaatggaatcattgaagatcaacgaatgaaatcatcatcgaatggagtcgaatggaatcatcaaatgaactcgaatgcaatcatcatagaatggaatccaatggaatctttgaatggacctgaatggaatcatcatcgaatgcaaacgaatggaatcatcatcaaatggaatcacatggaatcatcaaatggaaaagaattgaataatcatagaaaggaattgaatagaatcatcgaatgaaaccgcatggaatcttcatcgaatggaatcgaatggaatcatcatcgaatgcaattgaatggaatcatcatcgaatggaatcgaatggaatcaccaacgaatggaattgaaaggaatcatcatcgaatggaaccaaatagaatcatcaaatggactcgaaaggaatcatcgaatggactcgaatggagttgtcatcgaatggaatcaaatggaatcatcgaacggaattgaatcgaatcatcattgaatgaaatcaaatggaatcatcgaatggactcgaatggaagcaatatcaaatggaatcgaaaggaatcatggaatgcattcaaagggaacaatcaaatggactcaaatggaatcaacatcaagtggaatcgaaaggaatcatcgaatggaccggaacggaatcatcatcgaatggaatcgaatggaatcatcgaatggacttgaatggaatcactatctaatggaaccgaatggaatcatcatggaatggaaccggaaggagtcatcatcaaatggaatccaatgaaatcattgaatggactcgaatggaatcatcgtcaacgggaattgaatggaatcatcgaacggtctcgaatggaatcatcggagaatggaatcgaatggaattatcaaacggactcgaatggaataaactttgaatggaaacgaagggaatcatcaaatggaatcgaatgcaatcatcgaacggaatcgaatggaatcatcgaatggaatccaatggaatcaccattgaatggactcgaatggaatcatcattgaatggaatcgaatggaatcatcgaatggactcgaatggaaacatcatcgattggaatcaaatggaatcatcgaaaggaatcgaaaggaatcatcatcaactgtaatgaacaggaatcactgaattgaatcgaatggaatcgtcatcaaaaatattcgaatagaataatcaaatggaatcaaatgcaatcaacatcaagtggaatcgaatggaatcctagaatgacatcgaatggaatcctcatcgaatggaatcaaagggaatcaatatcgaatggaatcgaaagcaatcactgaatggacttgaatacaatcatcaaatggatttgaagggaatactcattgaatggaatagaacaaaaacattgaatggacacgaatggaatcatcatcgaatggaatcaaatggagtcatcaaatggactcgaatggaatcatcatcaaatgggatcatcatcaaatggaatcgaatggagtcatcgaatggacacgaatgaatgaacaaatggactcgaatggaaacatcaaatagaatcgaatggaatcatcgaaaggaattgaatgcaatgattgaatggactcgaatggaatcatctaaaggacacgaatgaatggaatcattgaatggactcgaatggaatcatcgaatggactcaaatggaatcatcatcaaatggaatcgaatggaatcatcgaatggactcgaatggaatcatcccatggaatcaaaccgaatcgtcatcgaatggaatcgaatggaatcatcgaatggaattgaaggcaatcatcatcgaatggaatcgaatggaatcatcaacaaatggaatcaagtggaaggaatcatcaaatggaatcaaaaggaatcattgttgaatggaatggaatggaatcattgaatggaattgaatgggatcaccaatgaacggaatcaaatggaatcatcttctaatggaatcgtaaggaatcatcaaatacactcgaatggaatcatcatcgaatggaatcatgtggaatcatcgaatgaactggaaatgaatcataatcaaacgcaattaaaatgaatcatcatcgaaaggaatcacatgttatcatcatcgaatggaatcatacggaaacatcacagaatggaattgaatggaatcatcagctagactcgaatggaatcatcaaatgtactccaagggacgcgtcaaatggactcgaacggaatcatcatcgaatggaatcgaacgggatcatcaaaaggactcgaatcaaatcttcaaaaggactcaaagggaatcattgtagaatggaaatgaatagagtcatcagacagcctcgaatggaagcatcattgaatggaattgattggaaacatcgaattcactcgaatggaatgatcatctgatgcaattgaatggaatcaccgaatggacacaaatggaatcatcatcaaatggaatccattggaacgatcaaatggaatcgcatggaattatcaaatggaatcgaatggaatcatctttgaatggaatccaatggaatcatcgaatggaatcgaatgcaatcatcattgaatggaatcgaatggaatcatcgaatggtatccaaaggaatcaccattgaatgccctcgcatggaatcatcatcatatagagtagaaaggaatcattgaatggactggaatggatccatcattgaatggaatcaccaaatggaatcaaatggaatcatcatcaaatgaaatcaaatggaatcatcaaatggaatcgaatggaatcatcattgaatggattcgaatagaatctttgaatgaaattgaatggaatcagcatgaaatggaatctaaaggaatcatagaatggtatcgaatggaatcatcatcgaatggaatggaatggaatggaatggaatggaatcagcatcgaatggaatcaaaagcaatcattcaatggactctaatagaatcagcgaatagacttgaatgtaatcatcatcgagtggagaagaatggaatcatcgaatggacacgaatggaatcatcatcgaatggaatcaaatggaatcgtcatcgaatggaatcgtatggaatcatctaatggacacgaatggaatcatcatcgaattgaatagaatgcaatcatcatcaaatggaatcgaatggaatcatcatcaaatagaatcgaatggaatcatcaaatggaatcgaatggagtcattgtctaatgcaatcgaatgaaatcatagaatggaatcccatggaatcaacatagaatggaatcgattggaatcattatcaaatagaattgaatggaatcactgaatggaatcctcatcaaatggactccaacggaatcatcgaattgactctaatggaatcatcactgaatggaatagaatggaataatcaaatggaaacgaatggaatcatcatcgaatggaatcgaatggaatcatcgaatggaatcgaatggaatcatggtcgaacggaaaataagggaatcatcaagtggacacgaatggaatcaacatctaatggaatggaatggaatcatcaaatggaatggaatggaatcatcatcgaatggaatcaaatggaatcatcaaacggaatcaaatggaatcatcaatgaatggaatcaaatggtatcatggaatggaattgaatggaatcgtctttgagtggaatctaaaggaatcaccgaatggactccaatcatcggatggaataaagtggaatcatcgagtgtagttgaatgcaatcatcatcgaatggaactgaatggaatcaacgaatggaatagaaaggaatcgtagaagggacgcgaatggaatcatcattgaatggaatcaaatggaatcatcatggaatggaattgaatggaattatcgaatggactcgaaaggaattgtgctcgaatggaatctaatggaatcatcaaatggactcaaatggaatcatcatcgaatgaaatcatatggaatcatcgaatgcaactgaatggaatcattgagtggacttgaaaggaattattatggaatggaattgaatggaatcattgaatggacttgaaaggaatcatcatcaagtggaatcgaatggaatcattgaatggactcgaattgaatctttgaatggaatcgaatggaatcgaatggaatcatcattgaatggagtcaaatggaatcatcatcaaatggaattgaatggaatcttcattgaatcgactcgaaaggaatcatcatcaattggaatctaatcgaatcatcaatgaagggaatcgaatggaagcatcatcgaatggaatcgaatggaatcatcaacaagtggaaacgaatgaaatcattgaatggaatccaatggtgtcatcgaatggacacgaaaggaatcatcgaatggaatcaaatggaatcaccatcgaatggaatccaatggaatcacgatcgaatggaatgttatgaaatcatctcatggaatcgaagggaatcatcatcgaatggaatcgaatggaatcattgaatgaaaaggaaaggaatcaccatcgaatggaatgttatggaatcttctaatggactggaaggcaatcatcatcgaatggcatcgaatggaatcatcgactggaaaagaatggaatcatcatcgaatggaaatgaatagaatcacagaatgaaatcgaatggaatcatcatcgaatggagtctaatggaataatcatcgaatggaatagaatggaatcatcgagtggacacgaatggaatcatcattgaatggaatcgaatagaatcatcatatggacttgaatggaaacaacatcgaatggaatcgaatttagtcattgaattgcattgagtggaatcatcattgaatggagtctaaggaaatcatcgaacggactcgagtggaatcatcgaatggactcgaggggaatcatcatcgaatggaatcgactgtaatcatcgattggactcgaatagaatcatcattgaatggaatcgaatggaatcaacgaatggactcgaatagaatcatcatcgaatggaatcgaaatcaaagaatggactctaatggagtcatcatcaaatggaatctaatagaatcatctaatggacctgaaaggaatcatcattgaatggaatggaatggaatcatcgaatggactcgaatggaatcatcatcgaatggaatctaatggaatcattgaatggactcgaatggaataatcgaatgggcttgagtggaatcatcatcaaatggaatcgaatggaatcatcaaatggactcgaatggaaacatagtcaaatggaatcgaatggaatcatcatcaaatggaatcgaatggaatcctcatcgaatggaatcgaacggaatcatcatggaatggaatcacaaaattgaatcgaatggaatgatcatcaaagacaatcgaagggaaacatcgaatgggattgaacggagtcatcgaatggaatcgataggaatcatcgaatggattcaaatggaatcatcatcgaatggaaacgaacggaatcatcgaatggacaggaatggaatcatcatcaaataggattgaatggaatcatccaatggcatcgaatggaatcaccattgaatggaatcgaatggaatcatcgaatggcatcgaatggaatcgtcatcgaataaaatcaaatggaataatcgaatgtactcgaatggaatcatcaaatggatttgagaggaatcatcatcgaatggaattgaacagaatcatcaaaaggactcgaatggaatcctcattgaatggaatcgaatggaatcgttgaatggagtcgaatggaatcatcagcaaatggaatcgaatggaatcattgaatatcaacgaatggagtcatcatcgaatggagtcgaatggaatcatcaaatgaactcgaatgcaatcatcatagaatggaatcgaatggaatctttgaatggacctgaatggaatcatcatcgaatgcaaacgaatggaatcatcatcaaatggaatcacatggaatcatcaaatggaaaagaattgaataatcatagaaaggaattgaatggaatcatcgaatgaaaccgaatggaatcatcatcgaatgcaatcgaatggaatcatcatcgaatggaatcgaatggaatcaccaacgaatggaattcaaaggaatcatcatcgaatggaaccaaatagaatcatcaaatggactcgaaaggaatcatcgaatggactcgaatggagttgtcatcgaatggagtcaaatggaatcatcggacggaattgaatcgaatcatcattgaatgaaatcgaatggaatcatcgaatggactcgaatggaagcaatatcaaatggaatcgaaaggaatcatggaatgcagtcaaagggaataatcaaatggactcaaatggaatcaacatcaagtttaatcgaaaggaaacatcgaatggaccggaatggaatcatcatcgaatggaatcgaatggaatcatcgaatggacttgaatggaatcactatctaatggaaccgaatggaatcatcatggaatggaaccggaaggagtcatcatcaaatggaatccaatgaaatcattgaatggactcgaatggaatcatcatcaactggaattgaatggaatcatcgaacggactccagtggaatcctcggagaatggaatcgaatggaattatcaaatggactcgaatggaataaactttgaatggaatcgaagggaatcatcaaatggaatcgaatgctttcatcgaacggaatcgaatggcatcaccgaatggaatccaatggaatcaccattgaatggactcgaatggaatcatcattgaatggaatcgaatggaatcatcgaatggactcgaatggaatcatcatcgattggaatcaattggaatcatcgaatggaatcgaaaggaatcatcatcaactgtaatgaactggaatcactgaatggaatcgaatggaatcgtcatcaaaattatcgaatagaataatcaaatggaatcaaatgcaatcaacatcaaatggaatcgaatggaatcctagaatgacatcgaatggaatcctcatcgaatggaatcaaagggaatcaatatcgaatggaatcgaaagcaatcactgaatggacttgaatacaatcatcaaatggatttgaagggaatcctcattgagtggaatagaacaaaaacattgaatggacacgaatggaatcaacatcgaatggaatcaaatggagtcatcaaatggactccaatggaatcatcatcaaatgggatcatcatcaaatgtaatcgaatggagtcatcgaatggacacgaatgaatgaacaaatggactcgaatggaaacatcaaatagaatcgaatggaatcatcgaaaggaattgaatggaattattgaatggactcgaatggaatcatataatggacacgaatggaataatcataaaatggaatcgaatggaatcatcaaatagactcgaatgaatggaatcattgaatagactcgaatggaatcatcgaatggactcaaatggaatcatcatcaaatggaatcgaatggaatcatcgaatggactcgaatggaatcatcaaatggaatcaaaccgaatcgtcatcgaatggaatcgaatggaatcatcgaatggaattgaaggcaatcaccatcgaatggaatcgaatggaatcatcatcaaatcgaatcaagcggaaggaatcatcaaatggaatcaaatggaatcattgttgaatggaatggaatggaatcgttgaatggaattgaatgggatcaccaatgaacggaatcaaatggaatcatcttctaatggaatcgaaaggaatcatcaaatacactcgaatggaaatatcatcgaatggaatcatgtggaatcgtcgaatgaactggaaatgaatcataatcaaatgcaattaaaatgaatcatcattgaaaggaaacacatggaatcatcatcgaatggaatcatacggaaacatcacagaatggaattgaatggaatcatcagttggactcgaatggactcatcaaatgtcctcgaagggacgcgtcaaatggactcgaacggaatcatcctcgaatggaatcgaacgagatcatcgaaaggactcgaatcaaatcttcaaaaggactcaaagggaatcattgtagaatggaaatgaatagagtcatcagacagcctcgaatggaagcatcattgaatggaattgattccaaacatcgaattcactcgaatggaatcatcatcgtatggaattcaatggaatcatcgaatggacacaaatagaatcatcatcaaatggaatccattggaacgatcgaatggaatcgcatggaattatcaaatggaatcgaatggaatcatctttggatggaatcaaatggaatcatcgaatggaatcgaatgcaatcatcattgaatagaatcgaatggaatcatgcaatggtatccaaaggaatcaacattgaatgacctcgcatggaatcatcatcaaatagagtagaaaggaatcattgaatggactcgaatggaaccatcattgaatggaatcaccaaatggaatcaaatggaatcatcatcaaatgaaatcaaatggaatcatcaaatggaatcgaatggaatcatcattgaatggattcgaatagaatctttcaatgaaattgaatggaatcagcatgaaatggaatctaaaggaatcatagaatggtatcgaatggaatcatcatcgaatggaatggaatggaatggaatggaatggaatcagcatcgaatggaatcaaaagcaatcattcaatggactctaatagaatcatcgaatagacttgaatgtaatcatcatcgaatggagaagaatggaatcatcatcaaatggaatcgagtggaatcatataatggacccgaatggaatcatcattcaatggaatagaatggaatcgtcatcgaatggaatcgtatggaatcatctaatggacacgaatggaatcatcatcgaattgaatagaatgcaatcatcatcaaatggaatcgaatggaatcatcatcaaatagaatcgaatggaatcatcaaatggaatcgaatggagtcattgtctaatgcaatcgaaagaaatcatagaatggaatcccatggaatcaacatcgaatggaatcgatgggaatcattatcaaatagaattgaatggaatcactgaatggaatcatcatcaaatggactccaatggaatcatcgaattgacactaatggtatcatcattgaatggaatagaatggaataatcaaatggaaacgaatggaatcatcatcgaatggaatcgaatggtatcatcaaatgcacttgaatggaatcatcaatgaatggaatcgaatggtataatcgaatggaatcaaacggaatcatcttcgagtggaaactaaaggaatcgccaaatggactccaatggaataatcatcgtatggaatcgagtggaatcatcgaatgtactcgaatggaatcatcgaatgtactcgaatggaatcatcgaatggaatcgaatggaatcatggtcgaacggaaaagaatggaatcatcaagcggacacgaatggaatcaacatctgatggaatggaatggaatcatcaaatggaatggaatggaatcatcatcgaatggaataaaatggaatcatcaaatggaatcaaatggaatcatcaatgaatggaatcgaatggtatcatggaatggaattgaatggaatcgtctttgagtgcaatgtaaaggaatcaccgaatggactccaatcgtcggatggaatcgagtggaatcatcgaatgtagtcgaatgcaatcatcatcgaatggaattgaatggaatcaacgaatggaatagaaaggaatcgtagaatggactcgaatggaatcatcattgaatggaatcaaatggaatcatcatggaatggaattgaatggaatcatcgaatggacttgaaaggaattatgctcgaatggaatctaatgtaatcatcaaatggactcaaatggaatcatcatcgaatgaaaacgtatggaatcatagaatgcaactgaatggaatcattgaatggacttgtaaggaattattatcgaatggaattgaatggaatcattgaatggacttgaaaggaatcatcatcaaatggaatcgaatttaatcattgaatggactcgaattgaatctttgaatggaatcgaatggaatcatcattgaatgtagtcaaatggaatcatcatcaaatggaattgaatggaatcttcattgaatggactcgaatggaatcatcatcaaatggaatctaatcgaatcatcaatgaagggaatcgactggaatcatcatcgaatggaatcgaaaggaatcatcaacaagtggatacgaatgaagtcatcgaatggaattcaatggtgtcatcgaatggacatgaaaggaataatcgaaacgaatcaaatggaataaccatcgaatggaatccaaaggaatcaccatcgaatggaatgttatgaaatcatctcatggaatccaagggaatcatcatcgaatggaatcgaatgtaatcattgaatgaaatggaaaggaatcaccatcgaatggaatgttatggaatcttctaatggactcgaagggaatcatcatcgaatggaatcgaatggaaacattgaatgcaattgaatggaatcatcgaatggaatctgaatgggatcatcaatgaatggaatcaaatggaatcatctaatggacgcgaatggaatcatcatcgaatgcaatgaaatgtaattcaatcgaatggacatgaatggaatcatcattgaatggaatcaaatggaatcctcatcgaatggaatcgaatggaatcatcaaatggaatagaatggagtcatcgtcgaatgtaatcgaatgtaatcatcgaatggcatcgaatggaatcatcgactggaaaagaatggaatcatcatcgaatggaaatgaatagaatcacagaatgaaatcgaatggaatcatcatggaatggagtctaatggaataatcatcgaatggaatagaatggaatcttcgagtggacacgaatggaatcatcattgaatggaatcgaatagaatcatcaaatggacttgaatggaaacaacatcgaatggaatcgaatttagtcactgaattgcattgagtggaatcatcattgaatggaatctaaggaaatcatcgaacggactcgagtggaatattcgaatggacacgaggggaatcatcatcgaatggaattgactgtaatcatcgattggactcgaatggaatcatgattgaatggaatcgaatggaatcaacgaatggactccaatagaatcatcatcgaatggaatcgaatggaatcaaagaatggactctaatggagtcatcatcaaatggaatctaatggaatcatctaatggacctgaaaggaatcatcattgaatggaatcgaatggaatcatcgaatggactcgaatggagtcatcatcgaatggaatctaatggaatcattgaatggactcgaatggaataatcgaatgggcttgagtggaatcatcatcaaatggaatcgaatggaatcatcaaatggactcgaatggaatcatcgtcaaatggaatcgaatggaatcatcattcaatggaatcgaatggaatcctcatcgaatggaatcgaacggaatcatcatggaatggaatcaccaaattgaatcgaatggaatgatcatcaaagacaatcgaagggaaacatcgaatgggattgaacagagtcatcgaatggaatcgataggaatcatcgaatagattcaaatggaatcatcatcgaatggaaacgaacggaatcatcgaatggacacggatggaatcatcatcaaataagactgaatggaatcatcgaatggcatcgaatggaatcaccattgaatggaatcgaatggaatcatcgaatggcatcgaatggaatcattatcgaataaaatcaaatggaataatcgaatgtactcgaatggaatcatcaaatgtatttgagaggaatcatcatcgaatggaattgaacagaatcatcaaaaggactcgaatggaatcctcattgaatggaatcgaatggaatcgttgaatggagtcgaatggaatcatcagcaaatggaatcgaatggaatcattgaatatcaacgaatggaatcatcatcgaatgcagtcgaatggaatcatcaaatgaactcgaatgcaatcatcatagaatggaatcgaatggaatctttgaatggacctgaatggaatcatcatcgaatgcaaacgaatggaatcatcatcaagtggaatcacatggaatcatcaaatggaaaagaattgaatactcatagaaaggaattgaatagaatcatcgaatgaaaccgaatggaatcatcatcgaatggaatcgaatggaatcatcatcgaatgcaattgaatggaatcatcatcgaatggaatcgaatggaatcaccaacgaatggaattcaaaggaatcatcatcgaatggaaccaaatagaatcatcaaatggactcgaaaggaatcatcgaatgggctcgaatggagttgtcatcaaatggaatcaaatggaatcatcaaacggaattgaatcgagtcatcattgaatgaaatcaaatggaatcatcgaatggactcgagtggaagcaatatcaaatggaatcgaaaggaatcatggaatgcattcaaagggaataatcaaatggactccaatggaatcaaaatcaagtggaatcgaatggaatcatcgaatggacttgaatggaatcactatctaatggaaccgaatggaatcatcatggaatggaaccggaaggagtcattatcaaatggaatccaatgaaatcattgaatggactcgaatggaatcatcatcaactggaattgaatggaatcatcgaacggacaccagtggaatcatcggagaatggaatcgaatggaattatcaaacggactcgaatggaataaactttgaatggaatcgaagggaatcatcaaatggaatcgaatgcaatcatcgaacagaatcgaatggcatcaccaaatggaatccaatagaatcaccattgaatggactcgaatggaatcatcattgaatggaatagaatggaatcgtcatcgaattgaatagaatgcaatcatcatcaaatggaatcgaatggaatcatcatcactgaatggaatctaaggaaatcatcgaatggactcgagtggaatcatcgaatggactcgaggggaatcatcattgaatggaatcgacagtaatcaacgaatggactcgaacagaatcatcatcgaatggaatcgaatggaatcaaagaatggactctaatggagtcatcatctaatggaatctaatgggatcatctaatggacctgaaaggaatcatcattgaatggaatcgaatggaatcatcgaatggactcgaatggaatcatcatcgaatggaatctaatggaatcattgaatggactcgaatggaataatcgaatgggcttgagtggaatcatcatcaaatggaatcgaatggaatcatcaaatggactcgaatggaatcatcgtcaaatggaatcgaatggaatcatcatcaaatggaatcgaagggaatcctcatcgaatggaatcgaacggaatcgtcatcgaatggtatcaccaaattgaatcgaatggaatgatcgtcaaagacaatcgaattgaaacatcgaacgggattgaacggagtcatcgaatggaatcgataggaaacatcgaaaggattcaaatggactcatcatcgaatggaatcaaatggagtcatccaatggactcgaatggaatcatcatgaaatgggatcattatcaaatggaatcgaatggagtcatcgaatggacacgaatgaatgaacaaatggactcgaatggaaacatcaaatagaatcgaatggaatcatcaaaaggaattgaatggaattattgaatggactcgaatggaatcatctaatggacacgaatggaataatcataaaatgcaatcgaatggaatcatcaaatggactcgaatgaatggaatcattaaatggactcgaatggaatcatcgaatggactcaaatggaatcatcatcaaatggaatcgaatggaatcatcgaatggactcgaatggaatcatcaaatggaatcaaaccgaatcgtcatcgaatggaatcgaatggaatcatcgaatggaattgaaggcaatcatcatcgaatggaatcgaatggaatcatcatcaaatggaatcaagcggaaggaatcatcaaatggaatcaaatggaatcattgttgaatggaatggaatggaatcattgaatggaattgaatgggatcaccaatgaacggaatcaaatggaatcatcttctaatggaatcgaaaggaatcatcaaatacactcgaatggaatcatcatcgaatggaatcgtgtggaatcgtcgaatgaactggaaatgaatcctaatcaaatgcaattaaaatgaatcatcatcgaaaggaatcacatggaatcatcatcgaatggaatcatacggaaacatcacagaatggaattgaatggaatcatcagttggactcgaatggaatcatcaaatgtactcgaagggacgcgtcaaatggactcgaaaggaatcatcatcgaatggaatcgaatgggatcatcgaaaggactagaatcaaatcttcaaaaggactcaaagggaatcattgtagaatggaaatgaatagagtcatcagacagcctcgaatttaagcatcattgaatggaattgattggaaacatcgaattcactcgaatggaaccatcatctgatggaattgaatggaatcatcgaatagacacaaatggaatcatcatcaaattgaatccattggaacgatcgaatggaatcgcatggaattatcaaatggaatcgaatggaatcatctttgaatggaatgaaacggaatcatcgaatggaatcgaatgcaatcatcattgaatgcaatcgaatggaatcattgaatggtatccaaaggaatcaccattgaatgccctcgcatggaatcatcatcaaatagagtagaaaggaatcattgaatggactcgaatggaaccatcattgaatggaatcaccaaatggaatcaaatggaaacatcatcaaatgaaatcaaatggaatcatcaaatggaatctaatggaatcatcattgaatggatttgaatagaatctttgaatgaaattgaatggaatcagcatgaaatggaatctaaaggaatcataaaatggtatcgaatggaatcatcatcgaatggaatggagtggaatggaatggaatggaatcagcatcgaatggaatcaaaagcaatcattcaatggactctaatagaatcatcgaatagacttgaatgtaatcatcatcgaatggagaagaatgaaatcatcgaatggacccgaatggaatcatcatcaaaaggaatcgaatggaatcatataattgacccgaatggaatcatcattgaatggaatagaatggaatcgtcatcgaatggaatcgtatggaatcatctaatggacccgaatggaatcatcatcgaattgaatagaatgcaatcatcatcaaatggaatcgaatggaatcatcatgaaatagaatcaaatggaatcatcaattggaatcgaatggagtcattgtctaatgcaaccgaatgaaaccatagaatggaataccatggaatcagcatcgaatggaatcgattggaatcattatcaaatagaattgaatggaatcactgaatggaatcatcatcaaatggactccaacggaatcatcgaattgactctaatggaatcatcactgaatggaatggaaatgaataatcaagtggaaacgaatggaatcatcatcaaatggaatcgaatgttatcatcaaatgcacttgaatggaatcatgaatgaatggaatcgaatggtataatcgaatggaatcaaattgaatcatcttcgagtggaacctaaaggaatcgccaaatggactccaatggaataatcgtcgtatggaatcgagtggaatcatcgaatatactcgaatggaatcatcgaatgcaatcgaatggaatcatcgaatgtactcgaatggaatcatggtcgaacggaaaagaatggaatcatcaagtggacacgaatggaatcaacatctaatggaatggaatggaatcatcaaatggaatggaatggaatcatcatcgaatggaataaaatggaatcatcaaatggaatcaaatggaatcatcaatgaatggaatcgaatggtatcatggaatggaattgaatggaatcgtctttgagtggaatctaaaggaatcaccgaatggactccaatcatcagatggaatcgagtggaatcattgaatgtcgtcgaatgcaatcatcatcgaatggaattgaatggaatcaacgaatggaatagaaaggaatcatagaatggactcgaatggaatcatcattgaatggaatgaaatggaatcatcatggaatggaattgaatggaatcatcgaatggactcgaaaggaattatgctcgaatggaatctaatggaaacatcaaatggactcaaatggaatcatcatcgaatgaaatcgtatggaatcatcgaatgcaactgaatggaatcattgaatggacttgagaggaattattatctaatggaattgaatggaatcattgaatggacttgaaaggaatcatcatcaagtggaatcgaatggaatcattgaatggactcgaattgaatctttgaatggaatcgaatggaatcatcattgaatggagtcaaatggaatcatcatcaaatggaattgaatggaatcttcattgaatggaatcgaatggaatcatcatcaaatggaatctaatcgaatcatcaatgaagggaatcgaatggaatcatcatcgaatggaatcgaatggaatcatcaacaagtggaaacgaatgaaatcatcgaatggaatccaatggtgtcatcgaatggacacgaaaggaatcatcgaatggaatcaaatggaatcaccatcgaatgaaatcaaatggaatcactatcgaatggtatgttatgaaattatctcatggactcgaagggaatcatcatcgaatggaatcgaatggaatcattgaatgaaatggaaaggaatcaccatcgaatggaatgttatggaatcttctaatggactcgaagggaatcatcatcgaatggaatcgaatggaatcattgaatgcaattgaatggaatcatcaaatggaatcgaatggaatcatcaaatggaatctgaatggaatcatcaatgaatggaatcaaatggaatcatctaatggacgtgaatggaatcatcatcgaaagcaatgaaatgtaattcaatcgaatggacatgaatggaatcatcattgaatggaatcaaatggaatcctcatcgaatggaatcgaatggaatcatcaaatggaatagaatggagtcatcgtcgaatgtaatcgaatgtaatcatcgaatggcatcgaatggaatcgtcgactggaaaagaatggaatcatcatcgaatggaaatgaatagattcacagaatgaaatcgaatggaatcatcatcgaatggagtctaatggaataatcatcgaatggaatagaatggaatcatcgagtggacacgaatgtaaccatcactgaattgaatcgaatagaatcatcaaatggaattgaacggaaacaacatcgaatggaatcgaatttagtcattgaattgcattgagtggaatcatcattgaatggaatctaaggaaatcatcgaatggactcgagtggaatcatcgaatggactcgaggggaatcatcatcgaatggaaacgactgtaatcatcaattggacttgaatggaatcataattgaatggaatcgaatggaatcaacgaatggactcgaatagaatcatcatcgaatggaatcgaatggaatcaaagaatggacactaatggagtcatcatcaaatagaatctaatggaatcatctaatggacctgaaaggaatcatcattgaatggaatacaatggaatcatcgagtgaactcgaatggaatcatcatcgaatggaatctaatggaatcattgaatggactcgaatggaataagcgaatgggcttgagtggaatcatcatcaaatgcaatcgaatgtaatcatcaaatggactcgaatggaatcatcgtcaaatggaatcgaatgtaatcatcatcaaatggaaccgaatggaatcctcatcgaatggaatcgaaaggaatcatcatggaatggaatcaccaaattgaatcgaatggaatgatcatcaaagacaatcgaaggggaacaccgaatgggattgaacggagtcatcgaatggaatagataggaatcatcgaatggattcaaatggaatcatcatcgaatggaaagaacggaatcatcgaatggacacgaatggaatcatcatcaaataggattgaatggaatcatcgaatggcatcgaatggaatcaccattgaatggaatcgaatggaatcatcgaatggcatcgaatggaatcatcatcgaataaaatcaaatggaataatcgaatgtactcgaatggaatcatcaaattgatttgataggaatcatcatcgaatggaattgaacagaatcatcaaatggacacgaaaggaatcctcattgagtggaatcgaatggaatcattgaatggagtcgaatggaatcatcagcaaatggaatcgaatggaatcattgaatagcaacgaatggaatcatcatcgaatggagtcgaatggaatcatcaaatgaactcgaatgcaatcatcatagaatggaatcgaatggaatctttgaatggacctgaatggaatcatcatcgaatgcaaacgaatggaatcatcatcaaatggaatcacatggaatcatcaaatggaaaagaattgaataatcatagaaaggaattgaatagaatcatcggatgaaaccgaatggaatcatcatcgaatggaatcgaatggaatcatcatcgaatgcaattgaatggaatcatcatcgaatggaatcgaatggaatcaccaacgaatggaattcaaaggaatcatcatcgaatggaaccaaatagaatcatgaaatggactcgaaaggaatcatcgaatggactcgaatggagttgtcatcgaatggagtcaaatggaatcatcgaacggaattgaatcgaatcatcattgaatgaaatcaaatggaatcatcgaatggactcgaatggaagcaatatcaaatggaatcgaaaggaatcatggaatgcattcaaagggaataatcaaatggactcaaatggaatcaacatcaaatggaatcgaaaggaatcatcgaatggaacggaatggaatcatcatcgaatggaatcgaatggaatcatcgaatggacttgaatggaatcactatctaatggaacccaatggaatcatcatggaatggaaccggaaggagtcatcatcaaatggaatccaaggaaatcattaaatggactcgaatggaatcaccatcaactggaattgaatggaatcatcgaacgggatccagtggaatcatcggagaatggaatcgaatggaattatcaaactgactcgaatggaataaactttgaatggaatcgaagggaatcatcaaatggaatcgaatgcaatcatagaacggaatcgaatggcatcaccgaatggaatccaatggaatcaccattgaatggactcgaatggaatcatcattgaatggaatcgaatggaatcatcgaatggactcgaatggaatcatcatcgattggaatcaaatggaatcatcgaatggaatcgaaaggaatcaccatcaactgtaatgaactggaatcactgaatggaatcgaatggaatcgtcatcaaaaaaaatcgaatagaataatcaaatggaatcaaatgcaatcaacatcaaatggaatctaatggaatcatagaatgacatcgaatggaacactcatcgaatggaatcaaagggaatcaatatcaaatggaaccgaaagcaatcactgaatggacttgaatacaatcatcaaatggatttgaagggaatcctcattgaatgggatagaacaaaaacatttaatggacacgaatggaatcatcatcaaatggaatcaaatggagtcatcaaatggactcgaatggaatcatcatcaaatgggatcatcatcaaatggaatcgaatggagtcatcgaatggacacgaatgaatgaacaaacggactcgaatggaaatgtcaaatagaatcgaatggaatgatcgaaaggaattgaatggaattattgaatggacacgaatggaatcatctaatggacacgaatggaataatcataaaatgcaatcgaatggaatcatcaaatggactcgaatgaatggaatcattaaatggactcgaatggaatcatcgaatggactcaaatggaatcatcatcaaatggaatcgaatggaatcatcgaatggactcgaatggaatcatcaaatggaatcaaaccgaatcgtcatcgaatggaatcgaatggaatcatcgaatggaattgaaggcaatcatcatcgaatggaatcgaatggaatcatcatcaaatggaatcaagcggaaggaatcatcaaatggaatcaaatggaatcattgttgaatgggatggaatggaatcattgaatggaattgaatgggatcaccaatgaacggaatcaaatggaatcatcttctaatggaatcgaaaggaatcatcaaatacactcgaatggaatcatcctcgaatggaatcgtgtggaatcgtcgaatgaactggaaatgaatcataatcaaatgcaattaaaatgaatcatcatcgaaaggaatcacatggaatcatcatcgaatggaatcatacggaaacatcacagaatggaattgaatggaatcatcagttggactcgaatggaatcatcaaatgtactcgaagggacgcgtcaaatggactcgaacgaaatcatcatcgaacggaatcgaatgggattatcgaaaggactcgaatcaaatcttcaaaaggactcaaagggaatcattgtagaatggaaatgaatagagtcatcagacagcctcgaatggaagcatcattgaatggaattgattggaa

SEQ ID NO: 294 - DNA, 200 bp, Homo sapiens
  misc_feature (1)..(200): DMR2:95516601
ggaactggaaagagaagcaaaagagcttttccaacaactacaagacagtcaagtgagaatgacccaacatttagaaaggatgaaagacatgtacagagagctgtgggagacgtgccacatgcctgacgtggagctgctccaggtgaggagggagggtccatccccaaagaaaggaagcctttgctggacaatgctgccag

SEQ ID NO: 295 - DNA, 1300 bp, Homo sapiens
  misc_feature (1)..(1300): DMR2:95550301
tcttccccccacctccctggatattagaaacaatatcacaggggccgtgaacaacccctgcgatatttggagtaatatcatcgtctcccctcatgaatattaagaacagtatcggtcgcggtgggggggggggtgtacacaccctttggtatttgatatcatcctctttccccctggatattaggaacaatatcagaaaggatgtacagaccctgtgacatttgctgtcatataattgtctctcccctagatattaggaataatgtaacaggggatgtgaacacccctgcgatattgggagaaatatcatcctctccccccttggatattaggaacaatatcacagggggtgtactgcctctgcgatatggggagtaaaattatcctctcttctggatattaggaagggtatcagagggggagggtgtgcatttcctgcgatattcaatgtaatcttatcctctccctcccagggtagtaagaacaatattacaggaggggtgtacaccctctgtgatattgagagtcatatcatcttgtttctctctggatattaggaacaatatcacagggttgtgtacaccccctgcgatattgggagtaatatcatactctctcactgtggatattaggaagagtatcacagggctgtgtacaccccctgcggtattggtagtaatatcattctctctccctctggatagtaggaagagtttcacaggggtgtgtacaccccctgcgatattggaagtaatatcatcctgtcgccctgaggagagaagccatttctctgactgtctcctgtctctgaagaggtggaggaagtaaaagttgaaaaacaacaggaatgaagtcagtggcaacagcagccggtgccactgataagccggcctgaggtgaaaaaattactcccccaccccctcaccactctaagcacatgtgctctcaatccatcacgaccctttcacgtggaaccccttagagttgtaagccctgaaaagggccaggaactctgtcttccttccaggagctcggctcttaagacgcgagtctgccgacgctccaggccgaaaaaaacaccctcttcctttttgaatttggtgtctgagtggttttgtccatgtcttgtccagaccatttcttggttcccggaatgggaatcgaacccgggccgcggctgtgagaccgcagaattctaaccactagactacaaggggaacttacaacttcatgctaagtagattacccaactttaatagtgggttggccatcagaaggaagcctggacaggtcccttgtt

SEQ ID NO: 296 - DNA, 400 bp, Homo sapiens
  misc_feature (1)..(400): DMR2:96148501
tgctgctgcagagccttccttcctccttccagcccccacctccaagcagatgcctcacagggggcgggaggtgagtggcttggctacagtgcttgcgccagaatagggatggaggtgagagtgacgggccaccccaagctccgcctgagtggtgagtcagggatgacgtcgggtttcctgtgccaggcctctgacgaacacaccgatgcggcggccacccccacaggctcctgccaggcgccaggctccagggacagcccctctgtgaggaaggcgtgtctggcacagagcagggtgggggcgggggttcacctggggcacccagcccttagcaaggcctcctcctggccaaggtgaagcgggaagcctgcagccgaaagggctggtgtctgttcccaca

SEQ ID NO: 297 - DNA, 400 bp, Homo sapiens
  misc_feature (1)..(400): DMR2:96416301
cttactatcatcagaacagcagcatgggagtaaccacccccatgattcaattacctcccaacgggtccctcccatcacaccaggggattacaggaactacaattgaagatgagatttgggtggggacacagccaaaccgtatcaatcagattcatcattggactcccaggcttctcatccagcatcctaagtgtgcatcactgaagcctttagtcttcactcctgattgatttgggatccattggtgagtcagactcctgaaccattgctccagtcaaatgactgtcgaagttagtgagtacagattccttttttttttttctgtttttgtttgtttgtttgtttaatctttttttttcttctttaagttctgggatatacgtactgaacatgcaggttt

SEQ ID NO: 298 - DNA, 200 bp, Homo sapiens
  misc_feature (1)..(200): DMR2:97542601
catctcttaagtggaagggacctaaatcgatcaacgtggatgtatgtttcctgaatccaagtaaataattcattatttctcacacccatgtgctgtaataatttgcctaagcttcttgtattctctagtttagccttttgaacatttcttcatccactcgtggcaacaaagtataatatataacctcaataaaaagcatc

SEQ ID NO: 299 - DNA, 700 bp, Homo sapiens
  misc_feature (1)..(700): DMR2:97722201
ctcccaagtagctgggattacaggtgcccgccaccacctctggctaattttttgtatttatggtggagacggggtttcaccatgttagccaggctggtctcgaactgctggtctcaagtgatccacccgccttggcctcccaaagtgctggatgacaggcatgagccgttgcactcggcctcacatattttgaatgtttgtgctttttgttggtgatttcagtggttgacatggcccccaaccatagtgctgaaatgctatctagcattcctaagggcaagaatgctgtatgtgccttatggagaaaacatgtcagataagcttatagttatagtgctgttggctaagagttcaatgttagtgaatcaaccatgtctattaaataaggtgcctttaaacagaaactcacaaaaaaacaaggttatgtcttgatcagttgatgaaaatgtaaacagtttcctaggaacctaactctgtatttcccctaggagggatagttctatattgctaattcagtgttttcgttgactttatagaactgcagagaatgacagaaatcaactgtgtctatctggctgtctatccttttatccatccctctcgctctgttcgtccatcggtcagtgttatttttgggatgctctcaaattagattacagtcctcagttcccatcactcctaaacatttctgcaagcagat

SEQ ID NO: 300 - DNA, 300 bp, Homo sapiens
  misc_feature (1)..(300): DMR2:98941001
gcacgtgcctgtagtcccagctacttgggaggctgaggcaggagaatcgcttgaacccaggaggtggaggttgcagtgagccaagatcgtgccactgcactccagcctgggtggcagagcgagactccgtatcaaaaaaaaaaaaaaaaaaagtatctgtatgcataatttgtctgcatttattttgcctatatttaatttatttccttaggagatattcagagaggaatccctgagctgatggctatgaatgagctgaaggctctgagtctcagcgtgggaaggcgtctaaggttctaa

SEQ ID NO: 301 - DNA, 700 bp, Homo sapiens
  misc_feature (1)..(700): DMR2:100186401
tttgggatttcgtccacccctgtccagttgctgcttcgctcctcttcttggtttgggtttgctggcttctattattggaggtggatctcaggggatctcgcgggaatgctcagcacacgcacggttcatctacttaggctccacagtgccttgttttctttatggtcaggcatattttgtttccatattactggatccatccagagtcattttgaagattttttccagtgatactgttggatgatggagaatctctggatatgtgtgggggcaggtgggcaaagggagttgggcatggaggtggattataacatcaaacattcgtctccagctctcagaacaaaccaaagccaaatatccacattctgagtgtttctgcttctgccagggccgaacatctcccttttccattttgtttgtacctttaggacttgtgtcaatgacctcccctctgacctttcctacatctgaagaactcttatttttactttttattttttgagacagagtcatgctctttcgcccaggctagagtgcattggtgtgatccgggctcactgcaacctctgcctactgggttcaagcgattctcctgcctcagcctcatgagtagctgggactacaggcatgcgccaccacacctggctaattttttgtattttctagtggagacagggtttcatcatgttggccaggctgg

SEQ ID NO: 302 - DNA, 2200 bp, Homo sapiens
  misc_feature (1)..(2200): DMR2:100702301
gacaccatcctccccaaattccacacatctcctctttctagagcctctagaagaaagcgcttcctctctcttacagcttgtagtatgatcagaatttccgattctcaaatgcagtggtgtctggaccccagatttcaaactgcccatcagacatttcttcctggaggctgcaaaacttttgggtactttaaaatcaatctgttcaaaatggaacttttttgatacgctcctccaatgaaatgttttgatacagtagaaggaagctcatacatccctctctcctggcccaaaatgactgcactgtttaaggctatgggagctgttagtgatgatgtcaccaatgtagtttctaaccagaggtgagttgtaccacagtggcagatcagccccatagagaactaaatttctcattgtcacttttctgggaaaaaaaatcccatgatgctatagtcgagatgtttgtcccctccaaatcatgttgaaatttgatccccattgttggaggtggagcctcgtgggaggtgtttgggtcatggaggggtggaggccttgtgaatacattaatgacctccctgggggagggtgaataacttctcactctattcaatccagggtgacctggttgttaaaaagggcctgctaccttccccctctctcatgcttcctctctcaccgtgtgatctctgcacacagtgcctcttcagcttccagcaggaatggaagcggcctgaggccctccccagaaacagatgctgcaccatgcttcctgtacagcctgcagaaccatgagccaaataaaccacttttctttatgaattactcagatttgggtattgctttatagcaacactaaacagattaagacacagagagacaggttttaatattattctgttcttttccctaaaggttttatattactattaaatatcttcccaatcataaaaatgatgcattgctaggataaaatgttgtcttggtttcatgcccgccatgtgttacacaatcctcatctcttcctccacattcatcaacaattttcccatttaaaacctctctgcgtatttattgcctccctgcctgacatagttatggacagcacccaggagcacccagttactcattttagagtttatggagcagatgtcaggcacagagagattactggtgagccatcgcatgggtgatattttcattctgcatccttgtggagtaaggttgtggtttggattttgcacttgttttctttttcttgcaagagaaggaaagaaggttgaaatatgcctgcgttacaagtcacggtgcctccagcaagaaccactgcaacaacaaaggaaattcgttttctcaccctacttggtgcaagatttgtttattcatagagagacaagcatgctgtataatataaaaagtgaaagcccaaaaaaggatttaaaagggtgtttacagtcttattaaagttcagtcctgacaccactgcaggaaggcaaaatcttaaaagtacatactgcactttagaaatcatagagctgcctctgagtgaaggagggatggggaccactggagggcagcaggaagggaagataaagatgcaagggaggtgcaggtccatgggaagaaaggagacaagaggacggtgaggtgctggctcaggctcctgaggaccctgatgcatgtgattcctgaagagtcaggacaaggcacctgacgccttgccactgcctccatgactgtgaagaacacagtcttaaccctcatgactgtgaagaacaaggatgcggccaggaggaattcaccctgtgaatagtgtttgtaatggaaaataaaatacaaattttaaaacctctgtagcgctacttccgtaggaatttcttttgtgtgtggatgtcagggtgcccacggcccagctgttggtgctatgctccactttgtgagcaaagccaatgctggacccacagccagctaacccggggacctgctggagtaggggccagtgttcataaactgctgggaagtgcccccagcacaataatgctcttctgggggttcaaaatgggggaagggtatcctcccctaagtcaaaagaataagaaaggggtagcggtcagccaccctggagccaaagtgaggcccatggtgcgctgggggaggagggagcctcgtgctcacaccggtcctgcaggcaccactcaactctagc

SEQ ID NO: 303 - DNA, 2600 bp, Homo sapiens
  misc_feature (1)..(2600): DMR2:101542501
tgtaatcccagctactcgggaggctgagacaggagaatcacttgaacctgggaggcggaggctgtggtgagctgagatcacaccattgcactccagtctgggcaacaagagtgaaactccgtctcaaaaaataaataaataaataaataaatataaattaattaattaataaaaaataaaaagtgacaagaatagacatttctaccttgttcttgattttaggggggaaagcattaatttttccactagccagtataacgttagctatgggtttttcatagatgctctctatccagttgtggaatttgccttctgttcctaatttattgagagtgtttttcataagagggtgtgagttttgtgtgtgtgtgtgtgtcaagtgtttttctgcatttattgagataatcatgtgaattttgttatttattctattaatatgctgtatcatataattgattttcaaatgttaaacctaccttgcattcctgggataaatctcactttgtcatatcgtagcatcctttttatattactggattcattttgctattataatatcttattaaagaataatgcatctatgaacattagagaaattggtttatagctttttcttaaaatgcatttatctggctttgatatcagggtaacactggccttcaaataaattgggaagtgtagctattctttgaaagagtttgtgaagggttgatattacatcttctttaattattacatagaattcaccagtgaagccatcaagttctgaagtttctctgtggaaagttttaagctaattcaatttctctacttcttagagctctattcagattttctatttcttcttaagttttgatattttttgtctttctaaatatttgtccattttttggtctaattagttggcataaagttgttcgtaataacccttataatctttttcatttctgtaggatcagtaatgatgtcctctttctcattcttgattttggaaatttgtgtcttctttcttttttcttcaccggtctagttaagcatttcttaagttcattgttctattcaaagactaattttcgtttcattgatttttctctggtttttctgttttctgtttcattgatttctcttgtaatctttattccttcctttcttctatttgctttggacttagattagtcttctttttctatcttcttaatgtataaagtgggttattgatttggggtcttttctgttacaggcatttaagcactcctttagctgaatcctatacatttttatatgttgcgttttcatttacatttagcttaatgtattttctaatttccctagtgatatcttctttgacccatgagttatatgaaaatgtgttgtttaattttcaagtatcatgggatttcccagatttacttctttcactggtttctaaattaattccataatagccacagagcctactttatataattaatctatttaaatatactgagacttgttttgtggcctaacatatggtctaagggaatgtttcatatacacttgaaaaaaaatgtatattctgtagtcagagtgatgagtatatgtcagttagattgaattggttagcagtgttgtttaattctatatcctttttgattgtatatctagtttttctatcaattattgagaggtagtaatgaaatattcaagtattttatggatttatttagtttaacttcaattctgtcagtttttactttatatattttgaagctttgtttttaggtatgtataaattcgaaattgttatacttcctgttgcattgaccctattatcattaggaaatattcttatatgtctccggtaatatgtcttgtagtcaagtctattttgtctgatgttaatatagccacttgagctctcttatggatgctgtttcatatgtcctttcccattattttacttctagtctctttgcatattcaagtctgtgtcttctatctcttgtagacaagatgtagttggatcttggtctttgcttttttggtttttgttgttgttgttgtttgtttgtttttttgagatagggtctcactctatcacccaggctggagtgcaatggcctgaacatggctcactgcagccttgccctcctgggctcaagtgatccttctgcctcagcctcctgagtagctggtaccataggcacccgccaccatgccctgctaattcttaaaaaattttttgtggagatgaggtcttgccatgttgccgaggctgatctcaaatcctggacagaagcgatcctcctgtttcagcctcccaaagtcctgggattacaggtatgaaccaccacacctggctggatcttagttttgtgaaaaggaaataaaatcttgggaccccaaactcattacgccaaagggaaagttaagcttgggaactaagtcacataaaaactgccttccttttcttttcagatagctgaaatttcacatgcttgctttatcttatgtaaaatgtacatgaacgcataaactactttccccgcactcctctcttttcacatgtcaaatgtggattcagtgaatgctaatcaaagcctcacaagcatctccct

SEQ ID NO: 304 - DNA, 500 bp, Homo sapiens
  misc_feature (1)..(500): DMR2:103312901
atcatgttatgcgcctatcattaatgccatacagaatagtttcacggtcctaaaattcccctgtactccacctattcattctttcccccttctgtctatccctccctcatactccttgcaaccactgatctttttattgtcactactttttgcctttttcagaaggtcatatagttggaattatacagactggcttctttagtttagcgacgtgcacttgaggtttctctgcgtctttctgtggcttgatattccatctatttttattactcagtgatgtcccattgtctggatgtaccgcagtttatttacccattcacctatcgaaggacataatggttgcttcctatttttggcatttctgaataatgctgctataaacattcatgtgtaggattgtgtgtggacataaattttcaattcatttggataaatatcaagggttgtgattgctgggtggtagggtaagactatatttagctttataaaaaaactgctaa

SEQ ID NO: 305 - DNA, 700 bp, Homo sapiens
  misc_feature (1)..(700): DMR2:103714901
aaagggatgttgaattgtataaaatgcttcttctgcatctattgagacaatcataaagtttttgtcctgttgatgagatgtatcacatttattcatttgcatatattgaaccatccttgcatccctggtataaatctcacttggttatattatattatcttttttgtgttgttagatttatttttctagtatatgaggaggattctgcatcaggcatattggcctatagatttcattgttgcatacttgtctggttttggaatcaaggtaatcccggcctcacagaatgagttagggagactcttctcctctttaatttttttaaatgattgaagagaattggttcacctttgaaagtttagtagaatttttcagtgaagccatctactcctgtacttttcttagttgagagactttttaatgctgattcaatctgaatacttgtaattggtctgttcaacttttctatttcttccttattcaattttggcaggttgtatgtttccaggaatttattaatttcctacaggttttctagtttctgagcatatagttgttcatagtagtctcaaataatcttttgtacttctgtgatatccgttgtaatgtcctcttctttatctttaattttgggtcttttcttttttgcttggttactctagtttttggtttattgattttattttttcaaaaagcaaac

SEQ ID NO: 306 - DNA, 200 bp, Homo sapiens
  misc_feature (1)..(200): DMR2:106582501
aaagaaaaaaaaaagaaacaaatgccttggcttgtatgtatggagtaaacggaccaaagtggggtcagatatctgcttctgtgagttcgttcaagtggggagaatcctcctaactgcaagtggggcttgagcagatgcccgtgcccggctgattctcctacatggaaaacttccaatttcgctcggattcaggctgcttc

SEQ ID NO: 307 - DNA, 200 bp, Homo sapiens
  misc_feature (1)..(200): DMR2:108066601
aaagaagaaagaaaaggaacaggatagcaatgccccaaagagagcacctgcaccaggtggtcctgccatcaacaaactcaggaagccagtccgaaggtggccgttggatgtatagggtaaactgctgcacagagaagctggctacagccactacatcccctacagattagaacccacagtggcctcagacacaacctatc

SEQ ID NO: 308 - DNA, 800 bp, Homo sapiens
  misc_feature (1)..(800): DMR2:108812601
ttgaaatatctaactttttctaccctttagttaaatgaagcaagtgaagaaaacaggaagatagacattcaggctaaaagagttcaagctcgtttagataatttacaggtaagttgcctgttcttctctacagacagaagtatgtttttagatgattacctttgagtttactcatttagatacaattgttctttaattcacgcatatatactgttgcagaggaagtacgagtttatgacaatacagagattgaaaggaagttcccatgctgttcatgaaatgaaaagtttaaaacaagaaaaagcaccagtttcaaaaacttacaaggtaagtttgaattatgatttgatatgattgaaaatttctcggctgggtacggtggctcacacctgtaatcccagcactttgggaggctgagatgggcggatcacgatgtcaggagatcgagaccatcctggccaacatggtgaaaccccgtttctactaaaaatacagaaaattagccaggcatggtggcacacgcctgtagtcccagctactcgagaggctgaggcaggagaattgctggaacctgggaggcggaggttgcagtgagccgagattgcaccactgcactccagcctgggcgacagagtgagactccgtctcaaaaaaaaaaaaaaaaaaaaaaaagaaaatttctccaatggaaagccaggaagatttctcttgtgctttaatcttttctctttgatttagcaaacattctttttggaatgtttgctatggaagggattcaccataataattttttaataggg

SEQ ID NO: 309 - DNA, 400 bp, Homo sapiens
  misc_feature (1)..(400): DMR2:110402801
accccaaacctcaccatcacgaaatatacccatgtaacaaacctgcacatgtaccacctgaatctaaactaaaaattgaaattacaaaaagtttgttttcaatcttgctaagattgttttataggcaaacacatggtattttattgtcgttttattctataatttttaattagtgacgttaaacatctttcctatcggccattttacatattttttccttatgagttgccttcacttatcttcagcaaaattatctattgagatatcttttttttcctgtaatttggaagtgctcttgatatgctgaaatgtctgcactgccacattttgccctatttgttcttcagtttgcggtttgcttgcagttgtgcttatggcgttcactgtatggaagtgttgt

SEQ ID NO: 310 - DNA, 5900 bp, Homo sapiens
  misc_feature (1)..(5900): DMR2:110555801
gaacctcactaaatccattaattttcactaatccattccttatgaacacagaagtttctactgagcaaatattagcacttaacatgtgaactgtctatcaacggtgtttttaaaagatttacaggccgggctcaatggctcatgcctgtaatcccagcactttgagaggccgagtcgggtggatcacgaggtcagaagatcgagaccatcctggctaacatggtgaaaccccatctctattaaaaaatacaaaaaattagccaggcatggtggtgtgtgcctgtaatcccagatacgtgacaggctgaagcaagagaatcacttgaacccaggagacacaggttgcagtgagctgagattgcgccactgcactccagccttgtgacagagcgagactccgtctcaaataaaaataaaaagatttatattaggcagggcatgctggctcactgcctgtaatcccagcactttgagaggccgagacgcgcagatcacctgagttcaggagctcaagaccagcctgaccaacatagagaaacttcgtctctactaaaaatacaaaattagatgggcgtggtggcatgtgcctgtaatcccagctactcgggaggctgaagcaggacaatcgcttgaacccgggaggcggaggttgcagtgagccagatggcgccattgcactccagcctgggcaacaagagcaaaactccgtctcaaaaagaaaaaaagatttatattagaaggaggggccttctctaaaagtaatgaatcttttttctccctccccaagcaaaaaatccttctctaaaattaatcatctttctaagcctggtttaatgtttttttggaagactgcttatttcttttcctttcgaaagttatgcaagctcattaaaaaaaaaaaaaaaaaaaaaggccaggcatggtggctcatgtctgtaaatcccagcactttgggaggccgaggcaggtggatgactaggtcaggagattgagaccatcctggctaccacggtgaaaccccgtctctactaaaagtacaaaaaaaaattagccaggcatggtggcgggtgcctgtagtcccagctactcaggaggctgaggcaggaaaatggcgtgaactcgggaggtggagcttgcagtgagccgagatcgtgccactgcactccagcctgggcgacagagcgagactgcgtctcaaaaaaaaaaaaaaaaaaaaaaaaaagccaggcgcgccaggcgcagtgcctcgcgcctgtaatcccagcactttgggagaccaaggcaggtagatcaagaggtcaagagattgcgaccatcctggccaacatggtgaaaccccatctctattaaaaatacaaaaaattagctgggcttggtagcatgggcctgtagtcccagctactcgggaggctgaggcaggagaatcactcgaacccaggaggtggaggctgcagtgagccgagatcacgccactgcactccagcctggcgacagagagagacttggtctcaaaaaaaataaaaaaataaaaaataagaaaaggttttatgttttcaaagattaatagatatactgttacatatacacaatacagtcataaatgttatatacatgtgtttcaattaacatgttaaattgcaatcatattcttctatcataggctataaagccattgccctacgtctacttattaggattttgtccaagtaacacatctttttgaatcaagctttacccataatacgagattacatctttatcatgttcccaaaaatggcagagtaaaaagatcaaactcttcaaatttgtctacaaacaaatcatggcaatgcaggctttcgacaagagtgcattcaacatccctgtttcaccagcctcaccagtattgtgtatgcttagttattttccactgtatcaaattgactatttcattttaactttaattccacaggtttgttcacatattgtcattacataccagagcacaccttcatttaaaacacatcaagactccgtgaaatgtcaattgctcctacaagtggaagacttacctgaaatgctatgagatagcacaatgcagccagctcagaaagagctcgccattgaacattattaccatgctgacccatcttcaagagcagagaaccagcatacatatagaaatgtcctttcatttctaagaaagtagctgacagttcatcatttccacccaaagaagatttcgcagactgaagagcactatcaaaactgtaatatgaaaatatcaaacagatgatacacacttactgcactgtgaataatcatggttgatttaattcaaaacaaaataaaaattttatttcaagcttcatcttccacattcaacttctaataattcttattccccatgttataaattatgaatcatctaatgcttatttttatcctgcatacttcctatacttcatgcttaacctctcaaatgatgtcttattcccagttatttccagccctccaatcacagaataaatataagattagtgattataggtgcacatttcaaaataaaccaggataaagttgggagactattttgtagtttcttcctgatcatataatttcattatttaattaacagttgtaatttctcaaattagacataccatttccaaattataagtaaataactgacaggtatttgagtatcaatacagcaattgctctttttactatatagatcattacagcgttaaataaattgtcttttttttttttttttgagacggagtctctcactatcgcctgggctggagtgcaatggcacgatctaagctcactgcaacctccacctcccaggttcaagtgattctcccgactcagcctcctgagtagctgggattacaggcacctgccaccatgccccgctaaactttttttatatttttagtagagacagggtttcactatgttggccaggctggtctcgaactcctgacctcacgatccgcccgcctcagtttaccaatgtgctgggattacaggcatgagccactatgtctggcctactatttgtaatctatattctaaattagttcttctaaatcctaatgtttctccaaatcctcactttggaagaaaagtaaaagcaaaaagcaaacacttaaacgtgaagcatgattttaaagtggcttacaataaagcaaccagagcaagtgaggtctaaagatctctgagggtgctcaaaaaccccttcaggggatccatgaagttaaaattacttttacaataataccaaaaaaaatttatatattacatactcattttctcatgtatgtagagctgactttttttgtttttgtttttggagacagaatctcactctgtcacaaggctggagtgcagtggcacaatcttggcttactgcaacctctgactcccaggttcaagcgattcttctgcctcagcctcccgagcagctgggactataggcgtgtaccaacatgcccggctaattttttgtatttttagtagagacaaggtttcaccattgttagctgggatggtctcgatctcctgacttcgtgatccacccgcctcggcctcccaaagtgctgggattacaggcctgagccaccgcgccccgctgagctgagttttctagaggcttcatgacatgtaatagttttacagactgaaagaggaagtaaatgagaatctagctatgttctattaagcgagacattaaaaagatttacaaaaatgcaaaaacaatgacacttttctgactacttttttgctgttgggaaatagttatttttcataaaaaatgctattattggccctgcgcggtggctcacacatgtaattccagcactttgggaggccgaggcgggtggatcacctgaggtcaggagttcaagaccagcctagccaacatggtgaaaccccatctctactaaaaatacaaaaaattagccaggcgtggtggtgggcacctgtaattccagctacttgggaggctgaggcaggagaatcgcttgaacctgggaagcagaggttgcagtgatccgagatcacactgttgcactctagcctgggcaacaagagcaaaactccgtctcaaaaaaaaaaaaaaaaaagctattattattaacacacaatagggcttattacatttttaatggattacattttttgttttaatttctaatgtaataaacactgacagaaataacccacatacggccggatgcagtggctcagacctgcaatcccagcactttggaaggccaaggcaggcggatcacgaggtcaagagattgagaccttccagtactttgggaggccaaggtagacggatcaagaggtcaagagaccgagaccagccgggcgtggtggctcatgcctgtaatcccagcactttgggaggctgaggcaggcggatcacaaggtcaggatatcaagaccatcctggctaacacggtgaaaccccatctctactaaaaatacaaaaaattagctgggtgtggtggcgggcacctgtaggcccagctactcgggaggctgaggcaggagaatggcatgaaccctggagacagagcttgcagtgagccgagatggcgccactgcactccagcctgggcaacagagcgagactccatctcaaaaaaaaaaaaagatcgagaccatcctggccaacatgatgaaaccctgtttctactaaaaatacaaaaactagccaggtgtgggctgggcgcggtggctcacgcctgtaatcccaacacttcgggaggccgaggagggcagatcacgaggtcaggagatcgagaccatcctggctaacacggtgacactccgtctctactaaaaatacaaaaaaaattagccgagcgtggtggtgggcgcctgtaggtagtcccagctactcaggaggctgaggcagaagaatggcgtgaacctgggaggttcacaaggcgggtaacaaagggcccatgaggcctgattaactgatctgacaaaccatctgtcacccacagccctaagccacactgtgaaactgcctagggtggcaccagctttttatcttcctcagggtcctcccctcaggcccccaagtcaccccatcatggtccagattctcccctgagtgactccatccccatggtcatttcccctcctgagcctccccctctgagggccaagggctgtcctcagggccctcctggggcttcctggtggggaacaacctgaggcaggaggataagctcttattcagagcattgagaggaaattgtgaagcttgcagtgagccgagattgtgccactgtactccaggctgggtgacagagcaagactctgtctcaaaaaaaaaaaaaaaaaattagccaggtgtggtgtcgggcacatgtagtcccacctattcaggaggcagagacaagagaatcacttgaacccaggaggcagaggttgcagtgagccgagactgcaccactgcatgccaacctggcgagagcaagactcagtctcaaaaaaaaaaaagagagattgagaccatcctgaaccccgtctctactaaaaatacaaaaattagctgggcgtagtggtgtgtgcccgtggtcccagctacttgggaggctgaggcaggagaatcgcctgaacccgggaggcggaggttacagtgagccaaggtcgtgccactgcactccagcctggtgacagagcaagactccatctcaaaaaaaaaaaaaaaaaaaaaaagaaagaaagaaaaaaaggaacccacatacaaagatctttgatgtccttaagaaaaatgtaaaaggaacttgtgaccaaaaaatttgagtatacaaagaacacaaaataaaacatcctacatgttttctaaaataaagttatgttagttcttttaggtactgctc

SEQ ID NO: 311 - DNA, 900 bp, Homo sapiens
  misc_feature (1)..(900): DMR2:111504201
aattaatatccacaaatgtctaggatgataataagaacaatctctaagtactggctatttttcgtatgtgccatggagctggtaaaacccaaatacgtgtggttgatgatttgaaagtttttccaccaatacagtatttgagtcacaggctgcagtcaaaagtctagaattttaaataaatgaatcatacactaaatatgcatcatcttttgaaactcagtgcctatgagtaaatctcgatgatcataacacattactcaacaaagcagaccataataaagaagatatcagaacacatggagcaaaagacagtaagtttgggactcaaccattcaactaatctttaatgaatacacaccagatgccaagctccaactcaggtcctgggacacagcaagaagaagacacaaaagatccctgttctcgtgaagcttatgttctaggagggtgagacagaaaataagtacatgagaaaagtacaagctagtgaattgaacagtgcaaaaaattagcatagggtaggagggaaatacttgagatgggcaggtcatctaggaaggtcactctggagaggtgccatttaagctgagatctgaatgatgtccaggagccagtcagcagcattccaggacaagagagcagctgtcgccaagaccccaagacacaaaggaacaagtaagagtccccaggatggctgctgcttagtaagcaacagcaagagaagatgggatggggctggagaaggtggcaaggaaggagcttgaattttatgccaggtgtgatgaggagacactggaggcttttaaacaggagagtgacatgatctgacttgaattttctgaggacaactttttctgttttcttttttttttttttttggacagggtctcgctctgttgc

SEQ ID NO: 312 - DNA, 600 bp, Homo sapiens
  misc_feature (1)..(600): DMR2:112687801
tgttttagttaatttcaatgctatagccaattatatctaacgatgtcaaacagtactagtcaatgaattagatctttaaagtgcttttctgaattgatgcacaattttacagcatgaccttgagcctggataaaatatgttccctgctttgaaccttgctgtgaagatcaactgtattagtttaaaggaaagtgctctgtaaaccaggaggttacaacaaatacatataggttgttattatgattaatcatcctcattaatttttctttaacttagctgcaactggtattcatcttcgtagtttttgtgagaatcttctcatcaaaaagcctctgtagtcctttcaaaaaaatttcccccccccccccacaggccctcagtaacagtttttgagacagggtctgtctgtcgcccagcggggagtgcagtggtgcaatctcagctcactgcaacctctgcctccctggctcaagcaatcctcccgccttagcctcccgggtagctgggaccacgggcgtgccccaccatgtctggctaccttttgcatttttatagaggcagcaactcaacacgttgcccaggctggtctcacacttacgg

SEQ ID NO: 313 - DNA, 800 bp, Homo sapiens
  misc_feature (1)..(800): DMR2:113104201
tgtcagtgttagctggtcactttgaaaggttagaggtaaataaagttcagggcaatggtacttggagaggagtgaatctttggtaacctggaggagatgcttctcagaggaaaatttcttcacagcatgaagtcaccagctctaagactagtgggtgttctgggggatgttagcagtgactcactgactgttggcccagtgaggggagggatgaaaggctgggtagtgggtagagaatctgactcctcctgcccccacatgtctattcctgggccttctcatggtgggggcaaaaggtatgcaaagggatttccgcagtgtctgagtgctcccaggagacggaaaagtaactgatgacttggagttggagtcttgttggctcaggcagctggggcgttttgggatttcaacacctccctttagtttctatgtatggtgctgagcaagtagtcaaagactttggtcttgctttaccccagtagcccacaagcctgagtacatggctaacatttattgggcacttagtgtgtgccaaagagctttatgagacaggttctttttgagtcccattatactgataatgggactgataagaaacagaaggtcagaaaggcccagtaacttgggcaaggtcatgtagctagtaagtggtccagctgaaatttaaaaccaggtttatccaactccaaatcccacatctgatttattttgccatgaattaaaacatagttctgattttgagaaactcccagtcccagtgggaaaacagatggaatcacaaattaccataacacagtgta

SEQ ID NO: 314 - DNA, 1100 bp, Homo sapiens
  misc_feature (1)..(1100): DMR2:113192601
tgagcctggggaaggctggaggctgaggcagccagggaggagctgctgaagggctccctccactggccaccctccccttcccgtccctgccctgttcccttcccatctcccctcctaacttttcccccataccctcactgtatctgctgcttactctcagtcatggtcctcatgctctccacacccttggtccttggtccccactgccttgccaaccagactccacaggtctctcccagtgtctcccagtgtacactgaatagggtagcagggcataccagaccctggctgcccccttgctctgtcaggacccaaggcccagcgtgcctgcacccttcccttgctcacccccaccgcataatgtgtgcaggccctgggggccccagtgcatctgcagccccagcccaggcccctggtgcagactccatgccccttttccctctgcagcaatgactttagcagggctgtggctgaggagtacctgtccttcttccagtttggaggccagagtctggaccgagccctccggtaatgtctttgggccctctctggggaggctgtggaggatggcatggggcagtggcaccagcctgaggctgggatctgattggccctaagctcccgggctctctccttgaccctggccctcctttgcaggagcttcctccaggccttggtgctcagtggggagactcaggaacgggagcgaatcctctaccagttctccagacgcttccaccattgcaatccggggatcttcccctcagtaggtagggaggggctggccctgacagcaaagcagggaaactttggggtgcccatgtctgcttgggagttcagtaggtgacagtgaactggtgggagtgtgttgggggctgtggagaatggaagcattccaggggttattcggttaccccacgcagtgtgggcagaggaaacaggagccctggttccaatgagctttctctccacttacctatctctggggtagattctgtacacaccttgacatgtgcaatcatgctgcttaacacggacctgcatggacaggtaagacggtggagagagtccctgtgggaactgaggctgtaacaaggggt

SEQ ID NO: 315 - DNA, 5000 bp, Homo sapiens
  misc_feature (1)..(5000): DMR2:114189001
gggtttctccatgatggccaggttgatctctaactcctgacctcgtgatccgcccacgttggtctcccaaaatgctgggattacaggtgtgagccaccgcacccggccgatccctggtcctttctactagcagagactggatctaggattgtggcttgatttcagtctctctggtgttggaagaaatgtttctgaggtattctgctctgaacagcagaattttccctgggtctccaaagtctttaaaaatgtattgtcaagaatcctaagggagattctgttaatgtgttattctttctagctgtattattaagtcgacaagggagagactactgtcttaatcagctctgtgtattcagtgatgagtttgctgtgtgactcaacaaacatttgttgtgagaatgaagcacagatggctgggtggtgggagaatggccaatcaatcctatgggatggcaactgctttccccactgaccctagagtatggcgtttctcaaaccatgtggtagttagcatggtccaggggacacctgtatcatttggggacttcctactgaagcagactttgtgaagttaagcctcagaaccctgcattttcagcaagctccatcatacaggtgatcctcgcacagattgctcttgacaaccactgtctttgtggttatgtacctctcctttccatctgtacacaaaagcatcttaaggtcacaaagctgccaactgtgaaacaagttgcagagtcagctttgtgagtgttaaattttctacattcacggccaccagacgaggagagagtgaaaggtctgtacagctgtaatatccttccactgggagtcattaccacgtgcgatctgtgaccaaatcctttggacaaaatctctggtttctgttttaatccaaaacattaccaaatagttaaaaaaaaagagaaacacctaatgtaaatgatgagttaatgagtgcagcacaccaacatggcacatgtatacctaggtaacaaacctgcacgttttgtgcacatgtaccctagaacttaaagtataataataagaaaaaaaaaagagggaaacaacttaaaagcgcaggccaggcgcggaggctcacgcctgtaatcctggcactttgggaggccgaggcaggcagatcatgtggtcaagagatcgagaccatcctggacaacatggtgaaaccctgtgtctactaaaaatacaaaaattagctgggtgtggtggcatgtgtctgtagtcccagctacttgggaggctgaggcaagagaatcgctttaacccaggaaatgaaggttgcagtgagccgagattgtgccactgcactccagcctggcaacagagctagattacaactcaaaataaacaaaaagttcaattaaaaaaatttaatgtatttgacataacaaataaaaagactctgatacatagaagtattttccccaaatgagtctgcttctttttatgaaagtaagaagtatatgattaaaaaatagtgaagaagtgcttctgtttctacgcagtgttacttctcagataacatcccttttagtcactatcttttaggtctgatggttacttctatcggctggaatttgtttgtccacaagcagtagaaaacccaacaaaagtggcctcaacaatttagatgtttattatctcactcaagagaagactgaacaaagaacattctaggtcttatccagcagctaaacaatttttaaaaactgatccagtctttttctagtttccagtttttctacgcttaattcattctttcattatttttcttgtcatctcatggtccttagataaacactcctactccattatcatgtaaagttccagacaggaagaatggcacaaaggtcttgttttgcacctgaaatttttattaggaaactaagtactcctcccagaggaccctattcgtcttcctcttatatatctcatcggctagcactgggctaaaaggccttagctgggcaatcgtcaaggggagcttgttgaaatctggccttacactgggacttcttaagtgctgaaaagaaaagagagggttttactcaggatggtgaagtccaccctaacagctcaattttcaattgttcagtttattcattttcgttagagagacgttctcttgtacggttcttgtcatgatggtgtgtgtttctcctggggatctcatgtccggtagtcagcttgggctcctaaggacaggccagtgtgaatgcatgtgcatacatatgtgtgcatatctgtgtgtacatgtgtgtctctgtgcatttgcaagggactgggtaacatgggacattgactagaacagtggccagtagatggagtttcagctaccgtcccctctttcggaaactctttccatgtccattttccttgctgacttagaaactgacatttccattggctttttgtaggacatatggactctttctcttggttttagccctctgcatattttgggcttcctagttaacattttacccactcacggaattccatcctttttccgagttttagaaatttgttaacatctcctgcttgctgatagtccccgcttgttctttttgtgttcggttttaattctgtcactttcattttaccggaacctcagagtaaggtgatagggaaccttttgtgctaattttcattttgaactcactattattcttgaactcttttaaatcatactcgccctttccttttctcatagtagcttatggtttttgacatagaaaattgaatacacttgaacataaagatgggaacagtactcacggggggctactaaaggaggaggaaggaaggaggcgtgggctgcaaaactatctactgggtactgagctcaccacctgggtgacgagaccatctgtaccccaaacctcagcatcatgcgatatacccatgtaacaaaactgcacatgtaaaatactttttatttttttaaaaagtgaaacaaattatctgttccttttcacagctttgattcctactttaacacaggataacttgtcttttccctctcgctaattccaatcttcttatttactctcctaaaaggaacttcctcaataatcctcgcagcctaccaggtaaagtccacaccacagagctgacccaagcccatctattcagtcttatctctgtattttttcttttctttctttcttcttttttgagacggagtctctgtctgtcaccaagtcttgagtgcggtggcatgatcgatcttggctcactgtagcctctgcctcctgggttcaagtgattctcttgcctcagcttcttgagtagctgggattacaggtgtgcaccaccacgcccagataatttttgtatttttaactagagacggggtttcaccatgttggccagactggtcttgaactcctgacctcaagtgatctgcccaactcggcctcccaaagtgttgggattacaggcttgaaccaccatgccaggccttatcttggtatttcttaataatcactctggtgtcaaaacaaacgaaatcactcatcttcccccagcatgccttgctatctcatgactcactgtgttgtcatctttgcctcaggaggccgaggtgctcccatcctccccacagccttagctcctgctccctcctgggggacccttgcatacattaagggcttgtgaaggctgattttctttgggggttatgtcttctctcttctatatacccgtggcaccttgtattttatgacatttgtcaagttttaaaaaattgtttatctgttttcttcctaattgtgagcccttgaggacaggggccttgtcttctctttctcttgctatgctagctcagggttcacctcaccatttgtgcttcttcaatacccgtaggctaagttaatggctgcgttcaattttttttcccaaccagttacatctctgctcggacccaagatagtttactcagtgaagaggatatgcttctgcatttttgcagctcttctcttaagttacctgaaaataccaccaggagaagcttacgacaaccttgccattgctgttgtcacctccaggtagggtgtcccttcattgctgctgtcattttgccagacttaacctttataagaaaacacatgctaacctctatcaatcttcagcttatttctttaatctacctgcactggtcacatttgctcatgaaagtacagaaagaataattagttttttatgggtcttagagttatggaaatgttgagcttcatggtaccttagaaattaatgagaatcaacatttcatccatggatcaggaaactgtgtgacccaagagaagggaagcggcttctcagggtcacacagtgggtcagtgatagagctagaattagtgcctagcgcttcagatgcattattagtgctttttctaatttttgttagtgcatttcactcacactcacacacacacacacggttttccagctatagaattccttctaatgaaatagaaaattgcacaaaagtttaagtacttagtgctaagatatttgaatttataaagctctttgaatttttggaggtctacgggtgctccaacaggaattttgttagaaggtataacattagcaatgttaatgagggaaattcttcattatgtgggactgtctggagccttgcaggccatttggcagtcttgccacccccaaatcccaagatattgtgacacccccacccctatgcttgcttacatttccaaacactcttgatagtggcattattgcccaattgagaatcactttgtgattctcagagcaaaagaggtatagaggggttgatttatttgatttgcttgataagtaagtttctgcctggaacaatgagtgaactcagctaaatccacagacagggctgttagtaacactgggactgggctgattcttgcaaccactggttgtatgctcttttcatcagataattgacttatttctaacttagtccatactatgcc

SEQ ID NO: 316 - DNA, 1900 bp, Homo sapiens
  misc_feature (1)..(1900): DMR2:114417701
tggcaaaagcaggagcaagcaagagagagtgggagagatgtgccccccccgccacccaacttttaaatgaccagatctcatgagaattcactatcacaaggacggtaccaagctgtgaagtattcactcccatgatctaaatacctcccaccaggccccacccccagcattgaagatacaattcaacatgagatttggacaaatatctaaactacatcaggcagagtcctgtaagagtgaagaaaaagactcagtaagaaacactgaatatgaaaactggctttttccccatttttttcccagctctggttaatacttatttttatgacctccattgtgctaaaaagaaaaatattttcaaacagccaaagaattagaggttcttttaaggaatttggaaagtgttctagaattatcaaaaaaaaaaggtaggtgatattcaattaaatcaaccaatttaaaaaattacatatgttttcatgttggtgtaatgtaaaagctctgaagcttatttttgaaatcaaattacaacattttcttccaattgcaggtaatcctaatttggtttaaattttctacctgctattgacaagaggtaaatttatgtgccaggtgccagacctatcagtttttagtagtatatatctttctttatcataaagtatgcctcagactaatctatctttcataatgtgatctgcaatttactcagtttttacaatattcctctgaatacatattaacatatttttgagttaaaaattatagttggtttgtggattggtttgaaaatgagggctggcttagccaacaaggttatatgttagtttatccaatatagttaggatatattaatttatgcccatgaagtgactgagccaaatcatcagtgccaaggtttatacaaaatatacttaaagcatttgaaaagataaaatattgcaccgaagatattgtttgcaagatatgttgcaaatggaatttgcaacgttttaatattctcaaaactttctaagattagaaagttattcaggcacctctaagtgaaagaataaaaggcaaaaacagcaagtcttgctaaaatgaggtaatcaagaaaatggcagagaagcaaatccttttggttcatcaggtcatttttcatttatttcagcaacaagcaagtaggatactgacatgtcctcttataagacagttagattaattaggaaaagaaaagagaattggctgtgtttgcactctgagttagcagagtaccaggtattcagttacagaaacagagagttgaattatcagtgaatccactggcttcatggaacaaatggtttctaaatattcaaatgttttggtacctgacaaatgcttaagctagtttttaaaaatcaacttcaatcattaatttaaaaaataccttaaatgctgcctatacagaggtgtacccggctctggcgaggggcattgcacaagtcagacacaacctcagtcctcagccacttatcattcagtggacagtgttcaacaatacacagaagagtaaataaataagctgatataagactgtgatattcatcgtgaacacaataatccaaaggaatgtggtcagcattatctggtaaggacagcaggattgccttagcataggcagccagggaagttaaaaactgggctgaagtgacccagtttttacttctgtttcgtctctgtgacctgaagtggcagccccgtgagaatccccaggtgaaggtaagatgcagaacgccatgaggtgaggatgaacctggactcttaattagccctgcatctcagattataagaataatcttccattttaatgggtctttacaactgacatgggctttatagatgctgagatttctgagttccatagtttgtcttacgt

SEQ ID NO: 317 - DNA, 600 bp, Homo sapiens
  misc_feature (1)..(600): DMR2:114493501
aaagataagggtacttgctcgaatctctcaaccaacaagttcagaaatctcatgtaggacgtggtgaggtttatcaaaatggggcatgggatgcaatgaagtagcagagacactcaataatttcgacttggaagactggaggattcattaccataaaaaaactgaacatgggaaatgaattataataaaaatataatgactgggtgtttagtttgaataaagaatagaacatcactgtgtaataatcgctgagaggtttacaggtcaaatggaagattgttctgcaagagaaaagaaaggtaaacactgcaagcaactacaggccatgaacgatggtaaaatcgatgtgggagacagagcactgaactgggagtcaggatacctggcctctactgaatttttagcaaataacagacttttcctgcaccctagtttcctcatctgtaggcattacataaacaaatattttcatttatgtttctgtgagctcaagaacattgcctggtatttcatattattaagtgcttaattttctattttagtgaaagtatgctgcaagaatttagagacagtggcaggtaaataaagacagcaataagg

SEQ ID NO: 318 - DNA, 800 bp, Homo sapiens
  misc_feature (1)..(800): DMR2:118509501
caactactctggctttctggttggagcagcggtgacaggggactgagagataaccaaggactaatctaagtctgtaccaaaacaattgtcttcctttattttccctggagcaggaggaggaaagtagagaagaagggatgaaggcaagatatcactttgaacttctcgcttaccgcacatgtgggaccctgttctcacttcagcagcctccacgcacaggtcccaggagagaaagaaataatgaggtctggttggaccagctgatgctgccttccttgtgtctacgaaaggcagctgcctctgtggtgtgatttcaggggagccagagagggccatgcccataaatctctaccttgcattctaaccacctattatcgtatatgagactagtaatgggaactcacttgttgcagatagcttccaggctgttgtgattttgatacttgacttctcagcatctgtcccttggctgtgaccccctcaggaggtagacttgcctggtgtaagtgcaatctcatctcctatttcaggaaagagcactgccctaattatggtctttaatacggaggaagacatttgccattgatttttagaagttcttccttgctcttaagaaagttgagggaagccttggaaagttcttcctggctcctaagaaagcctaggaaggcctcttgttttcttttccttgatatgaactaggagatgtgtaaccgactgctcctggaggccatcctgcagccacaagagaactggactcagagtgaggatgattccacaaatggcagaggaggtgatag

SEQ ID NO: 319 - DNA, 800 bp, Homo sapiens
  misc_feature (1)..(800): DMR2:118990601
agcaaggaagaaaaggagaatcaggagttccaggtaaagggcaggctgcatcttcatccctcggagtgatgacggggaaggcctgccttctcagagggcaggtcttgttgacattgaatgcacagctgtgaccttctcccaaagtggaggttaagactccagggctctgtcactcaagcctcagatttctccgctgcaaaacctgggaaccacaggaactcaacatcctgaggggtgtagcgtatggggcaggggctgaggatggcaaaggggctgaggatggcaaaggggaaaaatgtcaggagagctgggggtgcaggcagaggctccaggctctacagccgccatggagctgtgccccttctgctccatccacggctgctgcttccccacctcagctgtggcccacttgtctcttcttggcccccaagcttctcctctctgcctcctgctgcctgtcactgggctttcttattcttatcctcacctccagagcctgtgcttcagttgggtactgagctggcaccagctggacggtgtttctaggcctctcaagagccctgcccctgtgagtgcaaaagtgagatttttcagacacatttcttgagcaagttttcttcctcataagctagatattctattatgttttatggtttttttttttttcaatttttttagagacaaattctctgtgtcacccaggcccgaatgcagtggtgccaggacaggatagctcactgtagccttggcctcccgggatcaagtgatcctcccaccttcgtctcccaaagcttgggatt

SEQ ID NO: 320 - DNA, 200 bp, Homo sapiens
  misc_feature (1)..(200): DMR2:120793901
cagctcactccccatgggggcctcagcttcctcccctataagaactggtgatgacatctgctgtgctgaagtgaataggtggggttgccatgaggaagccgcagctgctgtgttttgggtccgttcttcacggatggagccttctagttaccagcttgagctgggcctggctgtgggaatgctgtgctgaagagctcctg

SEQ ID NO: 321 - DNA, 2400 bp, Homo sapiens
  misc_feature (1)..(2400): DMR2:121166301
aatgtaacattatttcatttatttgtttttgtttttgttttcttttattgacttattttttgagacaggatctcactttgtcacccaagctgaagtgcagtggtgcaatgtcagcttcctgcagcctcgatcccccaggttcaaatcagcccccaagtagctgggactacaggcacgtgccaccacacccagctaattgtttttttaatcaggataatgctggccttgtagaaagcattggtaggtattccctcttcttcagtttcttggagtagtttatgaattggtattatttcttccgtaaatatttgatagaactcaccagtgaaaccacttggacctaatgggtatcctgtgggtagatttttaaccaaaaattcaaattattttatagatataaggttattctggttatctgtttcttcttgggtgagctgcggtcatgtgtgtctttgaaggaattcatccagctcacctaagctgtttaatttattggcataaagttgctgataatatacccctttatctttttaatatctgtggaaactgcaatgatggcacctcacctctgtcattcctgatatcggtaataggtatattcttttattcctgatcagttcagctggaagtttatcaattttattgattttctcaacaaaccatcttttggtttccttcatctgcttttcatttcattgatttttgttttggtccttactattacctttattttttctttctctgggtttaatttgttcgtctttgtctagtttttttgtttgtttgtgtttgttttgttttgttttgttttgttttgagacggagtctcgctctgtctcccaggctggcgtgcagtggcgcgatctcggctcactgcaagctccgcctcccgggttcacgccattctcctgcctcggcctcccgagtttttctagttttttaagacaagagctgaggttattgatttggtacctttcttcttttctaacatgagtgtttagtgctgtaaatttccctctccatactactttagtggaatcccacaaactttgatattttgttttcattttcattcaattaaaaatacttcctaaaattcctttttattttttctttgatccattaattatattatttagtttccaaacatttgaggattgtctatttggtttctaatttaattctaacatactcgtatactattagctttctagggttgctatgacaaattaccacaaatgcagtgacttaaaacaacacagatgttttacctcacagttctgtaacagttcagcagtcagacacggacgtcactgggctaaaattgaagtgtcagcaaggctgtgctccttctggaggatgaggagaatctacatccttgctcttcccagcttctagaggctgcctgcatttcttggctcatgacccttttccccgaccttcaaaaccagaaatatcaggttgagttcttctcatgctacagctctctgccatcccctccttcttccacttatgagtaccctcgtaattacattgggccaggataatctccccatctcaagattagttgattagcaaccataattctcctttttcatgtaacctaatatgttcaaagattccagggattcgaacatgacatctttgggaggccattgttctgcctaccacacatgacttgaatccttttaaatttattgagaccaatggcaaaaaacatggtctgtaagttgtatcaagttggttgttagtgttcattagaatttcataaccctactgattttttggtctacttttgctatacattattgagagagcaacatggtgaaatcccatctctactaaaactacaaaaattagccaggcttggtggtgtacacctgtagtcccagctgctcgggaggctgaggcaggagaatcgcttgaactcaggaggcggaggttgcagtgagccgagatcgcgccactgcactatagcctggtgacagagcgagactccgtctcaaaaaaaaataaaaaaataaaaaataaaaaaactctgacaataattatggatttgtctatttctccttgcagtttatcagtttttgcttcatgtgttttgttctcttacgagaagctcaaacatttggactgtaatgtcttcatgttgaattgacaccttcatcattatgaagtgaccttctttatccatggcaatgttctttgctctgaaatctatgatccctgatattataatctaatgatccctgatattatcatatagccactccaggtttctttaacctagtgttagtatggcatacctttttccatccttttacttttaacctatttgtgtttttaagtttaaaatgtttttatatgcaacatacatttgtcttccttttttacacaacc

SEQ ID NO: 322 - DNA, 200 bp, Homo sapiens
  misc_feature (1)..(200): DMR2:122697701
tcagcctctcaattctacttgtaattcttaggtttttgctcctatctccatcttcaaagccagcagtggtgcatcttttaacctccgtgacttctgctttcatggccacatctccttgtctcactcttttgcctccttcttttctgtataagagcctttgggcccatgcacataattcaggacagtctctccattgaaat

SEQ ID NO: 323 - DNA, 500 bp, Homo sapiens
  misc_feature (1)..(500): DMR2:125898501
gaacaaaagcatggctattccacaagacaatctgcctcttcagagtaagatttaatttccaaaagcctccaaagaagggaagcccagtaatcctcaaatgcacaatagaatggaagtatatataaaatcccccaaactagttataaaacatcacactaagactttactttttgtgtcagaataaaaactgcaaaatctttttcaatatagaaattaaaaacgccaacaatctcatgaataccaccaacagcaatgataaggctctaggctcaattaggcatttcctcactttgctttgtaggggtagcaccctttgggaattgcctcacaggttctcactttaagataacatttcattccagagctctctcaagtttatgtgggccccgatgcagctcttagctgctcctaatgctgtcttccgtaaaataccaccacttcacaattttatgtttgtagattcaaatttcaatacattttcactgttttggggaacctca

SEQ ID NO: 324 - DNA, 100 bp, Homo sapiens
  misc_feature (1)..(100): DMR2:127110201
tagaggtgattttttatcagatcgctagattaaaaagatatttctaaacacaaaagcactggagaatatattgaaattttaaaatgcttgctttgaggta

SEQ ID NO: 325 - DNA, 800 bp, Homo sapiens
  misc_feature (1)..(800): DMR2:128436301
ccatttctgggccatcctggcagctccccactgcaggagcccctgcggtctgtcacgctggtcctctgaggtggagctgtctgcatgcacttgggcgccggccctcccctttgcacggagctgcccggggctggctcctcacctgcccagcactcacatacatggcagctgcaccccaaatacttgttcagtgaagtattgggggtgcagcatctgcagtatcactgctagtgcctcattgctgctgggtttcaagggcatccccatgagtcctgggatgtgggctgattgctgagatgaagaccagtgtgagcaactggggagaaatcctggagtcacagggaagacatgtgcctggtaactgtgccagtctgcagcgagtcaaggaaaaacaattttttttttggcttctggcaagtggtgctggttcaggctatggttccaattaggacatatggtggaactaacgaatatcttccaccgtacattgtcggccagatttagtgaggagaggatgtgaggttttctttgatgatggtgataccagtagctctcatctcctaagcacctaccaggtgtcagatcgtggcatgttgttgccttttgtcctcactacaacgccgagggtaggcatcatcgctccatcccgttggctctgaccaggagtctggaagttcctttattcatgtggaaggtggggcctgggtcctcctggttgaactgaacactggccataggtgagagctgtgtgagtggtgtgttgcaccagggaggggtgtggaggggtgagggtgggaggc

SEQ ID NO: 326 - DNA, 5500 bp, Homo sapiens
  misc_feature (1)..(5500): DMR2:129972801
tctcagggctgcagagccaactggggtaaacaagcagcaagaatctaatttctgaactgagacaataagccatatattctgaatggaaaattccagattgtaaaaaggtaataatgaacatgaatgttggcctcaaagagatactatgttatttaccctaaggaaaaaccgttctatttttcttgttaaaatattattatgtaacaagaactacaagcaccttcaaagaagagttgaacctcactttgtaatcaaataaatacaagttaaaatggctagataaccgtttttaatctaccaaaatagcaaaaggtttttgccccccatcatcaaaaatagcacttttttttttctttttttttcttgagacagagtctcactttgtcacccaggctggaatgcagtggtgcaatctcggctcactgcaatctctgcctcccagtttcaagcaattctcctgcctcagcctcccaggtagctggaattacagacgtgcaccaccacgcccggctagtttttgtatttttagtacagacggggtttcataatgttggccaggcttgtctcgaactcctgaactcagttgatctgcccgccttggcctcccaaagtgctgggattacaggtgtgagcctggccagaaatggcaatttcatagaatggtagtggaaacgtaaaatgctaaaacccgactgaaaagcaattttgcagtaagtaccaagagctttataacggttctttcactcagtaattctatatccacggatttagcctaaggaagaaaataagaaatacataaaatggttaaagagtaaatgtgcattgttagaaggttaaataattatgggatatacaattacaggagtcttttgcaaactttgaaattatttaccaagagattttaaaaacatgggaaattatttcgtattatgattatggcacttataaagtcaacatgtagtccaatcgtatctctagtgaaaaggaattcaccaaaaaatgatttactgtattttttaaaacatgggatttaagagacttcatatgaatatcttgactatgcattgaaattcttatttagggcctaacacagaggaggtgtttgctaaatgttgatttcttgctacctgtttttttcctccaagattgttgctgtatgtatctagggtccagaggagtccagaatattgttttgcgcatgttgcttattgaattaaaaaattaacacattcatgaaaaataaagaaattcacccaaatgttacaagtagttatttggcaggctgtaaatgtatacatgtcttcattcatctaaatttattcattcatctcataattccttttttttttttttttgagacatcttgctctgttgcccaggctggagtgcagtactgtgattgtggctcactgcaacctccacctcccgggttcaagcaattctcctgcctcagcctcccgagtagctgggatcacacgcatgcgccaccacgcccagctaattttttgttttgttttgtttttttgtatttttagtagagatagggtttcaccatgttggccaggctggtctcgaactcctgacctcaggtgttcagcctgcctcagcctcccagagtgctgagattacaggtgtgagccaccacgcctaaccatcatctcataattcaaaaggagtatttattctgatttatagtgatctcaatgatacattctaacatgttagaccataaggaaatgatttcaaaggccaggcacagtggctcacacctgtaatcccagtactttgggaggctgaggcgggcacatcatgagatcaggagatcgagaccatcctggctaacacagtgaaaccccgtctctactaaaaatacaaaaaaattagccgggcgaggggtgggcacctgtagtcccagttactcgggaggttgaggcaggagaatggcatgaacacaggaggtggagcttgcagcaagccaagattgcacccctgcactccagcctgggcaacagagcgagactccgtctcaaaaaaaaaaaaaaaagaaatgatttcaagaacgtaataatagtgacctaacctctatgcctgttctccctctgcccttcaaaaaaaattgtatattaaatttgagtattttggttttcatcagatactccaaatgccaacaacaaaataggtgtcaggcactcctacattccaagttgaggggctgggccggacacttacaatccgagattccactgggatgctgcagaggccattggaaagaggtcctagtgagctgtggcgtttcctacaagtcaagcccagacaatggcttcaacaggaccatttgtagagcttgacatgagtcccctggaatttggggaatgatttaacatctgattccaaagagtaaacactggtttggactgcttgctgggagagaaggaagcaccaccgcactgtgaactgcatgcacttgcagattatcccactggaggggtactgaagttgtttatactgtgagccatacagatcctggagaaggcactggacatgagtaggtttaaaagggaccctgtaccacaggcccacctgaaggatggaagtgatctcaataaaagggtaattcttcccggaacacagactctgagggtgaaactgcaagtggcactctggaggaggtatctgaacaaccatcaaggaaactgcagaagggagatcccaggtgatgaacagtgtctcaaaatctactacattccctctaaagagaaagagccaatagactggatacacagtgtacacagcacccagctgcctgatcacaaggcagcaactgtttattgtttttttaatttttttttttttgagacgaggtcttgctctgtcacccaggctggagtgcagttggctcactgcagcctctgcttcccgggttcaagtgattttcacgcctcagcctcctaagcagctgggactgcaggcacgcaccaccatgcctggcttttttttagtattttttgtatttttagtagagatggggttttgtcatgttggccaggatggtctcaaactcctggcctcaaatgatctgcccccctaggcctcctaaagtgctgggaatataggtgtgagccactgtgcccagccagcagctgctgtttaaggatgatccttgttctccctaactattcccaccatcccaagggaccacaagcagcgattactagtgaatagaggagaaggtgaagtcaactgcatccttctccccactgcaggctcctgagcctctcccagctggaggagaacagacattctgaattagaagaaagtttatagttgtaacaaatagaacgggctagaatggataatatcagatggtgactggaaatcctatgatctgcttgaaattccatccagagatacggtggaaggtggggaacaatccacaaagcaaatttacttggagaggggtgagaaagaaataataaagttactttctgctcctcttcatagaaagtctagcttgtggccgggcacagtggctcatgcctataatcccagcactttgagaggccgaggcaggcagatcacctgagaggtcagaagttcgagactagcatggccaacatggtgaaacctcgtctctactaaaaatacaaaaattagctgggcgcagtggtaggctcctgaaatcccagctactcgggaggcggaggagggagaattgcttgaacctgggaggcagagattgcagtgagccaagattgtgccactgcactccagcctgggcgacaaagcaagattctgtctcaaaaaaaaataaacaagaaaagagagtaagataattctatttaacatacttagcagtctctgacatagtggtacacaatcaatattgattatttttattattgaaacatagtaatagagtatcttattttccacttttagaatagaaaaataatagaggtcatagtatatcttgaccagaaattaattcaactaattaactaatatcttcataagaaattaattggaaggcaatttggcattactataaccatgtttttcattgtaccatactttctgtatatgcttatagaaaatacaaacataattttttctagcgttctcacacagtattaacctacactagcatctgctgaatggggtctgatttgggggcttttaactggcattgcctcctaaaattatctgtggagcttttaaaaagaacacattcccatctctgaggcaagacttacccaatcagaatctctgggtctggaaaccagacatgtgtattttgaaaaagctcctcaggtggttcaactgtaaaacgaggattgcgagtcatcagcctaggtcagtcacttagctcttttgaaaactagaagccaggctcctagtcttttggtctctgaaaaagaaccagagacacagaatacctattaggtcacttaaaacctgttttgttgttgtggtggttggtggtagtggtggtggttttttcgtttgtttgggtttgtttttttttttttttgagaaaggctgtgaaacaatacaaaaataactacagaccaaagaaactcagaacagtcatttgggcccccattcttgacttctattttctttttcctttttttttttttttttttcttgagacagggtcgcactccactgctggggctggagtgcagtggtgtgatcatgactcactgcagcctccaccatctgggctccatccatcctcccacctcagccttccaagtagttgggaccgcacgtgcatgccaccatgcccagccactttttaaaattgtatatagcgatggggtctcactacgttgcccaggatggtctccaactccagggctcaagcaattctcccaccttagcttcccaaagtgctgggattacagcatgagccactgcgctgggatgacttctattttctaaaagcaactctactgggagatttatgctgaggaaagtatgtggttatcagactcagtgcccatggtggatgacttcttttttttttttctttgtagagaagggatcttgctttgtcacccaggctcgagtgcagtggcatgaccacggctcactgtagcctcgacttcccgggctcaagtgatccccccaactcagctcccccaagtagctgagaatacaggcatgggctaccacaattgtctaatttttttttttttttgagacagggttttgctctgtcgctcaggctggagtgcagaggcatgatcttggctcactgtaacttctgcctcccagattcaagcatctctcgcctcagccttgggagtagctggggactacaggtgtgtgtgggtgagtctgggtgtgtgtgggtgagtgcaggtgtatctgggtgtaggtgggtgagtatgggtgtgtgtctgcgtgtaggtgggtgagtatgggtgtgcaggtgcgtgtgagtatgtgtttacattgtggtatgtgtctgttgggtgccgccattagggat

SEQ ID NO: 327 - DNA, 300 bp, Homo sapiens
  misc_feature (1)..(300): DMR2:130555701
atactacttcacatcccttgggatgactaccattaaaaacacagaaaataaaaaccgttgttgaggatgtagagaaaccggaaccctgcgcactgctgttgggaatctgaaacggtgcagatgctgtgaatgccagttcctcaaacaattgaacatcaagtttaaaaataaaacttaaacttcacttaaaatttaaacgtaaaattatggtagttcctcaaaaaattaaacagaattaccctttggtcagcaattccacttcggggtatacacccggaagaattgaaagcagggtctcaa

SEQ ID NO: 328 - DNA, 200 bp, Homo sapiens
  misc_feature (1)..(200): DMR2:131866101
ttcttgatcatggtgtagaattatttttatatgttgttgtttgatttgtcaatattttattgaaaaattttgaatctgtgttcatgtgaaattttcacctgtgttcataatctttagttttcttttctgtaagggttttatctatatttagtattagggtaacactgtcttcataaaaaatgttaggaaacattcttgtt

SEQ ID NO: 329 - DNA, 2200 bp, Homo sapiens
  misc_feature (1)..(2200): DMR2:132252301
gtgggggacgggtccgaggatgcagcggtgctgccctgccccgacatggaagctccggatggggccccaggcacagcccagagctggcggtgggcacacgatggtggacgacaccacagcatccagtggatcaccaccaggggcaagcgaaccacgggaccatggccatgagcactgccagatgggccgtgtggcaggcttccagccccagacacaccgtgacgtgccgggcgggtggggggcaggcagggggtgggtgggcgaggaggacggtgcctcagaggagtgttggggaggaggggcactggagctgtggtcagccagtcgctgggccgcctccaggggtggacggcgaactgcggcgactgtgacgtgctcccccaccctctccccggtggacccttcctatttgccttcctcccaacccccaacaagcccccaccaccgacgacgtgagacgacgacggcatgggaccttccaccccgccagggccaatgaaccccacaccatgagctgcatgaggcatgagggagcccccaagggaggaacccagaccgtgatggtggccacaggaactcggctgcagccggctatcttccctttctattttcatgggtggcggtgctgccctctctctcttcctcacagccgggagccccccttccccacgccacccaacgcgtgactacacagggccgcagggggagggggaaggggcgggcacagcaggataggagggcgaatgtcaccggtctacacttggggggacagagggccccgtgggccctgccagggaacagtcatgcaccccgaggagcccagaggcaaccctgggggattttgattggcaagtgacgctcagacaggcatagccctgggaggaacccgggccgcaagtgcattcgaagagtcgatgatcaacgtgtcttgcagttcacattaattctcccagctagctgtgttgttcattgacacaggagctgagtgatccaccactaaaagtcatacaaggttgatttggcgagggcactcccaacaacgggaggccctcctggcacagcacgtcacccagaggggttacctcaggctggccagtcagacagcaactggaccagactccagagaggggttggaaggtttcacaacacagagaggtggtgccgaccacagtggggggcaaacgctgacaccaccccatgggagcccaggggttcccgcccccacagagcggggtacaggccacacgtgcagcatgcacgacagcacgatggccactgggtaaagcccccaccgacatcagtggcgacacgcaagtgtggcgtggccccagctggccggggggacggagtcggcaggggaggcgagggaggggcgggcccctcctgaacggactccactgtgggcccactgcacctgacccacaggcagaccggcgacccctcaaggggtccttaaacctctgcaccagaatgcgctaggtacctggatggcgggggcggatgaggggggtgggaccggcatccggccccctaccctcgagaccccctagcgggaaggctggggagagcaagcgggccgggccgggccagtggcatggtttggcagaggtgacgatggtggcagcggcagcgatgggaacctggccagccccaaagggagtgggcaggatggggctgggacagtgggacagggcacgatgacagccccagtggggagggcactgagacccccaccccaccgtgacgccgagaaccacccccgcgcccaccgacacacacatgggggccacagcaggggactgctccccactgctcaccaggctgcgagccatccagcccgccccacgacacgcacacacggtttcatccccacacgcatgtctctttctaccccctctctccctcccgagttctctggctctcggggcaggtggggccatgcaacgaacaaagggcacgactccgcccatgcatgcgccacaggggaacacggtcagccaaggaggaaggacatggcggcgtctccgtggcttcgctcttctctgttaatgatccctccgcaggttcacctaccgaaactttgttacgacttttacttcctctagatagtcaagttcgactgtcttctcagcgttccgccagggcagtgggctgacccagcgggctgatccgagggcctcactaaaccatccaatcagga

SEQ ID NO: 330 - DNA, 1800 bp, Homo sapiens
  misc_feature (1)..(1800): DMR2:132274601
gatggcccaggatacagtgggtcacggcttactgaagcctcgacctgtgggaccacaagtgatcttctccttatctcaacctcccgagtagctgtgactacaggcggccatcaccacacgcaactcatcttataatgatattaagattctattgggacagggtctcgctctgtcatccaggctggattgccctggcatgatctcagctcattgcaacctcagcctccctggttggagcaactcgcccatcccagtctcctgagcagttgggattacaagcccacgccaccaggcctggctaattgttttatttttcagagagacggggttttgccatgttggccagcctggtcttgaactcctggcctcaagtgatccacccgcctcggcctcccaaagtgctggaatgacaggcatgagctacagtgcccagcccagataatctttttaataaattgtagagaaggggtttcgtcagccgacgggtggagggtggggtgggttttactcagcctgcgtactgtgaaaagagtgagtgagtgtggtttgtgaactagatgtggaaattgtgtgtgtgtgtgtgtgtgtgtgtgtgtgtgtgtgtgtgtgtgtaggagagagagagagagagaccaatcccaccatgaggacctggaaatggtgtttgatttgggtccttgtctagtcacctgtctgtctgtagatgactgaggattccacaaatgaaggtcagcagtatctattgagctgtttctccctctcatgcgtctcatgtgtgtggtggagaaagggaagaaaagaggttctgatgtgaagttgtcttcaggcctgaggaagctgaagtcagcctgatgggaaggagggcatcctatgtgacatttccatacctgcgcaccctttacaatgctggggctgccagctcaccctgtacctcaacccacccccaagaacagcacggtccggggtggtccagtctcatcccatccggcccacgcggggcatctggtggaagtctttgccggaggattcgaaagcagcgtcaacgcgcttcccctgccgttgcctggcaaaggccagctgtgggagggtagcgggacgtgatgggggcttccgcctcagagctccctgaaaggtggcaggtggccagtgggggacgctgaggcagagacgtctggaaggatatagatctggaagccgcgtcagtcctctcccatacctctcctatggaaaatgccatggccgtggtgggagccttggctgggggagaagcgaggacaagggggagagggaaggaggccctcaggaggatttagccctgaaaacccactcagccaagctcccgctgtctttttgggtccaaggtacaccctgggagacggcaagagaaacgttcactccgtgctttttctctctttatttttttcatcttttccattttacaagagatgctcatttcaacaaccagacagtggatgtgacaggagaagtgtcaaggccaggagtttgagaccagcgtgagcaaccgagcaatacaagtaagagagcccagctgaaggaaatgaaaaaggaggaggaggaggacctgggaggctgggggtgggggtgggggggaggagaaggaaagaaaaaaaagaaaagaaaagaaaaaaaaagaaaaacaaccaccaagaaagttaaaattctccaatggtcagaagttcaagaccagcctgaccaagatggagaaaccccatctgtactaaaaatagaaaaattagccaggcatgatggcacattgttgtcattccagctacttgggaa

SEQ ID NO: 331 - DNA, 200 bp, Homo sapiens
  misc_feature (1)..(200): DMR2:133301501
acaaacctgagaaaaacaagcaatggggaaaggattccctatttaataaatggtgctgggaaaactggctagccatatgtagaaagctgaaactggatcccttccttacaccttatacaaaaatcaattcaagatggattaaagatttaaacgttagacctaaaaccataaaaaccctagaagaaaacctaggcattacc

SEQ ID NO: 332 - DNA, 200 bp, Homo sapiens
  misc_feature (1)..(200): DMR2:135713601
tgtgccatttaggaaaatgcccttaagtgtgtaatactgaaaagaataagataaacctactattgaaatggtagtttgtaaataaccagtctccattaaaaggaactagggctccttagaaaaataactgttgccagagttggtgcagggaaagtaccagatgggtgtaggccatcttggctatgccagaaagtaaggaa

SEQ ID NO: 333 - DNA, 800 bp, Homo sapiens
  misc_feature (1)..(800): DMR2:136946301
actggaaatgttgcagaacaacaaatattgctgcccgatccttcctctggaaggttcatcccagaggagctcccacctgtatgacgtgtcagtcagcccctactgggaggtgtctcccagttaggctacatgggggtcagggacccacttgaggaggcggtctctccattctccgagctcaaacactgtgctgggagaaccactgctctcttcagagctgtcagacagtgatgtttaagtctgcagaagtttctgctgccttttgttcagctatgccctgccgcaagaggtggagtctatagagggagcaagctttgctgtgctgtggttggctctgcccagttcgagcttcccggctgctttgtttatctactcaagcctcagcaatggtggacacccctccgcctgctgggctgctgcctcgcaggttgatctcagtctactgcgctagcagtgagcaaggctccatgggtgtgggacccaccgagccttgcataggatataatctcctgatgtactatttgctaagatggttgcaaaagtgcagtatttgagcgggagtgtctcatttttccaggtacagtctgtcgtgacttcccttggctaggaaagggaaatcccccaaccccttgcacttcctgggtgaggtgatgccctgccccgcttcggctcaccctccatgggctgcacccactgtccaaccagtcccagtgagatgaaccagttacctcagttggaaatgcagaaatcacccatcttttgcatcaatcacgctgggagctgtagattggagctgttcc

SEQ ID NO: 334 - DNA, 2100 bp, Homo sapiens
  misc_feature (1)..(2100): DMR2:138455801
aaagggaaatgcaaataggagcacagaagccatggccagtaggtaggggtggggcctgaaagccctgcttactttcttagcaggaaagcttgtagcctggggcaagatctcagccctgctcacaggctgcctggatatgctgttgatggggcatgatgggagtgagattggccttgctggctgcatgggagttgggtgatgcctgtcactgctagctttcccctacttccctggtgatctgtatgaaacagaagaggcagccataatctccctgagaatataactccattggcctgagaaccacagcccccataccccagggcagctgcagcaagccctgcccaaggagagtctgagctcacaccacctaaacctgcccctacatgatggtctttctctaccagccctggtatccaaagacaaaagatataatctcttgggacctctatggccccacccaacacctgagaaaccggaatacttattcaggcaaccttagggcaagcttgtatcagctgatgctcttttttttttttttttttttttttctgagatagagtttcgctcttattcctcaggctggagtgcaatggcacgatcttggcttaccgcaacctctgcctcccgggttcaagagattctcctgcctcagccttcccgagtagctggaattataggcatgcgccaccatgcccagctaattttgtatttttagtagagacggggtttctccatgttggtcaggctggtctcgaactcctgacctcaggtgatccacccaccttggcctcctaaagtgctgggattacaggagtgagccactgtgcctggcccagctgatgttctcttgaaagcaccatctcctggctggagaccaaccaatggctagcaaaactagcactcaagaaaaccagtgcactaaacacaactacaaccaaggaccttcacagagtccacgacactcccttactacctccactggagcaggtgctgatggccatggctgaaagacctgaaaaccaatcacatcacaggactctttgcagatactccccagtaccagcccagagtctggcagccccactgggtggctagtctcagaagagcaataacaatcactgcagtgcagctctcaggaatccccatctctagggaagggggagaacaatgggacaaaagaatctgaacagcagcccttgagtcccagatctttcctctgacatagtctacccaaatgagaaggaaccagaaaaacaattctggtaatatgacaaagcaaggttctttaacaccctcaaaagatgactttagctcacgagcaatggatccaaaccaagaagaaatttttgaattgccagtaaaagaattgagactgttgattattaagctactcaaggaggcactagagaatggtgaaaaccaacttaaagaaattaaaaaaaaaatacaggatatggatgaaaaaatcgccagagaaatagcataaataaaaaacaattaaaacttctggaaatgaaagacatacttagagaaatgcaaaatacactggaaaatctcaaaaacagaatcaaacaagtagaagaaaaaaaacttccaagtttgaagacaaggcatttgaattaacccaatctaacaaagacaaagaaaaaagaataaaaaaaaaaaaaagaaagaacgaagcctctaagaagtctgggattatgctaaatgaccaaacctaaaaataattggtgtttctgaggaagatgagaaatctaaaagtttggaaaacatatttgagggaatcagtcaaagaaaatttccctggccttgctagagaactagacatccaaattcaagaggctcaaagaacaccaggtaaattcatcacaaaaagatcatcacctaggcacatagtcatcagattatctaaattcaagatgaaggcaagaatcttaagagctgtgaggcaaaagcaacaggtaacctataaaggaaaacctatcagattaacagcagatttctcagcagaaaccctacaagctagaagggattggggtcttatctttagcctccttgaacaaaacaattttcagccaagaagtttatatccagtgaaac

SEQ ID NO: 335 - DNA, 1300 bp, Homo sapiens
  misc_feature (1)..(1300): DMR2:139092301
taaaacctagtaaataccattctggacattgatcctgggagagacttaatgacaaggactccaaaagcaatggcaataaaaccaaaaactgacaagtgaaacctaattaaagaacttccatacagcaaaagaaactcagcagagtaaacagaccacctatacaatgggagaaaatactcagcatagtatgcatccaacaaaggtataataacaagaaactataaggtacttcaacaaatttatgagagaaaaatgaacaacaccattgaaaagtgggcagaggtcatgaacaaacacttttcaaaagaagacatacatgcggccaaccagcatattaaaaaaaggctgaatatcactgatcattagagaaatgcaaatcaaaaccacaatgtaatataacctcacaccagtcagaatggctattactaaaaaatcaaaaattaacagatgctggcaagtttgaagagaaaagggaatgcttgtacactgctggtggaaatgtaaattagttcagccactgtggaaagcagtctggagatttctcaaagcacttaaaatagaactaccatttgacccagcaatcccattactgggtttatacctgaaggaatataaattgttctcccataaaggcacatgcatgtttatgttcatcgcagtactattcacaatatcaaaggcatggaatcaacatagatgcccatgaatggtggactggatgaagaaaatgtacatatgcaccgtagaataccatgcagccataaaaagaatgaaatcatgtcctttgcagcaacatggatggagttggaggtcattatcctaagggaagaaacgcaggaacagaaaaccaaatacttcatattctcacttagaagtgggagctaaagattgagtacacatagacacaaagaaaagaacagtagactttgggtcctaattaaggttatacggtgagaggaaggtcaggattgaaaagctacctatcaggtattatgacgattacctgagtgacaaaattgtctgtacatcaaatgcccttaaaatgcaaattacccatataatgaatctgcccatggaccccttgaacctacaattaacagttggaaagaaaaaataaaggctgaatcttaaaaaaaaaatcaataaaattgctaaacatatagcaagattgattataaataaaacagaagacacaaatcaccaatgagaggaattaaataagaatgtcgttacagatcctgaagcctttaaaaagataataggctgggtgcagtggctcatgcctgtaatcccagcactt

SEQ ID NO: 336 - DNA, 200 bp, Homo sapiens
  misc_feature (1)..(200): DMR2:139292501
tcttttttgttaagtacagtttctagttgctgcgaatttttaatatgcttctgatgaactgagattggagttgtttgggctgtggctggacaatcctgggggccactgtttgggaaaacaagctcattagagagagagggagtatcagtgctcacctacacttggaagtttgacttggtagattagctttaggggaattg

SEQ ID NO: 337 - DNA, 2700 bp, Homo sapiens
  misc_feature (1)..(2700): DMR2:141210901
aatagtctttgcagcctaacagctaaactaacaataaagacaaatttatagcacagtagagtgctaagaggtttattttttcatttttcctattatttgtttattgagaggcagtctcgctccgtcacccaggctggagtacattggcatgatctcagctcactgcaacctctgccttccaggttcaagcgattctcctgctacagcttcccgagtagctgggattacaggcacccactaccatgctcagctaattttggtatttttagtagagacggggtttcaccacgttggccaggctggtctcaaactcctgcactcaggtgatccgcctacctcagcctcccagagtgctgggattataagcatgagacaccatgcccagcccatttttctttttttttaaaaaaaaaaaacaaaacaaaaactaagcattcagggccgggcacggtgcctcatgcctgtaatcccagcactttgggagaccaaggcaggtggatcacgaggtcaggagtttgagaccagcctggccaacatggtgaaaacccacctctactaaaaacacaaatactagccggccctggtggtgcgtgcctgtaatcccagctacttgggaggctgaggcagaattgcttgaacccgggaggcagaggttgcagtgagccgagatccggccattgcactctagcctgggagacagagcgagactccatctcagaaaaataaaataaaataaaaactaagcattcaggaaggctttttatggctatgtacggatcataaatcagaacaggttacttcaaaataaattcatctaatgttaatgtaaaacttaaggaataatttaatgctaataccttcaacattaagcatatggtatcaggaagggaattctgaaaattctctggaaacacgtcctcagatcaacatatttgataattgtaactgtccttttttgactctcaatggatggcctgatctcctcactgaaattccagttaccaacagggaagtaattttattaatcaacttcacagccacatgcacacaaacacaagactatgactcagaaaaaagccacttttatgtttctatataaatgtgctaaatagaagataagaagcttttaagtataaagagtttaataaaacatgtatttgcttataaaattgcaattaattaaaaaagtaaagtattttgagaataaggagttataatatccttatagaagatgtgcttagaattcttcacagagtttcttagggaataatataaaatcagttactgcagcaaaaattcttgtataaaatttacttttcccccaagatatattgatcaaaaagtctagatttttttttttttttttttttttttttttttttttttttttttttttgtgactgagcctcacactgtcgcccaggctggagtgcagtggcaccatctcggctcactgcaagctccgcctcctgggttcacgccattctcctgcctcagcctcccaagtagctgggactacaggcttccaccaccacgcccggataatttttttttttttgtattttagtagggacagagtttcactgtgttagccagggtggtcttgatctcctgacctcgtgatctgcccacctcggcctcccagagtgctaggattacacacgtgagcgaccatgccggccaaaaagtctagattctaaatagcaaaaaaacaaaacaaaacagaaataacccacttttgctggggaaagatgtaggtgatgtagatcaaaaagaaaatatagttctctaggtatatgcaaggaattgattccaagacccacccctcaactgaaaataccaaactctgaggaaggtcaagtaccttatataaaatggtgtagtacaggaagtcatcatttaatgtaattgattcgttcttggaaactacaactttaagccaaatgttgacgtataatgaaaccatttttaccatagagtaattgatataaacaagagttatgttgctatggcatatttctggtcacgaaaacatcaccaaacttctaaatacagacccaaaacacttctattctttttgctttttgagataatctcactctgtcttttaagctggagtacagtggttcaatcatggctcactgcagcctcaacatccctggctctggtgttcctcccacctcagcctcctgagcaccatcatcctcagctaattaatttttttttttttttgtaaagatgaggtcttgctatgttgcccgggttggtcttgaacccccaggctgatgtgattttcttgcctcactttccacagtgctgggattacagacatgagcccccatgcccagccaaaacacttctaatgttaaacattgaaataaatatgagcgatacatacatttaataaagattaataaaaacaagtaagataattatttatcaaagtaacgtaattattcaggttctggtggcagccagaacctatcccagcagctcggggcatcagtcaggaaccagccctggacaggccaccatttcatcacaagatgtactcgcacacacccccacaggcacactgggaacatttagacacacttgttaactagtggcacagctttgggacatgggaagaaaccaaagtccctgaagaaaacccacacagacatgagagaatgtacaaactccacacagacagtggcc

SEQ ID NO: 338 - DNA, 600 bp, Homo sapiens
  misc_feature (1)..(600): DMR2:143336601
tggctgtgtttaattggtgatgatgtgggtatgaaaggccccagggaactaccctgtagttctctttccacttagctcccttctttcccaggcccaggtatgccctaggagaggaggcagagtatgaaaatcattcttaatagtgagaagtcatatatttagtcagacatgctaactggactattttgtgtttgaagaagactttctgctttctttttgaattattgtcacatttcagttttatttatttactctataatatttattgagagcatgctttgtgccaggccctaggctggagactgggaaaacagtggtgatcatggataagattcctatcaccaaggagtttacaggctgtaaggaagagggccctagataggtatgaagctgccaatgtgcagtgtttcaggaggtggaagggggtgggagagaaacctccaagacatgcaggtaatctggtcaaggaggacagagggagggagttttcggtgaggtggaaagggcagaaggtggagcttggataggtggggaggtaaggggttgaaagtgaactccagactgagtgaagagagtgtgcaaaagtgctgtgaagatggt

SEQ ID NO: 339 - DNA, 1400 bp, Homo sapiens
  misc_feature (1)..(1400): DMR2:144492201
attgtgattctaagtacagaaggtacttctgcatgctcatttccttgagtagaaaatagcccaattttcataatgaaatttggaacaggggtaagatatctacccatggtatgtattaaatgttgattgacttgttgacgggcagaaggagctcactaaatgccaacccaaagtgaatgctcaagtgacaaagaagagtggaggaaggggacagaacattaatcacctactatgtgcttggcactttacctgttaccagtatttcttcccaactgccctataacatgagtattattatgagaagcagagatgcagttagactgaacaacttgctacaggtcttatggcttgtatgaaagtagaaaccaaatttgagcccagatgtccaaagcctacactcttccgagcacccacactgcctctctgcctccctgactcccaagtctcaaaggtgtcattgagaaaggcagagagccagttgatttaaatacaaactaaaaacaaaaacaaaaacaaaaagcaaacccactcaagtattcaaaataacatagctgtcacaaagtgaatttcaaaaagttattaatatggtggtagggaatctgacataaagttacccaaagcttttttctacatatgataatgtatactgaatctttaatatacccgctgtattcattatacctttgctttaacgaaacaatttttgtatgtcatggcctgagctgagatgggcaagactgccctcaagccatttacacatttgtggggagacaaataggaatcagatattttaagtgctgtgacaaaagtcatctcagaatgtattctttttggaggagatgctgtttctataagaaaaagtaccatgtatatttcctggaaatgtagaggtagaatagcatgccaatcactatgactatttcttttttcttctttttttaagtactctccaaagagtaaaaaaaaaaggaacgaatatctcaggctacggttattgtttcctcttttcaagaatgtttcagcaaggcccagaaactgaagtgcctccatcgtagggttcctggcatcctgattagtcacaccttgaaacagtcataatcagaatttagtgagcgttttctaggctccagacactgtctttagaattttgtgtaatactcccaaagattctataaaacaaatactgctccccatttttaagcattaagaaccgaagttcagagtggttaagaaacgcacccaggggcacatggcatggagagtaaatggcagaatcagaatgtggacacaaatttgtttgggtctgaatcctgtgttcttttcattatatcgagtgtctggcctccttggggagggaggagaactgggctccatttgttacaagtgaatagatctagaga

SEQ ID NO: 340 - DNA, 100 bp, Homo sapiens
  misc_feature (1)..(100): DMR2:147820001
aaaaatacttattattatcatggaatgacttccttatcataaaaagtatgtaagattataataaataagcattaagaaatctcatcaaaagacatgctta

SEQ ID NO: 341 - DNA, 500 bp, Homo sapiens
  misc_feature (1)..(500): DMR2:149391701
ccctgagttctccctgcctgtgacatacctccctttcaataagaggaagaggtgttgctggcagaagctttctggaagaatagaaggtgtattagaaggaaatgtggctatgtgcatccctattggtggggaaatagaaactaattgatgtacctcaccaggacaaatggtttggccaactggggcccagaaacaaagcagggggaagccatagaagtcggtgcctgaatcagctagggctgccataacgaaataccacagactgggtggctcatacaacagacatttattttcccatagttctggaggccaagaaggccaagatcaaggtgccagccaatttgggtcttggtgaggacccacctcctggcttacagacttttgccttctagttgtgtcctcccatggggatggggtggttagggcagaccaagttccatggtgccccttcctatatagggcactaatctcatcatgagagtcctactctcctgaactca

SEQ ID NO: 342 - DNA, 200 bp, Homo sapiens
  misc_feature (1)..(200): DMR2:150048401
tagaactgggcagtggtgcatccatctctcatgccttcccctatgagcagagcagtcaggtaaagcctggggcgcagacaggaagaagcccaggtacaggacacttttaacctttgtctggaagatatgcaaattctatttctctttgatcaagcaactaaacagctaaactaatgaataaaatgtcaggcctttccttg

SEQ ID NO: 343 - DNA, 2400 bp, Homo sapiens
  misc_feature (1)..(2400): DMR2:151460401
gttatgaatgactaacataggtagcacaagagaaaatattttagaacttttgtttaggattattgttattttagaacttaatattttgaatagaaataaataatgcctagataagacacctatgttcttatcaactagctcatgctagttgccagttaacttgacttttagacaacagttctctcttccatgacctccagtaaaggttattctagaatcttgagaccatggccctggtgaaatgaaagaaaagtgttattttttaagaatacctctgccacattcttgtagcaactataaatagaattaaagcaatggttccaatgaacatttattaagataatattgtagtaccaaagttacttgtatgtagggcattttgtattggcgactttcactaagtcatgcctcaacttgagagctgcaaatatactctcctcctgccaaatcagttcatttccatgtgttagcctgacagacggttttgtccatactttgtagttaagcacagacttccctacttcgtaaagaggtttaatactgtctactttcttagtatttattagaggcagaaagaaagtggggaacattgtactaatttgttacggatcatgagtatcatcaactttcataatcactattgaaaaatggtgtcattattagaggagagtgatagaaatattggaaaataatttggaagctaaaatgtacatttgcttattttttcaaatctgcagctgaaacttgaatcttcgtctttaaaagtaaagggtgaaattcttttggaagaggaaaagtctactgactttgtgtttatacctccagaaggaaaagatgcaaaggaaagaatattaactgatcatcaaaaagaagttctcaaaacaaagcggtttgtaggccttttatcttgagttgggtatttggtattcaggcttagatttcatgcaagaaaagtgtaactttgtgtttagaactaaaatatgtgtactaattttttttttttttttttgacacggagtttcactctgttgcccaggctggagtgcagtggtgccatctcggctcactgcaagctccgcctcccaggttcacgctattctcctgcctcagcctcccgagtagctgggaccacaggcatgtgccaccacgcccggctaatttttttgtacttttagtagagacggggtttcaccatgttagccaggatggtcttgatctcctgacctcgtgatctgcccacctcggcctcccaaagtgctgggattacaggtgtgagccaccacacccggccacgtgtactaaattttaatgcgaaaagttatactttacataaatgcatttcataatgtataaagctacctagtaatgtaccaaatatttataaactgaatttcttctctgaggtgggaaatacgcatttaggtcatgattttataacaatttagtagaactgtaattttcgtttctttttatgttttgttttatgttgttgagacagagtctctctctgttacccaggctggagtgcagtggcatgatctctgctcactgcagtctctgcctcccgggctcaagtgatcttcccgcatcaacctcccaagtagctgggactgcagatgcacgccaccatgcccagctaattttttattttttgtagagataggattttgccatgttgcccatgctggtcttgaactcctgagctcaagcagcccacccacctcaacctcccaaagtgctgggattacaggcgtgagccaccgtacctggccataagtttaatttctaattgtaagaatatcatccggtttttgaagttacttatatatagtttttttcaggtgtgatattcctgccatgtataataatctggatgtttcccaagataccttatttactcagtatagtcaggaagagcctatgtaagtacagaagccatcaaacttttatatctgttttattcattttcaaataattataaaaataatattcttactaatatttatttcagggaaattcctactttaaccagaaaaccaaaggaggattctaagatgatgattacggtatgtttgacatttcatattttgggctttttagaatcacccttccattatacagtctgttaaactgctgaaatgtctgtaggtcttccctttattaattttaaaatttattgtagatttattgtatgatttccttttaactcccattcagatactagcagaatatcagcagacactagtcagtgtgtgtgtgtgtgtgtgtataaaataaatgtacttggcttttcttgaatatttacaattaggaacacaaactgttaggtatctaccactaactttggaatagttgccatatattgaatgtcagtgattatctttgggttaccgaagtttt

SEQ ID NO: 344 - DNA, 1100 bp, Homo sapiens
  misc_feature (1)..(1100): DMR2:152679601
actatcaattattgaatattcactgagtgatgccatttgaatacattatttaatctttataacactgcaaaatgtgtaacataattctgtatctagggactgttacttgaagtcagaaagtaacttgtttaaggtaatatactcattaaaaagcagagacaagattcaaaaccagttctatatgaatttcaaatcctatttactgtaaccattcacaccccattataggtcaagattatcatccacatttttttttttttttttttttgagacggagtctcgctttgtcacccaggctggagtacagtagctcgacctcggctcactgcaagctccgcctctcgggttcacgccattctcctgcctcagcctctctgagtagctgggactacaggcgcccgccaccacgcccagctaattttttgtatttttttttagtagagacggggtttcaccgtggtctcgaactcctgacctcgtgatccgcccgcctcggcctcccaaagtgctgggattacaagtgtgagccaccgcgcccggcctatcatccacatttaacagacttctctgatactaatattagttggaaaaccataaaagttcaaaaaaaacaaaatctaatttagtcatgcttagatttcagtttcgtagtttatgaacgaattaacttattatgtaagaaaacatgtaggtataatatacttaaaatcgaataaacaaaacctgttagggtagtatgagaaatctattcaaagtgtgaatccaaacagagtgtcttggacaaagtatgtaattaatatcattggctataaatcagtactggaatacatgtttttaaaaatcgtccgacctcccctcccaagcactgctgttcatgttagtacagcaacctggaaaatacttttaccttctcaaattccttaattaggaagagaagaaaacaaaaaggtataccaccagctaggatgaaacttaagcatagcctggagtgccagatcaactcttacttacttagcaccccagagtttctaattaaacaacatgtgacattgcttaattcagtttattccttcaaccttaactttttcttcaatatctgt

SEQ ID NO: 345 - DNA, 4400 bp, Homo sapiens
  misc_feature (1)..(4400): DMR2:161278601
tttatcacccccgaccagagaaaaaccctgtgaacattagtcactcctcattctgtctcaaaccctctccctgaccctcagccctaggtaacaactgcatagagcgatcaaccccatatgcatagatttccatattgtggacatttcctataaacggaattgcataatacgtgagctttgatgactgacataacacttttagcacaatattttcaagattcatccacattgcagccttacccacagggggaaaccatttttttggggttttagtaacactgggtgttttctccttccttccttccttccttccttccttccttccttccttccttccttccttccttcctatttctctcttactccttctgccctctctctttcatgtgccttaggtgcatcctacgttctgcgtctttttggggaatcctcgacaggtgctggaaaattgtgttattgtaattatttaccgctatctctctttcatggttctccatcagttgtaagcatctattggtttatcccaggtcactaagtatattttaattaggcacacctgtttttctttatacagctgtttctggagtatagggtcgcatgctcataaacccagtgtaactcagaaacgcatctaatattccaataaacccatcataacgttgaaaaatcataaaccaaaccatcataagtcacggtttgtccgtggatatgggcttcatcaattccattgtattcaataatgctgtacaccattaacaatggcagactgatagggcgtggatattgatagcattataaaaatcagttattagagggatactttaacctgactgaagaactgatctaatggtattagtacagtgcatgattatgtgaaatgttttgagacagagtagtacatttgtgaatgaaattttatggcttttttcacttagtaggaacctttgtgtgtggaaaactgagaaaattgctttctgctgtagagtctggcattcattgtagattaaagcttatttttctgtgagtaaatcttattcaataaaatactactctttataataaaaaacaaaaacactggtgatgtgaagtcattatcctcagcaaactaatccaggaaaacaaaaccaaacgccacattctcacttataatgggagctgaaaaatgggatcacatggacacaggaaggggaacaacacatactggggccttttgggaggcagagcgttaagaaaaacagctactgcatgctgggcttaatacctaggtgttgggttgacaggtgcagcaaaccaccatggcacacgtttaccttagtaacaaatctgcacatcctgcacatataccccagaacttagaaacaaaacgaaacaaaagaaaacgagaaagcaatagcaaaacgctaacggcaaaacaaagtttcaaactcagaaagtgacagaccaatttttggttcaaatcatggttctcaacccaggtgccataaggtcaggataaagaatttgattacgtattgtaaataagacatgcagcaaatgaccagaaaaattattcccaacatatgtgtgtcttcgaattcaacggtgacgctatctaccgggacacagcattagattccaaagggccgagtcccgcaagactggcctcccacactaataacaatgggaagccctacgttgttttacctgtgcttctcagcaactggctataaatcaggtttccaccactcccagttttagttgcattcatttgctggaagagctcacagcacgcagggaaacactgacatttcccattgtatttttctgaaaaaaattcagaaaaaaattttgggcccggcacgtggggaggggcgcactgccttccaggaagtgttatccagaagctctctaaacccagtccttttgggtttttatggagacctcattctataggcatgatgggttaaaccataggctattggtgatcagctcaacctgaggctctcaactctccctggaaattggggttgaggctttgccattctcagtctgagtaaaagaatttacacaaacggaattttaaaacagattagcataacaggaaacttaattagatgattgaattatctggagccacaccttgatattcctaacctgagcaccctcatccaacgaatgctccacccaactggctcccaagtctctacggggttccagagcaaaagaatgtttatacaacgcatatctccacctcttcttcaaagtcttttcgcttacacgggtaattcttaaactgccatgcatcagggtcagggggagggcttgttacaacacagatctgtggatctccggggtttgagggttgcaaggatgctgctggtgtcaaaaccacaacgtgggaaccacagaaccactagttggttttcagtgtttcagtgcatttaattcataatatatttggccaagaaaacttgtaaggtcttagattgtcccaaaggtggcgcatgaaatccaatcaggagaacagtttcctacgaggtgtagcctgggaaagttgggggtgactggtggaaaggaggagtgaagctccgccctttctgctgcgaggctgcgcccgaggctatttaaacccaccctggcaggcctgtactcagatcttcgcagagcggagcagcggccggagcgtttggcggactctgcgtggacttggagctcacagcgtcttgcgacttggaagcggattcagaggacaggacagaacacttgggcaagtgaatctctgtctgtctgtctgtctgtctcattggttggcttatttccattttcttaaggagcacatacctcacaccacacacacaaacacacacacacacacacacacacacacacacacacacacactccttcattctgcgggttagaaaattagtgggggtccctgggagctgcaggtttcctaatcatgtctgcacctaagaacagtagggtcttgtctggctcttcttatgaacggtcccccagcccggactccccaagatccatgctagcctcacccagcttctccctctcccctctcagatactcagacttaagaggaagctcctcaccagggatccggagctaccattcaccatcccctagggcttcaccacactcacctctgtcatcaccagtatcccacaagctcccatttccctgtcctctccgtgatgggcaatcaatgaagccattgggctctcccgtgtcctcctctgaggattcttcagagtcaccacgttcatcaataatataccacatgttcctactgccatcacccagcagctcacccccagctctcggggagtctcctgtgtctcccagctactctccaaacaaccccagatttcagctggagtcagccctccacacccaggaatcacctacaaactcacgagcctcacggtgctcctcccctatgtctttcaactcttcacccccaggcctcagggactctcctgtgtctcccagcttctctccagccttccccagatttctgccacagtcagccccaggcacacaggggaaccctggacactcacaggcctcacgagactatctccctatgacctgtatctatacagggatggctcccacgcatccctcagtgaccccaaacccatctccacttacactcagacactcccagggcctgacagctactccccgttattgtccttcagttcgaagccctggccaatctaccagccaacatgatgcagctacctggccatttctccacatttctggtgagggccccacacccagccgcagaaaagcccctcctgcattccatcctcacacacaggcctgtccatccacttgctactgtcacactcttgccagcagaagaggcccctgtaatggccgatatcaccgcccagtctatcctcaccccacagctatgcagcgggaccctcctgctggcccacgtggctgccagagcccatgctggcactacactccagcatgtcggcgtccctgcgggccacactaccggtgacatggctagcatgaccctccttcctggcagtgacactgctgatgtgaaccccatctctactaaaaatacaaaaattagctgggtgtggtggcgggcgtctgtactgtagtcccagctacgcgggaggctgacacaagagaattgcttgaacccgggaggtggaagatgcagtgagctgagatcatgccactgcactctaacctgggtgacagtgagactctgtcaaaaaaaaaaaaaaagaaagaaagaaacgaaaagagcagcaaagtttgcaaataatttttcaaaaacttatagcagaaataaatttacctctataatgacataactcactcatttgagttcaccgattattcttaaaagaaaaacaaaaacaacaagg

SEQ ID NO: 346 - DNA, 900 bp, Homo sapiens
  misc_feature (1)..(900): DMR2:161516401
ttaattcttttgaatacatacccagaagtggaattactggttgatatggtaatactatttataatttttgaggctccatcatactgtgttctatagtggctgttctagtttacatatccaccaatagtgcacaagactccaatttctccacatcacgtctttgccatcattaatatcacttgttattttgtttgttttttgtttttttaagaaaatagtaaccatcttaatggctgtaagatgtatctcattgtagttttgattataatgattaatgatgttgagcatctttccatgtgcttattggtcatttgtatatcttctttaaagaaatgtctattcaagtccaattcccatttttgaattaggttgtttttttgttgttgaggtttagaagttcactatatagtctgtatattaattacttaaaagatatataatttgcaaacattttatcctatttcctgggttgctgttttactttattaatatcgtctcatttggtgctcaaaatttaattttttttcactttttcctatcaacatttatttacttattttatttaagtaggtttttggggaacaggtggtgtttggttacatgaataagttctttagtggtactttctgagattttggtacacccatcacctgagcagtgaacactgtacccaatgtgtagtcttttatccctcaccccctcccagtctttcccccgagtctccaaagtctattgtatcattcttatgcctttgtgtccttatagcttagctcccacttatgacacttatgagtgagaacattaaactttattcagtccaatttattttttcttttgttccttgtgacattttcccttttttttcttagcttatcatttgttcttttcaacttttttact

SEQ ID NO: 347 - DNA, 200 bp, Homo sapiens
  misc_feature (1)..(200): DMR2:161549501
cccagggctccttctatgcgcccccccaggcctgaacagcctctttgcttaaaccagatctttcttccccatcttcttagccttcatcttaattaaagtatgctttcctttggcatacttgctaagagccctatttttccttctgatttgcaattttgaaaatgaggaaaattcctttatggtatttaattttagtcctt

SEQ ID NO: 348 - DNA, 1800 bp, Homo sapiens
  misc_feature (1)..(1800): DMR2:162062901
gagagggttcttgggggtcaccttagcattctgcctaccacaatcaccttgtctgttgtgttgagaatacaccatagggaagtaagaaaaaaaaaaagagagatgttggcaataatttaggggaagggcaattgtgtctttgaccagggtagtaggagatgaggtggtgaggtagggtcaaactctgagagaatatgaagatacagatgataaaactgccgacacattggatgtgacttgtggatgaaagagaggagttgaggagaacttgcatggatattggcctcagtaactacaaaaatagaattgccatttgctgaaataagatgtactaagggaagacaaagagttttggaagatgtcagtatgagatgccaatatcacatccaaatggagatgtccagtaagcagttgtatactgcacctagagctcaggaaaaggtctggtttgcaggtaaaattggaaagttgccaagttgtaaatggtatttgaggccatgggagtggatgaggtcatctaaggtgaaaaaggaaaaggtcttaggatggagccccagagtagtccaaggtgagaagttgaagacatcaggaagaatacctaaggaggctgggaaagactgcacagtgaggtagaaggacaaccaggagagagtgagagccccgaggggaggtggagaagaaggatgactaattgacaggcacacgagacacagagtgagaagcaactcccaatctgcaacacagagattagggaccttgacaagaatacagctgttttagtggtgtggtggggataacccttattccaggaggcttaagagaaaaaaagggagaggggtaacagacagtgataatagaaactctttaagaagttttgtggtaaagagagcagagaaagggagtggtaggttggcagggatgagggtggaaaaagacagtttccttcttattttttaagaatatgagacactactgtatgttcatgatcaaatagagatggaaaaaatgatgttgccacatgcaaggggacagctggagcctaatctttcagtaggcaaaagggatgggacccagggcacaaacaaagggcctggtcttgggtaggagcctgagcattcattcctctaacttgggaggggagccgatacaggtgaatgcactgatgagccggtgagaattgaagttctcttctaatggtttcagttttcttatcaaaacaggaagccaggtccttagctatgaatgagcatatggaggaggtgttggaagtttgagtggagaggagatacctggaatagttcaccagaaaagcaagcgagtgagcagacagggaaaatagggccagattgccaggaaggaataagggtccactggctgctgggttctgggttctcctttcagtacagccaaacccttttcattttaagaaaatcattaccatgcagagtaattttttcgctggaaattttaaaacaaagatttgagtcatcaattagattttttttgcccatgttagattaaattatagcttctggaccttgtgaggttattttgtttgcttttgttatttactattttatttttatggccattaattattttaagtcctactttcctgggttaactttagcagatctaagttttaccattttttaaaaattttgcccatcttattttatgttgactatttctaccactttctgctattatgaactggatgaaatgtgacagtttatgtggattttctagaggtaaattgtcagtaattcccctcagatgtttcttacctgctctattatc

SEQ ID NO: 349 - DNA, 1400 bp, Homo sapiens
  misc_feature (1)..(1400): DMR2:162327701
gcctgtggctgtcgaggtggaggcatacctggcacctccaggaacagttggtctgatttgcacctttggtggctgggccaaatactcattttacttagtaacattgacgcagcctgtagcaaaacacttaacattataaagagattagagccatttcaaactgcgcgagagaaaaagtgacaaaaagacaacagaggcttgctgggcatggtggctccacctgtaattccaatgagaggggaccgcgtgctggcagtcctcacagccctcgctggctcttggcgcctcgtctgcctgggctcccactttggcggcacttgaggagccctttagcccgtcgctgcactgtgggagcccctttctgggctggccaaggccggagctgtctccctcagcttgcaaggaggtgtggagggagtccggacacaccagtactttggtaggccgaggtgagtggatcacctgaagtcaggagttcgagatcagcctggccaacatggtgaaaccctgtttctaccaaaaaaaaaaaaaaaaaaaaaaaattagccgagaatggtggcatgtgcctgtaatcacagctactcgggaggctgaggcaggagaattgcttgaacctggtaggtggaggttgtagtgagcaagattgtgccactgcactccagcctgggtgacagagcaagatcctgtctcaaaaaagaaaagaaaacagagcctcttactcataggaaagagagagagatggcagggttttggaagaaaggcaaacctgacagcattcactcacactcaccttctaagatcccgggtgagcccccagttgagacaggaaaagttgccccactgctcaaacctctaggggagcatacacacgggcaggctgtggggctccgacctcatggcggtgtctagggctgaatatttacagctcctgaagcctcggtgggagtgtattacagggtactcttttagttttgcttttagttttgctatctatagatggcttgtgttaaccagctcaattaaaccctctaccttgttgcaaggacagagggctttctgtatcttgcgttcttgccttggtgtactggaaaaatcggaatcaatcacatctgggcttggagaatgagtgcaaggttttattgagtggaggtggcttggaggaagtcagaagggaattgaatgggaaggtttacccctggagttgggcctctcagtggcctgggctctccactgactatcccagccaaactccgcatcattctgcttctgctggtcagtggcctggcagcattctggtgcctgtcagtgcattcctctccacatccagccgcctgtgtattcttctgctgatgttctcctcttgatgtccagctccttctatgtctgcctgctacggtctc

SEQ ID NO: 350 - DNA, 600 bp, Homo sapiens
  misc_feature (1)..(600): DMR2:163051601
aaagaaaaaaatgtgtagcagtagaacttataaagtaaggatagattctaaacacactaaaagtaataaagactaatcgtcaatttcttaagtatgttcagtctctgtttaaatgaactcttacttagggactacattttttatttatcaagaccaaaataatcagctcatggattaagatagcctcctgccagtgagcaataaagattgtatttgtcattgaccttcagggaaattctaaaggaagaactactgaaaacgatttgtaatcataatattaccatgtctttattcactatgccaaattttacttgatattctcattttggcatggatgttttgaatttatatttcattaacttaattaatagaattattttaattgctgtttataatttaattattatagcatttaaagacaatgcttggtggagttttgctactgaaaaagtgaactagtttggattgaataaggatttatataaattgccaccaatataggctgggcacagtggctcacgcctgtattcccagcactttggtaggccaaggcaggtggatcatgaggtcaggagttcgagaccagcctggccaacatgg

SEQ ID NO: 351 - DNA, 1200 bp, Homo sapiens
  misc_feature (1)..(1200): DMR2:165922201
aaaagctgaaatatcatgtggcttaatagtacaattcaatcagaaagtattagtgtcacttcttacaattgaaatattttagaggtaaaacaaccctctgacatcatctaaattttttttaacagttaaaacagaagtccataatttccacaatctatagggaatccaaacaaatcatcaagaaaaaaaaatcccattaaaaagtgggcaaatgacatgactagacatttatctaaagaagatatacaaatggcccataaacatttttaaaaaatgctcaacgtcactgatcatcagggaaatgtaaattaaaactatagttaggtaccaccttaccacagccggaatagccactattaaaaagtcaaaaaaaaaaaaaaaaaaaagacgttggcatggatgtggtcaaagggaacacttatacattgctagtgagaatgtaaattagtacaacctctttggaaaatagtatgaagatttctcaaagaactaaaagtagatttaccattcaatccagaaatcccactactagatatctacccaaaggaaaagaaatcattatatcaaaaagtcacctgcatgtgtatgtttcttgcagtacaattcataattgcaaagacatggaaccaacataagcgtccatcaaccgatgagtggacaaataaaatgtggtctatatatacaccacagaacactactcagctgtaaaaaagtaatgaaataacgtgttttatagcaacctggatggaactggaggccattaatataaatgaagtaattgaggaatggaaaaccaaatactgtatgttctcacttgtaagtagtagctaagctatgagtataaaggcaaacagagtgatatagtggactttggagacttagaagagggaggatgggaagagggtgtgggatagaaagcttcatattgggtacaatgcacactactcatgtgatggatacactaaaattccagacttcagcactatacaattcatccatgtatccaaaaactatttgtacccaatacaaataaaaaattgaaataaaaaataaaaaaataaagaaaacagaggtccaaggaagcagtaaagacaatctcatcactccattatattacaggaaataactattcatgaaaatacctttaagttggtttctgctcttaacagttttacaaacgttatttacttttatagcatt

SEQ ID NO: 352 - DNA, 100 bp, Homo sapiens
  misc_feature (1)..(100): DMR2:167634501
aaaatgataaaagggatatcacaactgatcccacagaaatacaaactactatcagagaatgctataaacacatcaatgcaagtaaactagaaaatctaga

SEQ ID NO: 353 - DNA, 800 bp, Homo sapiens
  misc_feature (1)..(800): DMR2:168549701
ttccaaggtgattcctttggaggtttttacatgattaaaacagaagcgtcatgtaaaatataaatgcagcaaaagttggaactgttttcccttgtattctttgtagttctccggtcttaattgtgatatgaaatgtaaccaatcagttgactggaataggaggggcaggacttgggagagcttgaacaaagtgtgcgtttgtgtgtgtgtgtgaatgatcatccagtatcctggccttaccacggtttgagctgcctttttgtagaagggcatgattataatccttcaagtgtgagagaggtacccttaaaatctctgtatatgactggctacatagtttgtggggcccagtacagaatgaaaatgtgggaccccttgttcaaaaagcacaaaaaaagtgccattaagcatacaaaaacataaagctttttccttcctccctcagtctctctctacttgtcaaggtgtttttttgtttgttgtttttggttttgagacaaggtctcactctgttgccaaggctggagtctagtggcataactgtagcacactgcagcctcaaactcctgggctcaaatgatcctcttgcttcagcctctcaagtagctggaactacaggtgtgggccaccacacctggctaatgtaaaaaatttttttggagagatagggcctcactatgttgcccaggctggtcttgaactccgggcttcaagcaatcctcctgcctcagcctcccaaagtgttgggattatagctgtgagccaccatgcctggtcaaggtgttttttatttgtcgtgt

SEQ ID NO: 354 - DNA, 1900 bp, Homo sapiens
  misc_feature (1)..(1900): DMR2:169711601
taaaaccatttgggggtcagcctttgtcgtgttcagtgtcaggttccagcccaactgagggctgagggagtgggtggatgtggggcagggagctggaagaacactcgagagacaccaggtagatgagacatggccttattcagcagcccccacacctgcagctgcatggccagctctcccttggcttcagggtcagtagcttaactgtttctctgggcacaagtgagccaagctgtgtcctggctcccccaccgtctgtctgcaaaggacggctctgactctctctcccagtgcaccagcacaacgtcaacagggcaatcatacattttacagacaatagtggcatagagccaactgatggccttcccatgtatggctacatggctgtgataacaagtggagttatatgcctgcgctctaaacctgctgagtcacacaggatgtaaacatcctacctcggcctatccttaaccaaagcacagccatgttccttacactccaccccctaggccaagggagacataggccttggatacaggttatatgcataagctttgggtacataggcttgatatacacacacaaggccttatacataagttttgggcacacgagtttgataaacaggcttggcacacaggccttacattccaccccctggaatgagggagttcttttagtggggatccatgcacatagggcagcaccctgaactcataggtcacaacaacaatacagagaacaacaacctactataaatattcctgttacgttacctatgattattagagcccagcatagggtagtgcccagaggcacccactgtctctgcagagggtcatcagtaaggtgctcaatagccttaatctcctgtgacaccccttgtaaagctaccattatgttctagtggatgtcagggataaatgtacaaaattgtgtccctccaagggcacaggtgccaccctgagcaactgtgactatgtttaaggccatccgattttgcagcaccaccttcctgatctgatcaacctcatcagttagcaaaaggagagcaactcgggtgtaattcagggcccgagctgtgtgctctgcaagggctgtaacttgcatttctatagtaacgacacctgctccagggatagttattgctaaggggtggagccaccagagggtggcaaaaactgggaacgcagtgcctcccagttattcgggcaactaggcaatgtgggaagcacagtggcaggcacagaaaaccacccccaagtaaaacatccagtccaattggctggtagatatcgccatttggtttatgggccccacagacccataaactctcagggggcacaaagtccattggagcccagccttggtaaggccgcttgttccacaacacccttggtgtggtgacatgttatgtttgcacaaacctcagcaggccaccatcccacagtgacttcaccccagtgctgctctatgcatcgtggtacctgcgatgggggcaccacgtgttctcccattagccagccccacccatcatagacactacgagtcagccagggggcaggcttgccatgggttttgcgacaccccctgtccaaagcctgccgtgttgcatcccaccaattgtctgtggaaccacaagtttctagtcgtgtccagtttttcacagaagctgggtgcatgtgccagggcaagccatccacagctgctgctggaagggtagtacagatccaacagttggagacattggtcacctcagcgtaggtgtgggcccagtccacaatgcagttggagcatgccaacctacggccagaatgacaaagtaggcacagatactaacaagggtaaatcatgtcccttaggccaaatgcaagccaacttttatctctagataacaatg

SEQ ID NO: 355 - DNA, 600 bp, Homo sapiens
  misc_feature (1)..(600): DMR2:173045801
cactgtttataggcaggctgtagaaaaagcattatgcactctggagatggttcaaggaggtgactcctgaagtctctttcagcaactcaggagagtgccttgtagttgggtgtagttgtcagtaactgcttaatattacatgtgttaatgggtgcaaaaggaggtgaagttaaaatattaagttaacccttctttggccttgtgaaagcatttgtaactatgcattgaccgggaatgctagttagattcacacatcatcactgtgggttcacaccattaaacattattgtccggacctcacaaaggaaaagaatggacctcgctgtgaagccagatttggatttcgaagttaaactgaagttatctttgagaacaattaaaaaggatacgtcaaaattaaaaccattgttaaaattaatcaaagatttagaaaggtagaatgaacttcagggctggaaattactgatttaaacaattgttctcacattttaaactacatgagctaaaaattatgaagtctcagagtatagctttaaagagtagcataaaaccaaagtcagaatgaaatgttttagctttcaaaactaaaaagcagaacaa

SEQ ID NO: 356 - DNA, 300 bp, Homo sapiens
  misc_feature (1)..(300): DMR2:176419301
gaggctctaggtgtgctgtgaccatctccactcatcaccatggaacacctggcatacggggcctcaggcaaagctgctagtggaggccttgggccacccccttctctcttcccacactggacaccccagtttcatactcaagctccatcctcttccacttaaccacagctggtcctgtgcctcctccttgaagccatttggacagggaattctggggtcttgggtacctggagcagggcctagaaatggaggaatgtgaccagggcaaacagtgtatattgtggggcccagggcagaggc

SEQ ID NO: 357 - DNA, 1900 bp, Homo sapiens
  misc_feature (1)..(1900): DMR2:176914201
ccacttttatagaggatattcatggtggcaacagctgtaaaaaatatggaaatgtaaaagaaaagagactgaatataggatttatctatgggcccagtacattaaaccctttttaacacatgaaatatgacaataacttagaccctcaacatcaggatcataaagggaattttaatggtgacctgtgccttcacatcaaagaattgaatttttgttgttttaaaggtctttttacatatttgcctggcttgcacaattacatcaatgtgtcagtttaaccaataagacaaaactatttgaaatctgtgttgctaggttacccatcctgatcttacacgcaacaagtggaaaacttttcctggcttcctctctcagcgtcacacaaagtgggatcttaggccacgccaccaggctggaaatcacagcagctgtggattatgcctttggaacaggcaggatgcccagtcctaaatcctctttccatgcaacatgctggacctatacagaaaagcagggtcagtcttgaatctacaagctgttgggggtgatgcagccattcctccatctgttacctgtaattgccacctaaatgaggcacaagctgacacactggtccctataaaaggtggaagtaaagggtaagtccatcccagcatacaccatttctgcaaagattgagtacctgatcatcatgatctcaagagaacctgaggagtaaaactggagttgttggggaggcggcaaagaaatgaacgtgatacctgtatcaggtagacatgagaaagtggatataaaataaggcttaaatccagagatctaggcttgggaaaataaagagattcaaggagtgagaacaaagagtgctggggcagcaggaaacagtggatgagtgagtgggaggtaaagaggtgagcgacgaagcacaattcccaaatctgtcttctctcttcattccactgggcatcttttaggccttcactttcttatagcccacatatgccacatgagttggtagataaaagcaatctgttaattaagtttttaagtaaaaagaccctaaagagttccagtttaaaacggcatctggctaatggccctgatatagccttttccaccaaaatacacacatacacacacaatttatgttgccaccaaaaattaagattgctaatcaaccttaccactaactataagatcaacggacctagatttttaaaggcaatcagtggcccacctgtgcttgccaccagccctggagaaagcccacctgtctgaaattggaacgacccattatctcttccccactgtctgccacctggctcattaaatcagccagccatccttctactatatacgtgttcctttttaagctggagtgttattctccttccacatccaatctctcattggtagcttttttcataaaaacagggtagctacttaaaaaagaattggtcagcaagagagaatgggaaggcaggttttaaaggagcctcgttatagtcaagaaggtgttccactgaagacagcacaatataagggaagagagaacaacaacaacaacaaaaaactgacaaccacatatgcttaataccacaagctttcctgtcagaaggaacaaaatgaacataagacaaaagctaatcttgggtcaatatttaaggaaagaaagcaagtcaaacaccagaaattgagctagtggctctgggtctcacccagagcttgccctctggatgtagctctatagagagaattgaaccagtattcagtggacagagagtagggcctgctggaaacaccaatctagatggatcttgttgagagtgacaagaagaacaattaacaaatgcatgttggtaaatgacatagaaatagagatagaagaaatcatactaaagac

SEQ ID NO: 358 - DNA, 1800 bp, Homo sapiens
  misc_feature (1)..(1800): DMR2:178228501
ctccggccagggtgacagagcgagactccatctcaaaaaacaaaataaaaaaattaagccacatatatcataatattaaatttcctaatagccaagttaaaaaggacaaagaaacaagtgaaattagttttaacagtttatttaccccaatataacccaaatattatgctaacatataatgatataaaaattattagtgaaatagtctaccttctttttttcatattgtcttcaaagtctgatgtgtattttacatttacagcacatctgaacttggatgctaaattttcatcagaaatacttgatctatatttagatttcataaaatttatagttgaaaaagtagattcacaaacccaggatgttctaaatatatttagtttaccattaactgaactgaatattgatgtgtttagtccattttctgttgctataaaagaatacctgagactaggtaatttatacagaaaagaggtttatttagtttacagctctgaactctgggaagtccaagattgggcagccacatctgatgagggcctcgtgctgcttcacagcatggcagaaaagtggaaggtcatgggagcatgtgtgtgtaaagggcaaaatacaaggggtggccccgccttataacaacccactctagtgttaactaacccagtctcttgagaatgtgacatgaatccctcttaatgacctaatcacctcttacaggccccacctcccaatactgccacaatggggaccaaatttccaacacgtgaattctggaggacacacaagatagattagagccttgtctctgaatgatctctagaccgtgcatggtgtttaaattaattaaaatgaaataatataaaaaattcagttccctagtctccctacccgcctttgaagtgattagtaaccacatttggctagtgaccaccataatggaaaagcaggtctagatcattagttatcaaggcgtgcttcccattccctttccctacccccagaccagcagcattagcatcacctgggaacttgttagaaatgcaaactgtgggctgggtgaggtggttcactgctgtaatcccagcactttgggaggccaaggcgagtggatcttttgagctcaggagtttgtgactggccccggcaacatggcgaaaactcatctctaccgaacacataaaaattagccaagtgtggtggtgtgcacctgtactctcagctacgtgggaagctacagtgggagaattgtttgagcccaggaggtccaggctgcagtaagcctcatgctagcactactgcactccagcctaggctacagaatgagaccttgtctcaaagaaaaggaaagaaaaagaaaaaaaagaaatgcaaatagcaactcagacactctggatgtgggcccagtcatctgagttaaagaagtcctccaggtgattctgatctacattaaagtttgagaaccacttagtctatctagaaatggaccagccctcagtctctctgcctttttgctcaaccatcactcatagtgttgttctcatcttcagggtagaagctggccagctaggagcacttctgcattctacccttaggaaggttgggtgctggggagaggcgacagattggacaagcagttttccttttttaaaggctgttacacaacattgcccacatccttttgctcagatcccattgagtagagctaaatggccctaccctgtttctgaggctggaaattgtagattagttggctgatcatgtgccaagtgaaaacttgtggaggtgagatggtggaggaagttg

SEQ ID NO: 359 - DNA, 800 bp, Homo sapiens
  misc_feature (1)..(800): DMR2:178775401
tgatggcttttaccatgatgctggcagagtcctcagcagtcacatctcttatgaccaattcacaaacattgtcttcgggccagtaccagtagatccggtcagaccgttcaattttgacaccatttttgtaccattcacattcggggtctggtttccccacgactctgacccggaagtgtgcatcagatccttggcccactgtttggctctggattctttcgaagatttttggagcctccatactaggacttagttcaatcttgtcaggtttaaaagttggaatcgtgattttgccttcttcggcaagagctttcttttcctcttcagttaactctttggtccagtggagaagttcatcttttgtcttcctgaggagttcctcataggattcatccttctttcgagacttgagctccacagcggtaatggcttcataatagccctcttctgttctgcgcttgaatttactgcgcagctcttccgactcttcaggcactttttcatgggtaattctttcagcccttttcaacttcacaacttctttggtttcagtggtgtcaacaggtctatccactttttgtacttcaaactgaagctttcctggttcatgtacgtgaaactcaggccttggttcaggagctctcctaaggacagacctaaaatcttccctctgttgaatctcaagcttcactttatgctctatcacaccttcaggattttccgcggtgaccttcacttcacctgtgtcatatgatttgcagtccacgatgtccaggtaatggataccatcatagcgaact

SEQ ID NO: 360 - DNA, 300 bp, Homo sapiens
  misc_feature (1)..(300): DMR2:179416101
tcacctgagttcaggaatttgagaccagcctggccaacatggtgaaaccccatttctactcaaaatacaaaagaattagccaggtgtggtggcgcccgcctgtaataccagctgctcaggaggctaaagcaggcgaattgctcgaacctgggaggcggaggttgcagtgagccaagatagctccactacactccagcctgggtgacagagtgagattcagtctcaaaaaaaaaaaaaaaaaaaagcctaatatcaagaatctataaggaacttaaacaaatcaacaagaaacaaacaacc

SEQ ID NO: 361 - DNA, 1300 bp, Homo sapiens
  misc_feature (1)..(1300): DMR2:181382801
atcagcaacccaaagtggtggcaggataataatccatcagagctttggccctgtcactgatgttccttcaggcccatacattcctcctacttgggcatgtggtagtgtcaccagtgtgacagtctccagctactgccttaggctgtagcaataaactgcagcatgggtatggagggaaggtaggacagggaagtagagacatggtaagaggctggcacaattggaagggtggctgcactgtaagaaataggaaacaataggacagtcattgtggcttatgcctgtaatcccagtattttgggaggccaaggcaggaggatctcttgaagccaggagtttgagaccagcctgggcaacaaagcaagacctcatctctacaaaaaaaaaaaaaagaaaaaaaagtgtttttaaattagctgggtggaattggatgtacctgtagtcccagctactcaggaggctagggtgggaggatcacttgagcccagaagtttgaggctgcagtgaactgtgattacgccactgcactccagcctgggcaacagagtgaggcctcatctctaaaataaaaaattaaaaaaagaaacagggaacacagaacaataaagttgcaagcaacattcaggtcttgatgtgctagtagagttgggattaaaaagcaattatagctttttgtacagagaagtgacatttatacaactacaagttttttggtagattccagtttttcttacttgtgtatttattcccatactcttccttactccttaccttttttttctctcttaaaaagctctcataaggtgacactagcgaaacggcagattcaggacctctgaaaattctctcttctgtaaaagcaatgagaaaactggcaaaaatggtcagaatttatgttttccaaactctggaaattaatgaagccctttcagaaatttggaaagtatttattggagcaaaacagcagaatcatggtagcaacagtgagctttgtggcattttaaacttgttctattcccatccccactgctgatctcaatggtaaccttgaaaactagccatccatattcaaagtgaaaaccaacagcatggcagccactggagggggaaaaagacaattggagcaccttcaaaatcccattctcaaagatctgtcattatttgacttgtcaggtaattctctagggatgcctatttgcaagattatctttatttcacctgattcagagcttcaccaggctcttctcttgtacagagaatagtcttttctcttgtacagagaatagtcttttctctggag

SEQ ID NO: 362 - DNA, 2500 bp, Homo sapiens
  misc_feature (1)..(2500): DMR2:182184201
atttgaagcaaattattaatttgtggatttaagaagctagtgaacactaagtagaatactgaaaaaaaaaaagacctagatatatcatcatcaaattgctgaaagtcaaaataaagtctagaaaacagaaagaaaaagataatactcagtacatacaaggaagcaacaatacaatttatttttggccaacactatcagaaactatggaagccagaggcaatagaattacacattaaaagtgctaaaataaaaaaaaatcattcaacaattctaaatcaagtaaaattattcataaataaaagtaagatacagacattcccagataaagaaaatctaattgtttgtcagtataactgtgttataagaaaatacttgagaaagtactccagtgtgaagagaaatgataccaaatagtagctctgacacacaagaagaaatgaagaatatcataagggtaaatatgtgagaacatacaaaagattgcatatacgaatgtgtgtgtctgccatctgtcaagttctgcaggaattaatgtgctatttttggctctctggtctattcccaaggcccatcttattatctctatatcacagccacactaaatttattacttcagtataagagtaaattttgatatatggcaagtgctcccactttattatccttcaggagtgtcttgagtattcttaggtatttgcaataccatatagattttaggatcaatttcttaaattccatgaaaaatgtattggaattttcactggaaacatgttatatttatggttgacatttgggataattgaaaacgtttcaatattgtgtctttctgactataaatatgatttaacactctattttgatcttatattatccattttaagaaaagtaagtttattcctgagtatattaaagctgcaaaaaacacaaggaaaaaatttctggctgaaaaaataactacaaagaccctggagtattttaagaaacttccaagaggccattgtgcagggagtgtagtgtataagggagacagagctgtgggaatgagtgtgagaagaggcaggggccagatctggatatgaaagctaattcctgcacgaaagataataactgtttgaatactaactcacaaacctactaaatggactaattaatttgaagcagctaatatgtcagaaataactgtagctaccttcccatgcgattgctgtggtggttgattactaatgatttccccaattcctgtctaaattctgagtcaaaaaagcaacttagtgaaacagaaaaaaaacacacccaagtctctgacatgaagtgataacacacttaatgcaacacaaaagccacttaccaagtaaaatccaggctggaaagcacctctacgaaagcacaggagtttatatggtaccacaaagttttgtcaccatttcattatctcatctttcagtatccagtttgccagcacccactgacacacagatctgcagcccatgtggcacaaacaaaccagaacctctttttatctaataaatgagccaactttctcatgaatgatcaaagagtagccaaattcccaataccatcaagggcttacatattctatagaagaagaaatctagaagaagtaatccaaactcttagaggagaagtgaagacagagagagatggcagtaaggcctcataaacaacactaccttgtgcagctaactctttccacctctctttgttctgctgaatgatgtccaccaggttgttcttgaaactcttcaggtccactgctgcaagggagtagtctggggaataggacccatcactcatggagccttttgtatttgatcgtcttagtgcatcagcaatgtgtaaccccacaatggtggttgagctaacagtaacaaccaaagaaaccaaaaaacaccatcaggatatggggtgaacaaggaaaacctgaaaaactttacaaaaccgactagaaaagcaggatagtagatgctcagtcccagttctgagcacgtggcagctgctcatctcctttctctccctccccacactggattctccttagtacacaccttacttagtatttcatattttgtgtattaaacttcagttgtcaaaggcagatgcaatataatataaagccactaggtggcaatactccctaataattcttgtgagaattctctgcctagatgtgagaaatataatcattaaggaaagtgttactaaacaccacaaagatgaaaaataatgcaaaaaagaaaatatcatacctgcttgccacataggaagaagtttcggcttttgaggcttcctctataagaggaataacaattttctctgttgagtctgtcagaagagaaaatgttggctctactatgaaatcgatgaaacctacaaaagccaaaatgagaagagagagagataaattcaagtgttacaatttcctgaattctgaaatcagaaataatgaagagcttctgacaatcctgggatagcaagaatc

SEQ ID NO: 363 - DNA, 500 bp, Homo sapiens
  misc_feature (1)..(500): DMR2:184840701
atacacgcccgctaacaaaactaaaggaaaatttatttctctcagtcatctcttattcagcttaagaattaaattaaattgtttaataagaattaaatggttattcttaacttccttctctaaccactcttttcttctctgaccttgtatctactcaaacatagaccctaggtatcgactttttgctttacccctgaaacaccaccatttcttgaccatattcagttgaattttacttaacattaggagaaattaagacgtttcgccataatgctgcaagcgaacaatggaaattcagtgagtttttcagattcatgaaggttttcagttatctttgcctcatgattttctctctgtacgtgttttccctttgaactttgttatccagtcatctgggtgtaattcctgcactatctttcacgtttttgtcatatgtccctgtatgtcttctttatacaagccctagaaatgtgaaatctctccatttctttgggaaaagc

SEQ ID NO: 364 - DNA, 200 bp, Homo sapiens
  misc_feature (1)..(200): DMR2:184908301
tctctctcttttttctcccccacctcaagctctgcttctgccaccacatctccttctcttgactcagactcactcgttgattataaggaccctttgattgattacatacagcccagcatgtaatctaagacaatattcttcttttaaggttcttaaattaatcacatctgcaaagttactttgccatgtaaggtaacatg

SEQ ID NO: 365 - DNA, 1200 bp, Homo sapiens
  misc_feature (1)..(1200): DMR2:185299401
acaattgctgggtagttagtgtaattgtttggggatatggggaccctctaactttttgattgccagagatcttgttctgattttttctcacctgagaaggatggttttccttcatatttttgaagtttctatcaataaggtgggacattttatttttatattttttatttcccttgagagtttgaccatggtataaggttaagtataatctaatggctttgtttctgagtgttttcagagggtcatatctctgtgtggaatttttatttgtgaccagatttctgcattaggtttcaccagcaatctatcctggaagaatttttatttggtagtgtcattcaggctgtcatccagtagacgatgcttaagagtaaggtctggcagatatgctcttgctcagctgtactcatcactcttgtctattttagtgagtttgcaactgtgttctggggtgggtgagatggatgggtatagcgacactcccctcaccaagtttattcctgggtcttgggcgccccctccaatcactggtgctatacctgtgtctccttacccctgaaggaagccctgacagcctgtgccactccttcccgtagaggctgcctgagctgaaggtgaggttgccaggtgccccacagcttcccagggacccgcgtgtcctcattgcttggcagagtcagagtgggttgtagtgtatctctgcaggtggtttgttgatgcaatgggtcaagggtgagggatccttggacagggtggtgttgttgtgggtgttgtgtagtgcctgttgcccagggctttttgcttagcagatggctgtgggaacttcccagctcacactcctctgactgggtctccttctggggtctgttccagtagctttcccgaccagctagttttgtttcaagttcacagcactcatcactggcctgttagtttttccaggctgtggggcttactcagcagaggatgtaatcggtacataggctacacccttttcaaaccagtcttgccaagtgaggcacacccacatcctgcgttggtccaagaactcacaccgtactttctcagtattctgagagtggggtcttgtctgcttctcaagctccagccacagaagatttcagctcaatattcttgagctgtgtgctcaaaccctgggaggttgggtcccagcccacgtctttgtcctctggacccttg

SEQ ID NO: 366 - DNA, 200 bp, Homo sapiens
  misc_feature (1)..(200): DMR2:186479301
actttgtgaatgactttaggactgattcagtttcaaacgttttgtccttttgtctttgtatgaacatgaataaatgtttcagactgttttccattatttaattcagaaaatataattgctagtgacaattgctggccccctccaggacttccagaataatctgctgctggaaaagacctctctcacagaatttttgaaat

SEQ ID NO: 367 - DNA, 300 bp, Homo sapiens
  misc_feature (1)..(300): DMR2:186855401
tgcaatacttggattaaaatctttctcctacaactgtaaagatattgctatatttttgcaagtgaaccataatatatagggtataaatctgacaccggccaaattttttaacctttatgtattgatagcatgtttcttcctggaagattttaaattcgtcgtttttaagacttcaaccaagataatttcataagttgtgtttcactgattttttctgctatgtcatcaactgacttttttattctgtgacgttattgattattgcttctgttctattgcttcagattctttttaaggaac

SEQ ID NO: 368 - DNA, 200 bp, Homo sapiens
  misc_feature (1)..(200): DMR2:187508801
tgagtgccccggccagaacttccaatactatgttgagtaagagcggtgagagagggcatctttgtcttgtactggctttcaaagggaatgcttccaggttttgcccattccatatgatattggctgtgagtttgtcataaatagttattattattttgagatacgttccatcaatacctagtttattgagaatttttagc

SEQ ID NO: 369 - DNA, 600 bp, Homo sapiens
  misc_feature (1)..(600): DMR2:190208201
ctttttccccagcaatgtttaactgctgaggtacaggcaagaaggtggaaagtagggttagaccactggtcaattttgccaggccagcacgaaagagggagaaagggtaggggatttgagggctttttgtaaggtaataaatgcatgtttcaaaggccacagcagcaggatggcagcaggatgagtttacaagctcaatgctgcacttatcagatgcagtccatgattgtaggggcaggattaccttatatataaattaggaaacagtggccaagttatgtgaatttttaaaacaattatcagtttcaaagactgatcttccttttcatatcccagatggtaacatattctttaaaaacatacacaactttgcaatcttaataaaagtttaattttcactactaaaacaactataggttgagtattctttatctggaatgcttgggatcagaagtgtttcaggtttgattttttttttttttttcagattttggaatatttgcattatacttatggtccaatgaacatttgagtgtcatgttggtgctcaaatagtttcagattttggtacattttggattttaggatttgggatgcata

SEQ ID NO: 370 - DNA, 1400 bp, Homo sapiens
  misc_feature (1)..(1400): DMR2:190365501
agattaatgatcaggaattcaggaattgttaactggcctatgtatcccttaactgggatacaaaattgtgcccacatgggcatttttctagggaggtcttttgattcctgaaacccatctcttactattcaggttaagtgcctgggtagccactgagcatctgacttgatgaagccccaccaggtgattctggcagtcagccaggcataggaactgctgggatggatatattgccctcaatctaagtgcacagcttttgattcactctctcactggctcactctctctctgtctctcttgcttgctctctcgctctctctgtctcaatctttgtctcattctctcgctgtctctctcgctctctgtctctcttgctctgtctctctctgtgtctcttgctctgtctcgctctcttgctctgtctcactgtctctcgctcactgtctgtctcactcttttgctctctctcgctctctcgctctgtctcgctctctctcgctctctcgctctgtctcgctctctctcgctcgctctctgtctcactcttttgctctctctgtctctctgtctctttcactctgtctctctcagtctctccctgaatctctcgctctctgtctcgctctgtctctcttgctctctctcgctctttcgctgtctctctcgctctttgtctcttgctctctgtctcttgctctgtctcgctctctcgctctgtctctctcttgcttgctctctgtctcactctttccctctgtctctttcactcttcctgtctctctctcgctctctgtctctctcgctctgtctcactctctctgtctcactctctcgctctgtctctctcttgcttgctctgtctcactcttttgctctgtctctttcactctccctgtctgtctctcttgctctcactctgtctcactctgtctcactctgtctcactctctctgtcttgctctctctgtctctcgctcttttgctgtgtctctcgctctctctgtgtgtctctctctcactctcttgctctgtctctctcgctctttcgctctgtctcgctctctgtgtctctcgctctctctctgtctctctctctcgctctctctgtctctctcactctttagctctctctctctgttctttctccactgaaactcttgaaatgtaatggcttatcgtgtggctttaccctaggggaaaagattaccttgaggttgtgttcaacagaggaggaaacagcagagcttcttagcaaagtcctcaatggtaacaaggtggcatctgaagcattagccagggttgttcatcaggatgttgcctttactgacccaactctggattccacagagatcaatgttccacaggacattttgggaatttgggtggaccccataggtaag

SEQ ID NO: 371 - DNA, 2600 bp, Homo sapiens
  misc_feature (1)..(2600): DMR2:192034501
atctctacattggtaggtcctatatggaaaatcaatttctgctttattcttgtaagcttggttttatctttctaaatatattcttcttgtcagaacccaatcaagcattttactctctcctgtttataaattgttgtcctactttataattttggttatgattgtctctggttcattttatcctttgtcataggcattgtggctctggagacctggaagcactgctaactgttctctcgattttctgacgctcggccacatcaacctgtcatactagttgtgaggagaagtcaaggacagtgacacagccagccagtctgaggcattttccatcatcctgaaggagttgccctatcctgcttttcactggagggggcatggatgggtaggtaaacacacctgccgtgaagtttccagttctatcctcctgcaaggccttcggggataagtgtgttagaagattggtcagtatcatttgccaacttgatgtctcttccttttttaatgatccttagtttccccactgtttcctgtcacaggattcaatttcactccacattcatcctttcttactgggcactgatgttgagagcatcaggcagggtataatgttatgttgcagtaacaaacaccctcaatatctcagtggcttaaaatgacaacgatcttttttttgtttgtttgtttatgctctatatcacccagggatcctggatgacaaagcagtcacctacttgaacactgctaattatgaagtcagaaagaggaaagtttgcagagttttgtattggcaatcaaacattcagccacaggtcacagtctagaaccagacacatcagtgtcctcaactgcaaagtagccaggaagcagcatcccataacacagtcctatgtccactgttttggaggtaggaaattggaaatattcagtgagtagcactgtgagtagggcagtaatttcattttttaattaaacaaatggaagatggcagctcctcagttttttcttctatggtttatttctgatgtcttatcttaattaatatatcctgatatctatttcccattacttagtctgtcctttttcccaatatccagttattttcagtaaatattttctgtcattacacccagcagtctaactttttgcgacttcagtgtctattctcattcctcagtcccaaatccattttctttattagatttatctgaactcctgcagctctttctgtctgcatcacacaacttaacctttaattacttgcctactgggcattctacttggttctgccttttatcagctgaatcagaacataactttctctcaccacctccctcccctactccaaattgactttacctcctgatcccctatttccaaagtggttccattattcttctcagtgctcagccttaacatcttcgtttctgtttgacttctaatctctggcatctcataattgtgcagttaccaaactctcccccatgaactcgatgtgctcatgtggatcaaatgacacagtaaaagtgaaagcacgttgtagactccaaatacaagaggatactgctctctattccttcaactatttttcattccttatttatttattcatcattcatttattcatgtagttactcaagacctaagtgttttcttggaactgtgtttgttactgaggaagccacaaattaaatataagtctgctcttcaagaggttacattccagttaaggagattgcatatccatatttccagaagtaccaatgtgattgaagcaagggaaattgctatgggatatctgaccaactggatattctgctggaagagcagaatgcacttcaaagactagccaataaaactctcatgtaagatatgtttttctttttgtttctatttaactaatgaatagaacctcagtgatttaaggaaaggcaggcccatgatatggaaagagaaggggatgatgatgatattctggaatggtcgtgcaaggcttcaggaggaagtgagagtgatgattgaatcatataactcctgaataaatatctggaataaacatctccagaataaaacatctggaggattctcagtatacttagaataaaattgagcctcctcatgaaggcctactagcaccttcatgatcaaaccccttttcaactttgaccttctttcttattttaggggctcctgacacactgacctctgtcagttccttcagcacaccaggctaatccccagtcttgcgcctttggaccagaggttttctttgctcagaatactgtttcaacagatctttgcatagctggctctcgctatttgactaaaatgtcaatcctcagagaggtactccttaaatatccaatcttaagtagcatccctttctcccaggatcctgtttttcagaactctgttttctttttaaaacacttgttatctgaaaggatgtcgtctgcttgcttgtttgttcatttctttattgtctattccatctcaccccttctcaggatgtaagctgtttaaaggcaaggaccttatctgtgttacatgctgtattcccagggctcagacagagcatgacctatcgtatgtactaaata

SEQ ID NO: 372 - DNA, 1200 bp, Homo sapiens
  misc_feature (1)..(1200): DMR2:194259501
ctcagggaacacaaagtactggagtgaaagggcagaagaaggaagaaataatttttaaataaagaatgccaaagcaagtgcgtatggtgcctgatagattttgttgaacttagcgtggtgaaataaagtgatgccagttacaaattaataatatatgggaaaacatagcattctaaaattatgctattaaatacctgcataagccacaaactcctgatatttttcattgtcaaataactcattgtattttattgatgacctaattttgtgggcaagtaataatgggtactatttaagtatagaaaatagtaaacattcagaccttcatttttctcaataatttaatttgtaaataagactttgcttttatttttccagtaaacagaatgtcacagaatatctctagtatattagccttcatggaacaaaacaaaatatctttaaaatttgatgacaatttactttttatttttattttttattttttttgtgaaatggttgagggagattgagatagtttagagctaatgtactatgaaaatatttttatgacagaatatctggtttccttctaccaacattctgtattcacttctttccaagttacaggaaataggctgttgtaatattatgagggtatggcaccagcacaacaaggtgaccctcagtgagtgacttcttatataattccctatttttgagtataggtagttctgtaatttacttctaggcaatagaatgtagcaaaagtgattgaattaaatcttcttgattttattacactaaaaggcatagataatgctgttaggtacaaaatgcattagagatactcttctgctagccttgaaaatgcaaactgccatcttgtaaactacctaagaagagagctacatggcagggaagtgtaactgcaggaggtgtttaggccctcagggtggcctccagacaacagtcagtaagaaggcagaccttctgtcatacagctttaaggaaatgaattctgtcaaaggagtgaacttggaagtggattcttctccagtatagccttcaaagaagaacacgatctgaccaaccccttgattttagccttgtgtgagtggaaaacatacctaaaaatagtcaaattcatagaaacaagcaatagaattgtggctgccagggactggagggtgagggaaatgaggagttgttgatggggta

SEQ ID NO: 373 - DNA, 200 bp, Homo sapiens
  misc_feature (1)..(200): DMR2:196165201
cacacagaggaaagactatgtgaacacactaggagaaggcagccatctacaagccaagagggcaggcctcagaagaaaccaaccccgcagacaccctgatcccagatttctagcctccagaatcgttgagaaaatatacttctgttaagtcgcctgatctgcggcaacacagttatttaaaaagaaaacaaaatatataa

SEQ ID NO: 374 - DNA, 1400 bp, Homo sapiens
  misc_feature (1)..(1400): DMR2:196831401
tctccctgggtcacctctgctgcctcctgaataacagtctcagatttctctatggcttctgtggggagccaggacgcctggacagagtgggccacctaaatcaggtgggatgtatctcctctcttggccggaataccactccatgcaggcatagagaccccggatgggtccccaggttgtgagagacatgctcacctgtccaaacccaaagaatggacttagagggacaaagaacagcgaaagtgagacttttaataatggtcttgcaagattgggcgtccggtgggcaggcacacctggggcagtcacaagagataatttatctcctagcacacaagtcccttccccagttcctcactggcggagtactatggggttacaatcttcccagacatcgcctgagtttcattatcccccttataaggttataacccgtccccttccccacttaacttttgatttcccaataacaaaactttcttcccttttatgggctgacccctcctctacattctgttcacttatcgtggccttttggtgcatgagccatgtggtttgttacatttgcaggctggctgccagtacttagatttatcatgccttgaaaatggaccatttaaaattttttctcacgtcagaaatatatcaagttagcataagaaatgtgaaaagcgccaggcgcagtggctcatgcctgtaatcccagcactctgggaggccgaggcaggcggatcacaaggtcaggagatcgagaccatcctggctaacacagtgaaaccccgtctctactaaaaaaaaaaaatacaaaaaattagctgggcctggtggcgggcacctgtagtcccagctacttgggaggctgaggcaggagaatggcgtgaacccgggaggcggagcttgcagtgagctgagatcgcgccactacactccagcactccagcctgggagacagagccagactccgtctccaaaaaaaaaaaaaaagaaaaaagaaatgtgaaaagcatagtctctgggagaaaaatatctacaattctttaaaacagaatgtgaaccatgaaatgttcatacaaatgcatgtgtgtggaaaactacaaaatacaaagtgggaaaatacaagaatttgtcttgcttcaatgtttacctgtgatgtgtcatgtcccaggcttatgcattctaatttctgaaatggtagatatgtaaataaatccttttttttttttttttttgaggagtctcgctctgttgcccaggctggagtgcagtggcatgatcttggctcactgcaagctctgcctcccaggttcacgccattaccccgcctcagcctcctgtgtagctgggactacaggcacccgctaccatgcctggctaattttttttttttttttttttttttt

SEQ ID NO: 375 - DNA, 200 bp, Homo sapiens
  misc_feature (1)..(200): DMR2:197195001
tcagcataagaagctttaacctaatctttttggtgcaatcatatagctcattaccacctcaaactcttgggctcaagcgatgctcccacctcagcctcccaagtaattcagactatgggcacaggccactgttaaacctggtgaatttttaatatttttttgtggagacagggtctcgctatgttgcccaggctgctctt

SEQ ID NO: 376 - DNA, 1300 bp, Homo sapiens
  misc_feature (1)..(1300): DMR2:197761801
tatacttatatcagacaaaaccaacttcaagttaaaagttttaaaaagagacaaagaaggacatttatataataatatagggatcaattccgcaagagaatataacaatgtaatacatatgtacccaacaaaaagcacccagatatataaagcaagtcttatttgatctaaagagagagggagaaaccccaataaaatagtggttggggacttcaacaccccactctcagcattggacagattatctagaaagaaaataaacaggccgggcacagtggctcacacctgtagtgccagcactttgggaggccgaggtgggcagatcacaaggtcaggagttcgagaccggcctgaccaatatggtgaaaccccgtctctactaaaaatacaaaaattggccaggcgtggtggcatgcaactgtaatcccagctaccgaggaggctgaggcaggagaattgcttgaacctgggaggcggaggttgcagtgagccgagatcatgccattgcactttagcctgggtgacagagcgagattccttctcaaaaagaaaaaaagaaaagaaacaaagaaacatggatttaaactgcaccataggccaaacagacctaacagccatttagagaacatttaactgaacagctgcagaatatactttcttttcatcaggatataaaacattctccagaattaccatatttcaggaaacaaaacaagtctcaaaaaattaaaaaaaactgaaattatataaagtatcttatctgaccacaatggaataaaacaagatatcaataacaagaaaaacattcaaaactatacaaattcatggaaattaagcaacatactgctgaatgaccagtgggtgaaggaagaaattaagaatgaaaatagaaacacagcataccaaaacctatgggacacaacagtagcagtattaagaggcaaatttataacaatgaatgcttacatcaaaaaactagaaatatttcaaataaacacccttacaatgtacctctaggaactagaagagcaagaacaagctaaacccaaaattagtagaagaaaagaaatagtaataatcagggcagaaataaacaatgttgagactacaaaacaatacaaaagattaacaaaacaaaaggttgactttttaaaaagataaaatcgacaaaccattagctagtctaagaaaaaaaagaaagtagacccaaataaataaaatcagcaatgaaaaagacaccacaatgaataccacagaaatacaaaggatcattagaggctaatatgaacaactctatgca

SEQ ID NO: 377 - DNA, 3300 bp, Homo sapiens
  misc_feature (1)..(3300): DMR2:200787601
cctgcgttaggctgacgcatgatcttatcgtaccctagtgggaaaagtccttcattcttagatcagtcctcagttccaaatggccatgcctgtccttcatagaatctgctattctatgagactgaccaatggctagtttctaacggccttcaccttcttcctacgccgcaaaccctaatacagtctccatccacggactcccctcctttacagcactgcgtctctcacatccccacgtctcattttccctccctgcttcttttgcatttctagatgcccagactcagtgagaactggcagcattaaaagcgccacctgtttagttcagtatctggagcccttcctccctgctgaaggaggagaggcacgtgaacattttgcatgctgccagacgcctggtttacccactcctctcgggcagttcactcccaaacactagccgttcaagatgaagcctgctcaaccccatactctatacacagccctggatttctctgagctgggggagacatctaccagccctacaagactgtattctatttcttggggctcatttaccacaacatgtgaaaacatgaaatctccagcctgttcagctataatctcagctacagataattggtagggccttagaccagcacggacatgcttcggtcacctggattccttgagatggaacacagagcagactgcacggctcaggacagactgagagtagagtctcccatggtgtcttcctcagaatgctcaacctattgacctgttcccatgagacacatacacatacatgcatgcatgtactcacacagacacgcatgtacgcacacagacacacatgcacacgcacactcagacaggcatgtactcattcttaaccacattcttctagcctctcatgctgtcttggaagaggttttattggctgtgaaactgattccacattgaatatgtttgtcccaggatgcaggaactgaatcatttccctgcaatgcttggtgacatttcacagagtagccattcttactcctgaagggagagtctctgatactgttattgaatgtatatttttgtatctaaaaactctcctatgtgatctcttcctccttaggtttgtaggagcagaggaaagggagagatagggagaacacctaaaagggaagaggcaaaagctggaggcattcctcagtttaagggaggaaataagagatgcagaatataaaacaggagaaaagagagccatctcatcctgccaaggagaagagttacaatgaactattttagcttagtgcttgagacaggccctgagtagagtgaatctgggtttcaattccagctctactttttttttgagatggagtcttgctctgtcacccaggctggagtgcagtggcacaatctcggctcactgcaaccaccgcctcccaggttaaagtgatcctcccacctcggcctcccgagtagctgggactacaggtgcacaccaccatacccagctagtttttgtattttttgtagagacaaggtttcaccatgttgcccaggctggtgtcaaactcctgagctcaagcgatctgcccacctcagcctcccaaagtgcagggattacaggcatgaggcacaggacccagccccagctctacctttgatgctttatttaagttctctgatcactcagttttcttatctataaaatgagggagaggtggggtagtggagagaataactctagttactttacaggattgttgtgagaattgaataagataatactaaagcagttggcagttgttgcacatagtaaatggtcaatacatattgatgatgatgatggtgaagatgattgagtcagggatccctaagaccacccttaggtttaaagattcgctagaagtggccaggcacagaggctcttgcctgtaaccccagcactttggaaggctgaggcaggaggatcacttgagatcagaagttcaagatcagcctgggcaacacagcgagacagataattggcagggccttagaccagcacggacatgcttcagtcacctggattccttgagatggaacatagatcagactgcatggctcaggacagactgagagtagagtctcccatggtgtcttcctcagaatgctcaacctattgacctgttcccatgagacacacacacatacatgcatgcatgtactcacacagacatgcatgtacgcacacagacacacatgcacgcacacactcagacaggcatgtactcattcttaaccacattcttctagcctctcatgctgtcttagaagaggttttattggctgtgaaactggttccacattgaatacgtttgtcccaggatgcaggaactgaattatttccctgcaatgcttgatgacatttcacagagtagccattcttactcctaaagagagagtctctgatactgttattgaatgtatatttgtgtctctaccaaaacccaaaaaaattagccaggcatggtagcgcatgcctatagtcccagctactcaggaggctaaggttggaggatcgcctgagcccaggaatttgaggctgcagtgagcttgattgtgccactgcactccagcctgggtgatagagcaggaccctgtctttaaaaaaaaaaaaaaaaaaagagagactaaaaattccataactttagcagaatagtagacccaaatctgccacagctaaactgaggaattttgccctgtgtccagcccagaccttgcagaacaggctcattctaaagaagagagccaagaagctcccacagggacagctaagaagagaatagggaaggccctttgggaaggcaaacccttcgtttacatttcaatacagagggcaaaaagtaagaatagaatttaggaaaatgtcctgaatggtagactggtgggtgaattatttggcttctttttgtatttttgtgaaataaatacatattaggaggggggagaaagctttttggaaccttcatagctttccatcattggggaaaagcttgctttgctttttaacacatttgtaactaaaagccaacacttcaaacaaaaacgtagcaggggagaggagagatgtgtgttctgctttgggcttgaacctaaggggaagaattccccaaagaggagacaggcattgaggaccacgaaaaaggatgaataattctcggagcttgtagcccaagagagtgaaaagaggcttgggtttgaccagcaagaacacaatatcacacaaaccatttgactaaaggtgcacacagggctgttatcatatcgctgtaaaga

SEQ ID NO: 378 - DNA, 100 bp, Homo sapiens
  misc_feature (1)..(100): DMR2:201009501
ccaggttggagtgcagtggcacaatctttgctcactgaaacctccgccttttgggtttgagtgattcctgtgcctcagacacctgagtagctggcattac

SEQ ID NO: 379 - DNA, 1100 bp, Homo sapiens
  misc_feature (1)..(1100): DMR2:202685301
acagaaaaagtatttgataaaattcaccatctattcatgttagaaatgctcaggaaactaggactagacgtcaaccttctaattaaaggactgctttattatatataagtgtatataatataagcctgcagttaacatcatatttttttcttcataagatcaagaacaactaaggatgtcaactctcacaattcctactctgatcctaaaatttatatgaaactgcaaagactaaaatagccaaaacaatattgaaaaggaataattaaaattaaagaacttacattgcgtttggacagaggtacagataaatggaaaataatagaacattgagaaataattcacacttctcgataaaggttcctaaggtaattcagtgggagaaagaatagtattttccacaaacagttttggagcaactggatatccatataggggagggggataatccctttccttaaactgtacacaaaagtgaactccaaatggatgaaagacctacatatgaagggtaaaatggaaagacttctagaagaaaacataggagcaaatcatcttgaccttggagtaggcaaaggtcttttaggacacaaaaagcatgaactattaacagaagtagtcgataaattgtagtctattaaaattaaaaaatgctattcgaaaggcaccattaaaaattgagaagacaagccaaaaagaagacaaggcaaaactgtttgtatgcatatatttgacagagaacttgcatccagaatacataaatccaattcaataagaagacaaacctatcagttaaaaaatggacaatggatttgatcagacatatcactgaagaaaatgtgtaagtggccaaaaagcactttaactcaacctcatttggtactggggagatgctaattaaagccacggtgaaccattgctcatctactagaatgaatgaaatgaaaaagtatgacaatgccagatgttgatgaggatagtggaacaactggagctgtaatgcattgttggtgggaatgtacactgggtacaaccagtttggaaaacattttggcagtttcttataaagggagacttacacttgtcctaagatccagcat

SEQ ID NO: 380 - DNA, 1400 bp, Homo sapiens
  misc_feature (1)..(1400): DMR2:202973201
tacatgacttttctatttagcagttttcttagacattttatatttatttccactggggcatcattagcataaggcaaaaatttggtaaagccattcactatttactaaacctgaatcttaacaatggaagtataatacagttctgcgatttggtccaccaaatgtaataagcatatatatgttaaattttatcatttcttttatatattgattttttatacaattaaataacagtgctgccttctatttctatcttcttttgtctccgtgtaaaattcaagcccatcatatttcatataatattaattgatacttttggaagcaatgtaacatgatgtttacgcacataacctgggtataggcccaagctctcttatttactaggtaggtgtatgattttgggcaaattatttcacttctacagtccttagttctatcatctgtaaagtgggaatgataattgtacgtatgtcgttgatcattaagggttaaaggagatatttgatgtgaagtgttccatacagtgcctgacatagcattaaaaacattattatacttaaactgaaaataatgatttctttaaattcataaaaatatcaaagctcagctgggcgtggtggctcacgcctgtaatcccagcactttaggaggccgaggcgggcggatcgcgaggttaggagatcgagaccagcctagtgaaacatagtgaaaccctgtctctactaaaaatacaaaaaattagccgggcgtggtggcacactcctgtagtcccagctactcgggaggctgaggcaggagaatcgcttgaacccgggaggcagaggttgcagtgagccgagatcacaccactgcactccagcctgggcgacagagcgagactccatctcaaaaaataataacaaaactcactctaatatatttagatgttttaccaatgaaaatattacatttctatagtctgcaataattctatgttgtatggaaaaagtttaaataggaaaatataaattacttacagagctataaaccatactttatagaagtttatactgaaagagaacctttctgtcttttgatctaaaggcatattgctaaatggtttatgtctttattccattttgtattctttacagaaaatttgtggaaagggaactgttcaaacccgatgaggtacctgaaagacataatttatctttttttccaactgtaaatgatataaaaaatcacatccatgaggtacagaaatccttgagaaatggagatacggtatataactcagagattattccagcaacggtatgattacaaccataattccttattacagagtctttctcagcttctattaatatttagtctaataagaatggctagtgttaggccatctgaataactgcaat

SEQ ID NO: 381 - DNA, 200 bp, Homo sapiens
  misc_feature (1)..(200): DMR2:203538501
attatgagaacagcacgggaaagacccacccccatgattcaactatctcccactgggtccctcctacagcaggtggaaattatgggagctataagatgagatttgggtggggacacagagacaaaccgtattagtaagtaattccattttgtcagaacaggcatagagaagagtcaaagaggttggaggaaagggtagga

SEQ ID NO: 382 - DNA, 2200 bp, Homo sapiens
  misc_feature (1)..(2200): DMR2:203620401
tgacgtgtgagattatcccaaattgtctgagtaggccctaaaggtcctcacacataaccttgtaagagaaaggcagagggaggtttgatacacatggaagagaaaaaatgatgttactttggaggcagacagattggagtgacatggccacaagtcaaggaatgctggcagctaccagaagctggaagtggtaaggaccagattcccccaccccctggggcctcaggtgtgggtgtggccctgccaacccattgattttgactcagtgaaattgattttggacttctggtctccagaactataagagaacatacttctatcattttaagctatgaagttagtggtaatttgttatggcagccacaggaaacaaatatagtcaggttttgctgccaaatgggcaatgaaaaaaaaaaaggtgagttttcagatttcatacacctatatttaggactgatatccaagtacttttaaaagcggttgttgtgatatcttgttcattcatagcccttcagaatggcaggcatgggcctggaactgctgctagccttgctcactgtggcggtgagatgggtgttgaggcatgttgaagatataagggcagatgggcctatccaatagagaagtttgagctgagagagcagaatgttttacctaagggcaatatctagccttagtgattcaagcagtagctgggcatccccacaggtaggtgactctcaagagcctagataaataagcacaggtaagggtgtctgggtatcagatatcaggtgaggttcagggcaagggctaggatatcggggatcatggtagcagacaggttactgctacagtctgaatgtatgtgtctctccaaaattcttatgttagaacttaaaccccaaagtaatagtattaagaggtagggcctttaggaggtagttaggccagaagggctccaccctcagggatgggattaatatccttataaaagaaggctccagagttgcctggtccttcaatctcttctgtcatgtgaggatacagtgttcatccctttttgtccctttctaccgtataaggacatagcagtaaggtacaatcttggaagcagagacagagccctcagcagacaccgaatctgccaacaccttgattttggacttcccagccagcagaactgtgagaaaaaaatttctgttgtttataaattactcaatctaaggtattttgttatagcagcacaaatggactaagacagttactataatagaaatggaaaaaataggaactgatacagaagcccaggtggatgaatgtgtgtgtgggggtgggggtgtgtgtctgtacaggccaggacatttggatgacaaagtttctttattagagaatatcttggggtgggaatgatgacttaggtagaatgtgggcttttccaggatctcgaactacactagcagcaagaaaaactcaaatgaaccccagaggggagtgacttggggagcaaagcaggagcctggaccagctctgaagtgcttgccatgggccaggacaagaaggagacatggccaattctcagcctgaggaggggatgctgaggctccagagcctgttgcttcatgctcagcttgaccaagaaactggggtaagtagggtatgaggtgggaagataagtgggtccagcaatagagagccacaggccaacagagggaaaatctttgggggcattggcggtggggggagagaggacctgctgacattgtcaaagtctttgtctttctagtttgttttaaagtcaacttcctgatgataaaacggtcctcgtatcatgaggcaactgtcagtctatgatgaaattacttaaaatctccaattaaaaactcattacgtttatctgaaggctattttaaaagttatgagctaatctaaatggccaacacaagacttggttaaataaactatgggcatctatgcgaccaaatgttttatagccaatacaattatgtttatagagagtttctaaaggcctaggaaaatgtttatgctataatgctgtgttaaaaaggcaggatacaagattgtttatagactaccaagagaccaaataaaaactatgcatgaaaaacaatctagtagaaaatccaccaaaatattaatatagtgatagcctctagagagtgagactaagagtattttttctttttttttgggacggagt

SEQ ID NO: 383 - DNA, 500 bp, Homo sapiens
  misc_feature (1)..(500): DMR2:204153801
tctagtgccttccccaagcggcacgaaggacagactccagatctgcactggctactatggaagccaccagtcacatgtggctactgagcaccaggaacatccacactgagatgtgccgtaagtataaaacacactggattgcaaaatcagtatatatattagaaacagtgcaaaatatctcatttaaaatgtttatattcattatatttgaaataataatattctggctatagtgtgctacataaaatatattactaaagttaattttactggtttctttttacattttaaagtagctgctagaagatctacagttacatataagactcgcactatattttagagctactctagatacaggtgtttctggttatagaacagctcataaaaactttccagacaagaagtatttccagttttattctcctttgtcttatctatacccttaaaagaaatggaggctagtctaacctgacagcagaggttgaaaacaggtagct

SEQ ID NO: 384 - DNA, 3700 bp, Homo sapiens
  misc_feature (1)..(3700): DMR2:205936601
ctgctgatacaatgaaacaaagttaatggtgagctcattcctgcctttttcacaagagccgaaataatcctgagctgacttgtgtgtgcccaggccacttgccgatcggtgtgaagggatgctgggggccggagggaaagaggaaggcgggggtcacttttctctgtcttacttcagctgtaaattttctgggctatacgaccgtgacaactgatttatttttcatttaatacagatttattctgtgaagctttgaacactcactgactcagaatggagaattttcagtttaacaaagcaaacactcaataaatattattggatatgaaatttgttaatctgcacttcccctgtttggagataaccatattttctgctgccccatttgacagaactccaacctctagcatttcaatgttaatctgaaagggtaagtgatcggagctcataacctattttcttttcagacaagactgacgttaaaaaaaaaaaaatcatattcttaaaatcgcccaaagaacaagccaggaatgcctggggaatctaatcagatctattatgctaactataaagacatccctgcccccaactcctcaagaaaagatcttaagaaagttgaaatcaaattgccaagcctaatggattccctgtgtgactaaatcattgtattatttctcatgtttgaagagatacacaaatttcatggacaggcttagatactcctgcttgaacagctgttgccctatcactgtgtctaaggtcaggttcatcaatggtggggcccagcagttcttactcaagtggactgaatgcatgaaagagttttctgttgacattattctgatgcttctaggaaacccctcctcaccctgtcccagggaagattccaccccttcatgatgggcggtgaaggggattaaaggaatggggtggatgaaagctctttcatctgagagtctgaatagcacagaatggttttcaaggtcatccagaagtaccaaatctgccctgccccaccaacatggcttccaaccctcacctttatttccaacaatttgctgcttcttggtcaccattttttatgccaactccaaagagaatactaaataagcagtcttaaatccttttggggagagagtgggataaataccttcaacaaataacactaacaagcttttgatcttccacttttcttttctggtatctcacattgaccatcctcacctcccagctgcaccctcagaagcaaaacctcaagtggcccttaagtccctgggcataagattaagttcctttactctttaattccacttactacattttaatgtttaaaatatatatcatttaataaatattagataatgaaacaaatatgattatacagtttcctaattgtaaacctttatatgtgccacgtgcatccgtgtgaagagaccaccaaacaggctttgtgtgagcaacaaggctgtttatttcacctgggtgcaggcaggctgagtccgaaaagagagtcagcaaagggtggtgggattatcattagttcttataggttttgggataggcggtggagttaggagcaatgttttgtgggcagggggtggatctcacaaagtacattctcaagggtggggagaattgcaaagaaccttcttaagggtgggggagattataaagaaccttcttaagggtgggggagatcacaaagtacattgatcagttagggtggggcagaaacaaatcacaatggtggaatgtcatcagttaaggctattttcacttcttttgtggagcttcagttgcttcaggccatctggatgtgtacgtgcaggtcacaggggatatgatggcttagcttgggctcagaggcctgacaatatgtacaatcttaatagtacaatatggaattcaattttttcacatgggttctaactagggttaatacacttcttggctatagaggggacctctttattggaactcagacagggatcaaatcctctctttcctttttatgaaccctaagtaaacactaattataatgtgatgcccaaagcttaaaattagctactcagggaggcctttgttctgaccatttttacctgtttctatcaaattatttccattctccaacatcagttttagttctatttaagtaggaattacccaaaaaattatatctacttattagagaatgaaatcagaaagtaccctgactacatctccaactcttcctttttctatcaggttgtcatttgaaatggacaaaggaaagaaaagacagttcggagttgaaaaggagaagtgcggcagcctgggagggtttgttatgcttggcaatgaggagatgatcagaaggtcggaagcctggcctccgtctgtgcagagagcgcgggcccagcatacagatggcaggtcggtgtctgagagcccagcctcagcctggagcccgtgggcaaggagagggcaccaaatgaagaactgacgcagctccaatgagtggaggaacaccaggttcttagtctccagtcgaattagataaaatgacacagacacacgtggagtggttttgagagacaggactagctggatttcctaggccgactaagaatccctaagcctagctgtgaaggtgacggcttccacctttaaacacggggcttgcaacttagctcacacccagccaatcagatagtaaagacagctcactaaaatgctaattaggcaaaaacaggaggtaaagaaatagccaatcatccatcacctgagagcacagcgggagggagaatgatcaggatataaactcaggcattcgagccagcaacggctaccctctttgggtcccctccctttgtatgggagctctgttttcactctattaaatcttgcaactgcactctcttctggtccgtgtttgctacagctagagctgagctttggctcaccgtccaccactgctatttgccaccaccgcagaaccccgctgacttccatccctccggatccagcagggtgtccgctgttctcctgatccagcgaggcgcccattgccgctcccgatcgcgctaaaggcttgccattgttcctgcacggctaagtgcctgggttcatcctaatcgagctgaacactagtcactgggttccatggttctcttccatgacccacggcttctaatagagctgtaacactcatcgcatggaccaagattccattccttggcatccgtgaggccaagaaccccggatcagagaacataaggcttgccaccatcttggaagcgcccaccgccgtcttgggagctctgggagcaaggaccccctggtaacagctttaaggagcagagagtttaatacacaagaaagaacagagaaggcagaaggaagcagctccccgtacagagacgaggggtgggggcccaaagccaagagagggaaccccaccttccacctataccaaccaggtatatatacagaggctggaggaagcagtgtctcaggggattggtttgactaggcatgtcattcacgtagcccatgaaaaagctggccctcccaccctagccttttaatatgcaaatgcagggcactatgatgttctacacacgtggggatatggccatgttgccaggcacatgtggggcaatggcaaaaagaagagggtgggaatcgccatgttgggcggacccagtttctaatggccggc

SEQ ID NO: 385 - DNA, 2700 bp, Homo sapiens
  misc_feature (1)..(2700): DMR2:207826401
gagtgggggaaaagtcaacctgcttttctaagggtaaaaggcaccgtcaggcgtctcatgaatagggccctggccttttaacaagttttcaagccttggttgcggctactgtatagtcagaaaataaatgcatgtatggtgttgagctattaaggtgaaatgtgtggcctggggccaaaggaactggtgtgggttgagaggtaaaatgcttacatctaactgcacaaaagtcagtctgaaatgtcacatctctagatggatggaagtatcatgagttggggtcttggggaagcggcgtgtgggggaaaggagcaatggggttgaatgtaccaagtatgttgtgagccactgatcctaatagcagcaaaactactaaaccatgaagacatagaaggcatctgctcagcgcgaaagctacagaatcttctcataaagtctactgagaactgttccattataaacatatttttcttgctctagggagagttaaggggaaggaatgggagctgtcagggtcccagggctgtcctacctgccgttttggtcacagtgactgccacgtgctcttccaagggcactgcagctggagaacactacctgccaaatagcaaagcagatctctttcttactcctattatttattttagcactctttgttttacttcaaggtggcaattatatatgtgtgtgtatatatatatatttatttaaataatattagatctaattcattaattatacttgtaagtttgtattttcttaatagtccaaagttggtattttgaagttccacattactctgattttttaaacaaaaaaatgagaaagcaagaatggtcacattgacaaaggtcgaaatgaaagtgcaggaagaacaacgagaaataaagcacttaaaatgaataggtaggaactgcctccacaggattctgagaaaagaaactaaaacgaccctctttgggaatatacttactagatagccttatctaccagtctacacgacgatgtctttaacaaccaccccaggacatttcctccggccagcatcatgaaaaaaatcataaatatcaaccatgggcacccgttgaaaactgttaagaaagccatgtgtacagcctggaaaacacggtggagcgtcacatcattaggtgggtgatgggattagtaccgaaaaacagaccgacaacacgcagttattggtcgcagaggtttcttctcttctcaggaaaaaaacttctgagattaacttcaaaaccagaaccagccctcctcataaatgaggggtgtatgctttctgtcagagggggcttggctcctgtttccagccatcggctctgcttacgtgattccccgcctccacaggaggaactgaggcgggagcgccacggacaccaggtcctggaaggacccagcagtctcttgtgttttgaaggttttcttatgaaacagatgatgatgggtgcctgcctcagttacctcagcctctgtgaaggctaaaaataaataacacaaaaataacctaaagcactgttttgtgcaggaaatgcttccttttgtgtcttgggtaataaaatgtaccgagagacagagagaaaaaaaaagtctgaactataaagcattgtgtataccacgttttgtctgggagcaagcagctgaaattcttggctaagtgtaatccagctattggtagtttctcgagccacagaggttctgtggatcgtctggacaatgatgtacacagagcatacgtacaggacgtataggtatttgcgtatatataaataaatatatatatctatatctagttgaagaggatacatactcttcttccaaaggggtctaactggctagttaggaggccgctctggggctgatggattgttgattggtgaatccctggccttcgggtcggctggagtcaggtgttctggtaggacagctcgaacatggtgcaagcctcctctagactctcgtccatgttcagtctctgccagaaagacttctgcttcttctgcagctctcggcgaacacacctcgggcaggggacagacttttctttgcattcagaatggaaaacggctccacagctttcacacctgcaaaagtcaaccatggatatgatgagcaagactgaagccagcaagacacaaatgggaagccctgtggcctcaggtgcagctggtggcacaatctactgttctggacaaccctgccaatgggaagggagatgactcactgaaatgaactgtttgtttttccaaaatgctcaaggttgaatttcacttgaaaaacatttttgcttttctgatctgaactagggcttatgagtgggggggagtccgcagtcacccagcaattctggttatagtgacaatggacagaacaccagaagctctccattgagaagggaattggcagtgactctagagtgaaatgacagaaaatgagaggggagtgcctcgtgaaaacgctcggcacaccagtgacagccacagcgttacatccatggcgaggcagctttctacatcagttaacacgagctaagtggttctctgttaactagctgcctttatttgacagtttgaaaagataaaatgacacattttcattttctgaatgacatcctgtggtctatgaaatcttgtgagttttttaaaaattaggaaaaaactcctacctttgtaagtctacctttataac

SEQ ID NO: 386 - DNA, 1100 bp, Homo sapiens
  misc_feature (1)..(1100): DMR2:215948701
tttgaatcccagctctgttatttactaacagcctgacttcagggaagttcttaacctcactgttcctcaattgcctcatctgcaatatggggataataaaactacctacctacctcattggcttattgtgaggatcaaatgagttaatacaagtccttaaaatggaggttggtccacatgctcctccaaatcagtgtagcacaattaagaaacaatcctaggtcaaggacgctggctcacacctctaatcccagcattttggaacacagaggtgagcagatcacttgaggtcaggagttcgataccagcctggccagcatggcaaaaccctgtctctactactactactactactactactactactactactactactactactactaataataataataataatacaaaaattagctggaggtggtggcacacacctgtaatcccagctactcaggaggctgaggcaggagaatcacttcaactcaggaggcagaggttgcagtgcgcagagatcgcaccactgcacttcggcctgggtgagagtgagactttgtcttaaaaaaaaaaaaaagagggccaggcatgctggctcatgcctataatcccagcactttgggaggctgaggcgggtggatcacttgaggtcaggagtttgagaccagcctagtcactacggtgaaaccccgtctctactaaaaatacaaaaaatttgccgggtgtggtggtgtgtgcctgtggtcccagctactcaggaggctgaggcaggagaattgcttgaacccgggaggcagaggttgcagtgagccgagatcacgcctgtgcactccagcctgggcaacagagcaagactctgtctcaaaaaaaaaaaaaaaatcctccaggactcagaattatttctactatgagcatggaggccatgatacattacattatgcagtatgcaatttgtgaggacctccagaagaaaaattgctctgctctaagtactagatggttttatctttcctaaaaattatttcatctttctggatgttgtaaattttataactgatccatttccacttgtgcctgaaaatttcaagtcctttcatgaaaaa

SEQ ID NO: 387 - DNA, 300 bp, Homo sapiens
  misc_feature (1)..(300): DMR2:216079301
aacattattttcagaaaaatggctaaaaatcttataaacttccttccagtccatttttgcatatgtaatacttttttttttttttgatactgagtcttgctctgtcgcccaggctggagtgcagcggcacgatcttggctcactgaaacctctgcctcccgggttcacgccattctcctgcctcagcctcctgagtagctgggattacaggcacacgccaccatgcctggctaatttttgtattcttagtagagacgaggtttcaccatgttttcccaggctagtctcgaactcttgacc

SEQ ID NO: 388 - DNA, 200 bp, Homo sapiens
  misc_feature (1)..(200): DMR2:216485601
gcagtattcgctgcagagctccctgctcccttccccctgctccctgctggattgtctaaggttcccacaggcctatatcacagttcacctcttccccctgccaaataggcctccagccccttcctttcacaggtgttaatccctaatagattatcttgtgccccaaactctgtcttggtgtctgtttctgggaaacccac

SEQ ID NO: 389 - DNA, 1400 bp, Homo sapiens
  misc_feature (1)..(1400): DMR2:217774101
gtgaaaggaagagcttaagtgagttaattctcatctgtcacagcaggaaatggctggataatctctaaaactgatcattaaggaacagaaatgtatcatagaaaagagaatcacaagcaaacaagactttaaaatagaaagttaaaattccatctgaataatgcgcctgggatgaggaagctccagatcagcttagtgggcatgagatctgtgctgctgcatagggccctgaacttaaagggctccatgtctagttcaatgttctgctatcgacgttgtgaaattcttaatgactttgcctttgaacttgtgttgtctaaatgaaatccagtggaccaatagagcctgcttgtgagcagatatgctaaataagcttgttggctaatccttgctgctttatgcacatggagctgttggcaatgccacatgagcacataatccagtggatgcacaatacttgagaatcaaagggagtgcaggtaagtgtataacatccatgactaggcaaacagggcactgatagcccttgtaggccaggctttctatttgaaccagaacctgctgtgaactcagaaaaagggaaatggtgttccaaatgacacaaacaaccaaggaatcctatcatattcttttttactcatgttattttcctttgtgagccaaccatttgggctaaaaatgatggcatagaaggaaagggagaagtaggaaaatccattgttctttttccttttagtccttccttactcattagtaagcttaagatagacatcgttggtagaatgtgtgcatatcaagaactaaactaacaccactatcattaggaaaatgcaaaccaaaaccacaataaggtatcatctcactccagttagaatggctattacaaaaaagacaagaaataacaaatgctggcaagaatgcagggaaaatggaactcatccattttggtgggtggggatgtaaattagtacagccattatggaaaacagtttgaaggtttttcaaaaaattgaaaatagaacagtgacacaaaacagcaatcccactactgggtatttaaccaaaagagaggaaatcagtatatcaaagggatacatggacccccatgtttattgcagcactattcaaagagccaagatatggaatcatcctaagtattcttcaaaggatgcacagataaagaaaatgtggtgtctgtatacacaatggaatactattcagtcattaaaaatgatgaaatagtgtcattttcagcaacgtggatagaatggaggtcattatgttaagtgaaaaaagccagacacagaaagacaaatattgcatgttcttactgatatgtggaagctaaaacattgatctcatggaagtaggaagtagaatgatagttaccagaggctggg

SEQ ID NO: 390 - DNA, 2800 bp, Homo sapiens
  misc_feature (1)..(2800): DMR2:218031101
tgtgtatgagtgtgtgtgagcatgtctgtgtgtgtgtgtgtatgtgttgtgtgagcatgtctatgagtgtcttgtgtgagtgtgaatgtgtctgtatgtgtgtgagtgtgtctgtgtgtatgagtgtgagtgtgtgagcatgtctgtgtgtgagtgtatgagtgtgttgtgtgtgagcgtgtatgagtgtgtgagtgtgtctttgtgtatgagtgtgggtgtgtgagcatgtctgtgtgtgagtgtatgagtgtgtgttgtgtgtgagcatgtctgtgtgtgtatgaatgtcttgtgtgagtgtgtgagtgcacctgtgtgtataagtgtgtgtgtgcatgtgtgtatgagcatgtctgtgtgtgtgagtgtatgagtgtgtgttgtgtgtgagcaagtctgtgtgtatgagtgtgtcttgtgtgagtgtgtgtgtgcctgtgtgtatgagtgtatgtgtgtgtctgtgtgtgtgtgcaccttctccctagcaagagcacccataggttacatcagattctcaaagggatctgtgtcctcaaaaggctcagaagcactaagatccttttcagctctggggtctctgattctacataacaagaaagagaggaagaggaggtcatccaacccatgggggagggagtcagaccagatcctagaacttccaaaagggttgcaggccccacaacaggaatgcaggggaggctgcaggaccaggccccaggagaacgtctaacctcagtagttctccgggctgaaagaagcagagcccagaagagctgactgcagaaacggaagaggcaacagcagccaggagtctcctccccactgctcccgccccatccacaagcacccacttgtcctgggatacagcagagagcaaggaggcacgactggcacccggagatgcccgccaggccccttggcacccagaaggcttggctggaggactcaggagggtgccaagccccaacctcttgctcctgaggctgacatgtgggaccataggagggctcagggtgtagggcagttgtgggacctagagaggccacctgggaggggcagggcccacagctgcaggcactgacaacccagagctggacttggaggcttaagagccaaggcatgcaccctctcaaagccaaggggaggagcaggagccaaatgctggccaggggagaaagaggagtgggcaatggggcctgggggacaaggcagtccaggagaaggaggaggacagcctgcttgtggaggaggaggcagcatgacaggggaagggggcgatgtggcctgggtaggagagggctgtgctgaggggacaggagaatagcgaggctgggtgtggacacaggcagcaggagctcaggctgtggtcaaagagagatgctgggcctacggcagggcctggggcaggaatggggggtgtgtctgcagcaggactggcagtgggtgcgccctggcaggcagcccagatgtctgggtagccactgactcttggcttttgaggggatcagcacccaggagatgtttatctgccccaagaacgagggtatcacccctcctctagtgaggccccaggtgatgggtgcaggctgctcttccctaaacccctgaaggggggagccccgagcagcagcaaccctcactggagccagagtcagggcacagcagctgggatggagcttgatccccacagacagaggagggagggagtcacaggcgagctccaggctctctccagaggccgcttagaaaccagctcatctgatgcagacactcgtccccatccctctccctgccactgtcacacaccggcacacacaccctcccctctttctccccttgatcatccacctccagagccccggctcctccctccatcacagccccactccctgtccctgtccctgcccacctttacctggcccaacaggcacctgccccatgtcaaagctggctgtgtgggaggtggggaggcagggacacagggtgaagaaagaagacccaccaacagcgagtcctgaggtcacagggacctagagaggagttacccatccctggtgaccccaaacacctcctcctactctcccaggaagaaaccagcaccacacctatcccaggcctgatggttccctggcagactcctccagagcagacacctgcctcccagctcagacctgtccccactgccaggtcagctccccacttgctagtctctgagacttacccagcacagagaaggcaggggtgagaggccagcctgtccccaccatcctggggaagtccttgctccagtggggcccccaccctcctaactccagagtcctcctaaatgaagggacactgccagagctgccccttggtccagctcgaggaagattaactctttccctaccttgccccagcactccaggcctgcccctcctgggtgactcctaaaccaacctcacccaacctatttgcccttctaggggtcaggtcctatatcaccctcctcccaagggcacaagagacccaggggagccctctacccaactggaggccccttcacccggtcgtggtccttcctcccccttggtccacctgccttgccgcacttcccaagcagactagcaccgtcctgggctggctacttaacctgtgtcaggtgccctgggctctgccaaccgccagctcccgactcggggcgtcgtccctcacccattcccgcagcccctacctgaagcggtagctgccttctctctgcacaggccaaacccccggactcccagcactcagcccgcgccgagacccagggact

SEQ ID NO: 391 - DNA, 400 bp, Homo sapiens
  misc_feature (1)..(400): DMR2:222706401
gggcagaggttgcagtgagctcagatcatgccacttcactccagcctgggagaaagagaaaaactctgtataaaaaaaaaaaaaaaattcattccatatgtgagcatgcttaagctctctggaagaaccatctgaaatgtagtaaaacaattaatgagaaaagaacaggattgaaattagctgtaggatagctcagaggaaagaagactcactaattcagaatgtacgagtactagctaaagtaagcagagaagaacacacttcatcttcttagaccactgagtctttttactggtcccttacccctaccctgaatagttacattaacctctctcactggaataatttcactaagaaaacagaagctattttaacaaagccacaaatttgcttagattta

SEQ ID NO: 392 - DNA, 1200 bp, Homo sapiens
  misc_feature (1)..(1200): DMR2:223175601
tttccctgagttaggcagcaaagacaggggacgttgtcttcagaagaccataaaaagtacaaatgctatttggaagcaaaggggagatctggggaatcttcttctttttttttttttcccctcgtgaaccctactgacatgattggtttgctcaagacttggagaggcacaaagtctggccctaaggaaatgtgatccagtgactggggtttgttggagggaaggaagaggagaggcacacagacacaagccttttgtgacctcctgagcacccataagcctggctttgagaaaggatgttctctgcttatattttcagttagggaggcaatgggaagcaatgggagttcataggtgaagtgcttagcaatggcaggtgtgatggtagaatgttgcaaaggaaagatgaaggtacagcaaggaagccactccatctcttgcatgattatgcctgaatcaaccctacaaactggattactggattataaattctgtgggactccagccaacaccaattttaagcatgttttctaagctttgtttgagggcatttgtgtattaagccaatatttcacagaggctctgttctttgtaatagtccattttaatcctcgttgttctactaagcaaatcatgtttgaatgttggcttataaagaataaatactggaatctagtctgttggcgtaatatggctttgggttagcatatacttaactatcttagaaactgctgtcttcccgcactccaataatgttgtaagcttagttcatggatatagggaaataatctccatttataagttgtttacctgcaatcccccatatttccagcatcttaggcatatctgtctttaaaatataaacaacagtatgttagccaggcttgccggctaacatactgttgattatgggcttttggtattattcacagcaggggtccccaatccccgggctgtagactggtaccggtctgtggcctgttaggaactgggccacactgcaggaggcgagcattactgcctgagctccacctcctatcagattggcagtggcattagattctcataggagtgcgaaccctattgtgaactgcacatgtgggagatctaggttgcacgctccttatgagaatccaactaatgcctgatgatctgaagtggaacagtttcatcttgaaaccatcccccgctgatcctgtg

SEQ ID NO: 393 - DNA, 300 bp, Homo sapiens
  misc_feature (1)..(300): DMR2:223191101
aaggcattgaggtgtttatgtgtatacatatataaagcacagcacttaattctttaccttgtttatgatgcagagacctttgttcacgtgtttacctgctgaccttctctccactattatcctatgatcctgccacatccccctctccgagaaacacccaataatgatcaataaataataagggaactcagaggctggcgggatcctccgtatgctgaacaccggtcccctgggcccctttttctttctctatactttgtctctgtgtctctttcttttccaagtctcttgttccaccta

SEQ ID NO: 394 - DNA, 1800 bp, Homo sapiens
  misc_feature (1)..(1800): DMR2:223972701
ctttcaacattcacaggaggtcaaggacatagaagtcacttcccagcttaccgagctctcacctctctcccagctgtcaccactgatcactcttaggaagtgggcaattgctactctgctggcccaggggaaacgcctgcatccctgctctttcgtacccgccctgcatgtgaatctcatgtattattcagtttttcattttcagaaaacagcactcccggtacaaaggccactcccttgggcctctttgtaaacttctgttgtgattgggattttcttttgcttcaaaatttcctgtcacctctcctttttaggacagagtgaaaggccagctaagtcagagctttcagtgtatttgggtcggtacctactctcttcctccacagtgaccaaggcagaatcggaagtacccatctcatgacctgtcaaaagagtgactacactgatggtttgtctcagttttaacaaacgtctatcattttgttactttaggaaaactgcagcctctctcttgttcaaactcagtgtgacatctaatctataagatacattatttgctcaaacatgtccatatactggggctggaggactgcctgaggccaggaatttgagagtagcctgggtaacacagcaaagacccccatctctacaaaaaaattttttaaaaaaaattagccaggtgtggtggtacgtgcctataagtcctagctattcgggaggctgaggcagaagggctgcttgagcccaggagttcaaggctgcagtgagccatgatcataccactgcattacagcctgggcaactgagagaccttggagtgatggtatgacttaaatgagaaatttgcaaaatgagaaatcaccattctgcatcacaccaaatacattgttaatgtttgcagataacattatgattagaggcctggtgcagtggctcactcctataatccctatattttgggaggtccaagggtttgagaccagcctgggcaacctaggcaacatactgagaccctatctctaaaaaaaaaaaaaaaaaattattaggtgtcaaaatggaaatggaattttaaatttctcaaaaaaagttttaggaaaaaaaaaacatgtctacacagcaaaaatgatctatcacaggcctgtaatttttgtggcagtctctaagtctaaatttatttcaatttccctcagggaaaggaggttccataaatttgatcattttgaagtaagacaaggcctacagatcattgacttaaagatatcaaaatgtagtccgggcgcggtagctcaagcctgtcatcccagcactttgggaggccgaggcagggggatcacctgaggtcaggagttcgagaccaatctggccaacatggtgaaaccctgtctctattaaaaatacaaaaattagccaggcgcagtggtgcgtgcctgtactcccagctactggggaggctgaggcagaagaattgcttgaacccaggaagcagaggttgcagtgagtcgagatcacgccactgcactccagcctgggtgacagagcaagactctgtctcaaaaaagaaaaaaaaaaaaagtacacatacatagttgggaacagcaaggctcagcccacttgacaaataataattccaaatggcaaactgatggagtgccgaatgtgaggttttaatgtatagtttaaggcaagtagaactcaagggctaaaaataaaaaaatgtttttaagttttgataaatgttttaaacttaaattctgatttagcttagactgcataaatctttaagaaattagttttttaaaa

SEQ ID NO: 395 - DNA, 1000 bp, Homo sapiens
  misc_feature (1)..(1000): DMR2:224585501
cggccgccgcgggggacgctcagatctcgcgagaagagggcgagcgcgctgcccccctggtgggcggggcgaagcccgggagagggtgggcgccaccggaggggaggaggggaacagggaactgaaggaagtgggaggggccggcggggcggggaagcggaaagggggcgtggctgagggcgggaggattaagctgcctttttgaaagtggagcgccaggtcccgggttctgggtggaggtggttgctgattggtggagctcggagcggcggttgggagggtcctggtcacatggtggggagtgggaggggggaagttcggagagcgggagcgggatggtagtgggctgggccccactgggctgggacagcaggaggatagtcttgaggaggagcgtggggtgctagatgtgtaactacgtcccgaactggttcctgtgtttttctagggcatgtggactagggatgggtacttgagtagaagcctgcaacttgaagagtttgtgcaggagttagctgcagtgtcggaaattagtgtcctgtatgctcaacaaggtattcggactgggtgtgcacaccacagctctcaggactggaaggtggaaatttaatctacgaagttcccttaaactgcataagcttcgggacctcttgattcactgatattttctggtggacccagggcttattcatgttaaaacctgtttttcattaccatcagaataaactgacagctccattaatgaaatgcagcatttggtaaataatgttaagtggaatgatagaaacctatctttaacctaccggataaatcatttctaccattaccaagagtattgtagatttttaaagccaaaattaccgtctgattcagttgctgtatatttgaaaaggttttggcttttggttttggaggagaggcgtttggtcgctttatagtcaaaatgtctaatttgacttatcggttttgctgtccatttgttatgaattgtacttcctca

SEQ ID NO: 396 - DNA, 300 bp, Homo sapiens
  misc_feature (1)..(300): DMR2:225103901
actaagtccctggtgaactgggatgtttggtcaccctactttgaggtggcaggagctcatttttatacggaatgtctagcatgcttagtaaaattagaatagaattttgttaaggctgtgtttctgatgactcattttacaaatatacagttgaccctggaataatactgtgtgggttcaattatatgtgaattttcttctgcctttatcacccttgagacaacaagaccaacccctcctcttcctattcagcctcctcaacatgaagatgatgaggatgaagacgtttgtgatgatctt

SEQ ID NO: 397 - DNA, 200 bp, Homo sapiens
  misc_feature (1)..(200): DMR2:225536201
ccctttccagctgctgctgtcagtcggccaagccttcttcctcctgttctcccaaggcgctaccacatggtaggcagcacagtgctctcagcctatgccattccctcttgccctgaaaaattcacctgcttcctgccccttgtcattactcatggcattacctgcatgaaatggtggcctatttccccctggcctttggg

SEQ ID NO: 398 - DNA, 1000 bp, Homo sapiens
  misc_feature (1)..(1000): DMR2:225600201
tgaaattgtcttgtgctgagtaagttcctgagtggaggccacaagatcaaatgagccagtttattgatctgggtggtgccagctgatccatcaagttcaggatctgcaaaatatctcaagaaatgatctaggctttacaatagtgatgttatccccaagagcaatttgggaagggtcagaatcttgtagcctccagctgcataatttctaatcttttggctaatttgttagtcctacaaaggcagtctaatccccaggcaaaaagggggtttgttttggaaaagggctgttatcatctttgttttcaactataaactaagttcctgccaaagttagttcatcttacactcaggaatgaataaggacagcttgaaggtgagaagcaagatgtagttggttaggtcagatctccttcactgtctcagttacagctttgcagtaacagtttcacaaccatcagtttcacaatcatcaccactcaagagctttcattcttcccaactaaaactccatctcattaaataataattcccaatcccctcttcccactattctactttgtcttgaatacttcaactattctaggtagctgatgtaagtggaattagacaatatttatctttcagttactggcttatttcacttagcatgtcctcaattttcacccgtgcatattgcaggatttcattacttttttaaggcggaataatattctgttttagggatataccacattgcatttattcatacatccattgaaggatatttgggttgtttccacctcttggctattttgagtaatacaaaatatgtgatggacatgagtggtgtatgataatctgtttgagatctcactttctattctttagaaatacccagaagtagaactgctgaatcatgtgggtagtaattctgtgtttaagttttttttttttttttttgagatggagtcttgctgtccccaggctggagagcagtgacgcgatcttggctcactgca

SEQ ID NO: 399 - DNA, 5600 bp, Homo sapiens
  misc_feature (1)..(5600): DMR2:226792201
gaacccaaaaggcatggctggggtctgtgtctttgtcagctgcagtttcaaaactaaaagataaatttgatgccaggtaaaggtggcagggctgctatgaccgagtctgagaggctctttttgccctgcttcttgggctctcaatttactctctgcagagagtgggccacaagtactgcgaaattctgaaaaggagcaaaagaaaaaaaggataatgtcaggaacatgaaataagaggtggaaacaaagggatggcaggggatagtactagaaaacgagcaagccagaactaagaggctatgcaagagaaagggcaggcagaaaaggtcactggactacaggtaaagcagacaggcttccaacaagtagagctcctgagctcagtgcttcacaagtgttctcctcttaacagacaatgaaaaattttaaacaagccgagatgtttcaacagagcccacgcctcatcatacctctattcctttcaccgagtctcaggttttacctgagaaatgaggaaaagaagcaaagacagcaattgctgaggaagtgaggaaaataatgtttgcacacacattcggagcagaagctgtttgccactcacaggtctgacttctgtctgtttcagatagctatagaataacatctttggactcaacagggcacaggcaagcaagcagaattgaggatgtaaatgtgccaggtagcatttggtgcctcactttaaacaccaacacaaacatctcaaatacgcattgtagaattttcctggcactgtgcaaagcatggtcgattgttactccagaattattagaaataggattatatgattattccagaatattttattttcccaaagaaggttaaggatagaattttgtagagtttttgtttttttaatgcatccaacacataggagaattttattttaaagccctttttaaaaatgaaaattctagttggtcatcaattctcttcagagcaaacatcatttattctactctataaaaagaaacctaaacaaattaagatgacaagtaagaaaaacttattctctttatctcctttaaaaccaaaattttagttctgctgggctggttttcttcaaattctcattattttaccaatgaggcactttataatacaaatgcttaaagtgttgagggattctgactcccaaaaacatcatttgatataacaagatttgtactactgatgttgatatacacaattaaatctttcttctagtgaatgatgaaaataaatgttgaagtaaatactgatcaaataaatgctttttgtaacatatcacccaaaatcttcatttgagtgttcatatacctttttcttgttctataaaatagagaattatatggatcaaatattggaaacagaattaagaagactatgaacacatgataaataaatacctgtcaataggaaaccagggcacagattaatttcttatgaatggacacaaattaagaaaaatcagtgcttttaaaagctcattctgtggagcatagataaaattcacaagataatcagtttgtcagagtaaagtgtttccaaatgctggaaacttctgcattgccaactcatcacattatttgcaaactgtactctcttctacccacaattatgaccaccagaaaacaggatcaacagaacgaagggcaggctaatttcctattacaaatgtttttcatttttaatacggcattagccacagaagacctaaagccaactttcagcatttactgtggtgtctacttttgaacttaaaggcacacagcaaataaccctaaaagtggagggtatacagtttagcccttctactcaatgcaaaacaaaacaaattaaggcatgttcctgacttagtatgcattcttctcaacaaataaaagtaattttacagaagatatatagtagcccccaaatgatatctgtaatgtctcagtgcaagaagagataactataaggcagacatcctaggatgaactcccataactcttaataatgggtcccagacacatacagagtttcctgcatatcctgtacaagagaggccaggcccgtgggatggtgggtcggtgtgtgaataatatttcacaaatcctggtacatgaacaaaaggagaacgtcacccataattactttcttgagagatcacaaaatagataggtacttctctctaaatacatatttctaaaaagctcttactcctgatctttttagggcaggatgaatagaaatcaatgcttcccgctgctgtttatgttgccctagtattatgaaatcacagaacaaaagtacagagaacaacttgataagatcacccttaagggctcccagaaactattaagatagtttaagataaggaagggtttagcccctgtgttaacaaatattttttgtagaactgtcccttccaggggctgacctaaatatatagtgaaaagaaaacttcaacaaacaaatcaagcttcttacggaggaactctacaaaacgcagaactggcataggatatatgttttaaaaatactgcagtaactacttcacttgggaattctcaaacgaaaaagccctcctgtggctgctcctacatgtttgtttgactctctgccagatgtcagtgtggggtgagcatcttgtgtgccctgagaatgtaagtgcattctccctgaggaagcagtgggaaagaacaggaaggggcagaggcgaagaacagaattcaaggacaaggttaaaagcagttttgtcttctgactttgtcaccatgaaacgcacctgctgtgatgtccagttgagctactgacggtcctctggctgcttctggaaactgatgctggcataggcgcttaaatcctcacttgagcggcgggtggagctgctctcaccgctgcccaggggttgatgagggggtgggggtgggggaggctgcggttcaggggtgcactcctgagggcactgtttgaagtccttgaccaaatccaggtctatgtagttaagaccattctccaaacccccagcagccccacacagtttggctggctccttgggggctcccccaagctccccaggcctcagccacacattctcaaaggaagcagagctgtggcgtttcacatcctcgctgctgctgctgctaccgccaccgccccctactgctgcccccgctccaaagggcactgtgttgcccacccgggtggcactgggtgttgaggagaaagtctcggagctatgcctccgccggcacccttgtgggtctgcacggatcactttggcactctggttgcggttaggactgaggttcacccgggtgaaggcgctcatgcccccaggtccttgtgggccccccagcagggacgagtgggcagccagctctgctgccccttgaggcccagtcggggaagcagaggctgctgaggatgaggaggcagcagccatggtggccctgggcaggctcacctcctctgcagcaatgcctgttcgcatgtcagcatagcttacaggggcagctggcgaggtgtccacgtagctctgacggggacaactcatctgcatggtcatgtagtcaccccggctgctgggcactgcccgggtaggcctgcaaatgctagcagccccgggaggtgcagggcccagtctgcccatctcgaccccagtgctctcctgccaggctgccctccggcccggccccaggtccatcttcatgtactcctcagtgccagtctcttcctctctgggagctggctggagctgggatggacacctgacagaaggtgagctgtggaaagccaccgggccagacaagtagccagactgatcactcccaaattcaatattgacatattcccccgggctcttgggctctggagggtgcagcaagggctgctgctgctgctgctgctctcgggcccgaggtaaggtgctggccttgggatcccccagggacagcctcgtgggccgggccaggcggctattggtctgagcagctgtgtccacctttcgaggcagatggggctgcagaacctgatggtggggatgtggaaggctgggctccagcctagccccgcagtatcccccacccaggctgtcgctgctggtggaagaggaagaatcatctgctgttgcagcatagagaaggcgaccagagctagtggaaaggcggaggtgctgatgccgggcaccctcctccggctccccggggcgctgggtgtgcttaaaggatcttggcaatgagtagtaggagaggactggcttgtgctgggggtcctcagggccgtagtagcagtcggaggggctgctggtgttggagtcccccactggtgacatgttcatgtagtcacctgtgcaaggtaagagcttaccaccgctgctctccactgggggtttggggtgaggcaagacatgagagtggtggccccctaccccgtttgtccacagctttccatagctggtcccggaagggacggcgttgctgctgctgctgctgctgctggggccacctccaatgtcaggagagcagccaccgctgggggacatcatcatgtagccattggggtccactctctggggatggcgtctgatgggattgatgatctgctgtggggcagatacgctcttggggctcatgggcatatagtctccactgccctttcggccactgggcactggggccacccctggggacatgggcatgtagccatcatccgtgtggagggtggagctgtctgggcggtggtgccccccccgacgctccaaggggtgcatttccagaccctcctctgggtaggagcgggtgggcacgaaggcggagtgcctgtgtcccggcagtcggcctccactgccacctcctggtgggtaggcaggcatcatctctgtgtactcctcaatggaagccactgaggactgggacggggtcttctggtgggtaatggtaggggatgtgcctgccgagtgagttctctttcggaaccgattatccagatctgcagcactggctgcttcatccccagccaaggctggactcgtgcccaagcctgttcctggggtgcagcggtggccattgccaccccgagacaaaatgtagtgaccgttgggggcggtcagggtggagggccccttgccacccatgcagatatagttgcttagctcctcctcaccgcgggctggtggggtgtggcccagggaatccggagtgacactgcggaaggaactccggaaatcgcagggactggagccatactcatccgaggagatgaaaccgccatcgctgggggaaccagacaccgaagcactagatcgccgtgggaagagacaatccgaggtggagccatggccactggtgctactggacgacagactgaccgggctggtggccgaaggcgagcagcgggaagccggcatggggatggagcggctgtggttgagcggggggtgcagccgggcgctgccccgatgccggtgggcgtgggttctgttggtgctgggactcacagggctgccgtccaccgaggctgggcgggacatggtgccttcgccgtcactggaggcgcggacacggaaggagcctggcttcccgcccaccatgctggcc

SEQ ID NO: 400 - DNA, 1400 bp, Homo sapiens
  misc_feature (1)..(1400): DMR2:229364201
aatttcaggatactgcaaatgttcctctaggctggggccacttactgagttggtgccctgggatgagtctacctctcaagccggtcaaggcaccctattccaacccctaactgagatcatccattcatttcaaacctcaaatgttaatgaggtctactacctgccaggacccactggagacatagaaataaaagctactaccctttatttacagggtagtggcataaagagtcaaataaacaattaaggtggggcttgcaagggttggtatcagggcttcctggttgttgtattgcctcagttcgctctgaaaggaaggcgctaagatgagcagccatgcagggtccaagctggaggagggttgagttctctgtcctccctcgcagttacataagcaagactgggtgcagctcccacctcagcactggtgcagatgctcagggtctcccaagttctccctcccactggctcctccccatggaagctgagttctggcttttgcttctattagaatgacaagatcactgtaagatctgagaattgggtttggggaatttcttttggagaaagcaaactcttcgaacctcttagcttctatgccattcagatagaataatttgggttttctcatgtctctctctctctttttttttttttttttttttttttaggtagagtcttgctctgtcacccaggctggagtgcagtggtgtcatctcagctcactgcaacctccacctcgtgggttcaagtgattctcctgcctcagcctccagagtagctgggattacagtgcttatctttgtcgttgctgttatgatacatttaggtagatataagaaaacattcatgatatttcacttttacttcttatcattcccactgtaaccagaatctgaagctacactttcccaatatgtacctagtaaaagctaagtagaaattcaaaagaaacacagaacccattgatgaaggataaaaatctcagtgaagaagggcagacgtgtcccaaaggagcacagctgtgaaggtgactgcagctgactcttaggctgcctgatttggaactttggaaatgaggaggagtcacagagacagtacccaggaaggatgctcaacctctacgggcctgcccaggtcagataataaaaagtccttgatggaaacaagacggagatgaaaaggacagaaaagagaaaggatgtggatatgtgctgttgagatagaaaacccagggatttttgtttttgttttgagacagagtctctatctgtcgaccaggttggagtgcagtggtgccatctcagcttactgcaacctccgattcccaggttcaagcgattctccttcctcaccctccagagtagctaggattacaggcacccgccaccatgcctggc

SEQ ID NO: 401 - DNA, 300 bp, Homo sapiens
  misc_feature (1)..(300): DMR2:230118001
cagttctccaggtacagtctgtcatggcttcccttggctatgaaagggaaaacccccaaccctttgcacttcctgagtgaggtgatgccccgtcccacttcagctcactctccatgggctgcacccactgtccacccagtcccaatgagatgaaccaggtacctcagttggaaatgcagaaatcatttgtcttctgtgtcattcttgctgggagctgcagactggagctgttcctattcggccatcttggaagtgacctcgtacatatatttcaaaaatataacttacttgcagccgggg

SEQ ID NO: 402 - DNA, 1000 bp, Homo sapiens
  misc_feature (1)..(1000): DMR2:230784801
tgctactcaatagttgtctggccacgagagcacaccgaacaaaggagacagagttatttataacctgacgtgtttaccctactgctgtgtccagtttccattggctgggataggacctcacattttacactttatcctattggctattagtttaaaactttcttaaataggtaaggggaacagaacaaagaaaaggaagttgtccaggactagttaaggaagcatctccaaataaggaatggcatgcactgtgggctccggtgtgcctaattctgtccaggcatgctggagcaagctaggagagctgatttggaatacatacatatacacactaatagtgcacagcaatcttatagtaagaaattgtgacttttcataatctttgaaaaagaacttccccatttctcacagtaataaagacacacaattgtatttaatgacatgcaggtcagtgactagccaaaaggattgggctgaagagtgagtgaggaaaaagacttggactatggtaaatacaggcaaatgttttgagaggtttaattatgaggtgtgggtagtagctgggcaggggcgcgtgggcaggggggcaggggggcagggggcggttgtggaatctaaggagggcctattcgattttgtcaaatggagtcttaatcaggtttaaaactgataggaagaaattaggtgaggggagattgactctgtgaggaggaggtgaggtaacaggcagggtgagttcctaagaacgcatgggggtggggagatccaaaagcagatgaggattaatgtaggtggcgggtgcagtatcagctggtgagggaattccttctgaaagagaagggggctttatacagagtccacaatgccattcaattcagaagtacaacaaatagctttctctctcttttttttgagacagggtcttgctctgtcacccaagctggagtgcagtggtgcaatcatagctcactgcagcctcaacctcctgatctcagcctca

SEQ ID NO: 403 - DNA, 1400 bp, Homo sapiens
  misc_feature (1)..(1400): DMR2:231892201
aagtcaagggaatggagtgaggtcatctttaaaggcagaaggcccctcaaattagagccagctgtgctccgcctctacacctggctccacacgcgggctcgtccgcgtgagagatgagccgggaatgggataaaaaccatcccagaacccacaggaaatgcaagtccctcgccaggtagaggctgaagtaggaatgcaatgatattagcagctcttgaaactccatagttcagtacttcagagaaatcctcaagggcttttaaagctttctgttcctttgctttattttgtttttaaaaactgtctcccaatctctttcccttcctctagtctcatggttacttcctgttccaggcacctgcacaatagtcccaatttcccctaactaagacccctaagtgtttgtcctaagttccgatggcgagctctgtaccccaacctcctccacgaaaaagggcggttcatagaggaaattccaaccaaggctccttgggtctgaatcccgttctcattcttaccagctgtgtgatctagagtctatgccttggtttcactcatttgcaaagtggggataagaatagtaaccacccggccgggcgcggtggctcacacctgtaatcccggcactttggaaggctgaggcgggcggatcacgaggtcaggagatcgagaccagcctggccaacatggcgaaaccctgtctccactaaaaatacaaaaattagctgggcgtggtggcgggcgcctttaattgcggctacttggaaagctgaggcaggagaatcgcttgaaccagggagtcagaggttgcagtgagccgagatggtgccactgcactccagcctggcagtagagcaagactccgtctcaaaaaaaaaaaaaagaaagaatagtaaccacctaatagacttgtgagggttaaaggagatgatttatgctaattactggagtagtggctggcacatggtaactgcttagtaaatattagctacttttacagtgaagtagaggatagaaaggagttgcatttttattggataacaaccctagacattttgtgcattccagagaaaggtatgaaaaggaacttcctggagctgcctggtctggggcgtgcaagcatccctgctggcatctctctatgggtctttgcttcccccaagcatcatggctgaaaggaattttatgaactgttgcctttcgatctatttccaatcttatgtgcatgccctttgctgcaagacgctaaagtgtctcccactagagtaggcagagtgtatttctctgctccatggatgttgggcttggctatacgacatgctttggccattggagtgtgggcagagtgacagtatgtcagttccaaagagtgtcagtgctgccacccacccctcttgcac

SEQ ID NO: 404 - DNA, 2600 bp, Homo sapiens
  misc_feature (1)..(2600): DMR2:232534801
gggagaagaagagaggggtctatccaccttcctcagcccctaggagagacccctgggcctcagttcctctctagccccagagccctgtgctacagcagagagggaggctatggtctgttcccgcctcctcaacagagtgatcagccctgcctgtggccagaggggcctgggaccttgctggggacaagccagcattatcctgcaagcccgaggcagcctctgcaggcacactgagccgccctctgcctccatggctgggccccagcttgggggtggggctttgtggcctgaggcccttctcaccccactctctctgcccctacccacaggagaaagacagctggaaccgagtggcccgcacagtggaccgcctctgcctgtttgtggtgacgcctgtcatggtggtgggcacagcctggatcttcctgcagggcgtttacaaccagccaccaccccagccttttcctggggacccctactcctacaacgtgcaggacaagcgcttcatctagggtgggcctgttggggagccaggagacagcagggtctgagagaggagccacagtccctaatgacacccactcctagccctgaggctcgtgcccctcagactggggaagagtccaaggaagggagggagcagccactcctcaatgctcaatggctcccctgaaatcaagacaggggccacccgagatggtctgagggtggacatcggctacagtgggtgggcaggacgatttggggggaggcccgaggctggctcaggggccagggaggaggccactcagggtggcctcagggggagagctctgataggggtgagacagatagggccccttctctgcttctcctcccccaaggtgtggggtagagcaggcaggaatctgcgccttcactctctggcccctccagcctccctcttcctacctacccttcaacctcaggcttctgaggcctcacctgggactgaggttgaggacacctccctccctccagaccccagagtatcctttcctagctctttctgccttgacctctctgcctaggtccctttgggaagttgaggactggagtggaaaggtcaggatcgacatccacaaagacttggggtcagcctgaggttgcacacacaatcctagaggaccagaacgcagcacctctccccaaagggtccctgccccccagcacctactcctctccaaattagggttgtcatgcattatttggggcatacatattctaaaaaatcattcgttgtttctctgaaatttgtcccctatttttatttgctaaatctagcaaccctatcccaaaggcagcctccactcaatcttatcctgagggccaaaggccaaggctgcaggaattgggagacaagggtctgtttgtatggtggtccacctccaagatggccccagtgatgcccagtattcacacccttgtgcagtcccctcactctgtaccagggtgggtctgggtaaccaatagaatgaggcagaagtgatggtacctcacttcccagatttggttaggaaagacactatggcctctttcttgctcattagccctcattctcacatcagttggatctctcactttggggaagccagctggcatgttaaggagccctatggagaggcccacatggcaaggaactaaggcctcctgccaacagccacgtgagtgaatgtggaagtggatcctctgccccagtagggccttcggatgagatcacagcccagtagacatcttatgtgcagccccatgaaagtccctaagccagaaccaccagctaagtgactcctggattcctgacccccagaaactgtgtgagataataaatgtgtgttgttttaagtgacaacgttttggtgtcatttgttacaccagcaatgtgaccttgagtgagctgctcctcatctcactcctcaccttccatcttctaatctgcaaaatgtgtgtctagtaagtcctagtcatggggtgttgtgaaaattgaatttctagtaggagcattttcatgtgacctgcacatttaatgggtggtgatttaacccatttccctcaggggggaattggtgacctcattaactcagatatacagaaggtgagatttttaatgtttagatgtaaccaaggaaaaagaaaaaccatttaaaaccaaaactgaccctagtaacttctgccttccagcatgaactattcacaaaattcaaggtacaaatctttaattgtcctgtctaaataggaaagccagtttgttctcacacctgtcaggtgagcaggaaatctgagacttccccaggaatagcccatcaactcagggagggtccgtcttgtgcacagagagtctagggccctcagccacagtctttgcttctctctgcctcatggtggcgctgctggcagcaggtcttggttcaaccaccaggtgagtcctcagttctattaggccctgctcaagtggctgtggacttccagagaagacaaccccaaaatgtcacacaaaaccgggggggtgcctcctgcacaggctcccagggtcaccacagtttccaccagaggcacccactcccccagcacggtggtgctgtcag

SEQ ID NO: 405 - DNA, 1900 bp, Homo sapiens
  misc_feature (1)..(1900): DMR2:235285201
tgagaagcttaatgaaaatttgatttctttccttctaaactatctcttttctactaactgaaatcaagtaggatcctctctctacactggaaatgcaggatatggccaggtgggatgtttctttcaataattctcactggagacttttttcatggacattgccactcctgggtctctcccttttattattacgatcttttctttgatacgttttcatggacttttatgtttcatattttatgtggtaaaagaatttctccacttactcttctacatccttagcttggttttcaacagtgcctaccctgccccacactcgctctattgagactttatcctgcttgtactaggtcccgttcgtgggtgtgttttggtgaccaggaagcttgcacacatgattcagcactgttttctcacttgcctcagtgggtgactgaactgatccctataggcaccaatgtagactccatctgcaattttgtaaatcaagaggcagtcttgccaggcaatgaggccggtggctacagggttcatctgtgagaccaccctccactcagtgtgaacttctatactgaacatggggagttgggagagataggccaggagaaagcttgcctttcttgatgtgtaggtggtctgggaagagggtgtcaggatcttttgctagggaacaataataggtgtgttcggggcagttgtgtaatcaagatcccagctgcacctggtttgctacctatcctaagttaagaaagtagatggggtaaatgttttcatctgcagtttttatgtaggcatttcatagaactgtggaggctttttttctattgctagccaaccacaaccatcccagccattcctccagcttccaatgaagaggtttaggtgcctgagaccacccagagctggaatcacgggaggacagcataaagacgttgcactagcactgtgctatatcgtccctttgctcttccgtgtatttgctcactgaaaccatggttagtggaagcaactgcccttcttttccttctgacccctttaacaaatcctcacaatggaaccctatgacaaagccccacctccccttcctttacttagcaaaaactctggacaacactagcatcaagattgttggtctctagtatgggacatggagactgttctcaaactgaacctctccctctcctcctttgccccctccactgccccaaccttgttaaaaggcttggttcccctggactggaggttgtctggggggctaagcttttatctcttaggcaccgcttttattcatggaacacatttactgtttcacatcattcatttattcattgggcaactgatggacactttccatcagatgacaaatggccagggcacatgctgcagtggtccagttccatacccatggcagacatcactaatcaatcacggtttatttgatctgagtctaaatgcagccttggctgtattcattttctattactgagataactaccacaaacctagtgtaaaccacataaatgtattagctacagctctgtgagtctaaagtctaacacgggtctcatctggttctggttaaaatttaggtgttgacagggctgtgctcccatctagagactccaggggaatttccttgcttactctagctattggcagaattgcattccatgctgctgtaagactgaagtcaccatttccttgctggctcttagctggtggctgcctttctcacccagaagtctctctcaggtccttgcacataaccccttacagctcggcatcagagggttgagtctgtctcatgctgccatctctctgacctcttttgcctcctctcccacttttaaggactcatgtgattacattggtctacctggataatccaggaaagatctcc

SEQ ID NO: 406 - DNA, 900 bp, Homo sapiens
  misc_feature (1)..(900): DMR2:237240201
ctgattcatgagactgtctctcattgcctcccttgttctgatgaagtttgaggctctctgcctctaccccctgccccactccattcccaacccccacctttagggaacagtcgtagcctataaaacacttagctgcagtgtggaataaggccctcagcaacagggcgccaatgactctctgatgttttggtgtcatcctgtgagaccagaaaggtcgctagtctttgctactctggcttttttttttttctgtctatgtaagcaataaactatctgaacctaaaatgtttcattgtttctttacctgttgcgggaagtcagggaccccaaatggagggactggctggagctgcggcagaggaacataaattgtgaagatttcattttaatatggacatttatcagttcccaaataatacttttataatttcttatggctgtctttaatctcttaatcctgttacctttgcaacctgaggatgtacgtcacctcaggaccactgtgataattgtgttaactgtataaattgattgtaaaacatgtgtgtttgaacaatatgacatcagtgcaccttgaaaaagaacagaataacagcgatttttagggaacaagggaagacaaccataaggtctgactgcctgcggggtcgggcaaaaagagccatatttttcttcttgcagagagcctataagtggacgtgcaagtagggaaggtatcactaaattcttttcctagcaaggaatattaatattaatacccttggaaaggaatgcattcctggggggaggtctataaatggctgctttgggagtgtctgtcttatgcggttgagataaggactgagatatgccctggtttcctgcagtaccctcaggcttattagggtggggaaaaactcc

SEQ ID NO: 407 - DNA, 200 bp, Homo sapiens
  misc_feature (1)..(200): DMR2:237336501
taggacttgaagtaacgttattcggaacatttctgttaagacaaattaaatattacctctacttttacctgctatctaaaataaataaagacataaccccatgagctacattaaatttgttttagcaaaatgcatgcaatagtttttatagattatgtatagcagtgcatatattaaattccttcttttaaggatctgtg

SEQ ID NO: 408 - DNA, 300 bp, Homo sapiens
  misc_feature (1)..(300): DMR2:237679301
tgtgtgattacagagcaagcactaactcacaaagctactgtgtcctgattatttctctaattgtagagtaatttaaggaagaaggaatatatcagcaataaccgtaaaatgatgatgataatggcagttctgatgttcatacccaacaaagaaatcagcaatataactactgaaagggtgtagataaaatttgtaaatacttgcggattatgtgtatgtctaatccaaaaagtcagtctcaaactgagagttcagtaagatagtttgtaataacagaaacaaaaaaccaaagcattccta

SEQ ID NO: 409 - DNA, 1100 bp, Homo sapiens
  misc_feature (1)..(1100): DMR2:238198201
atacataaggaaactactgattagtcaaaaccttagatttttttttttttaaattgagacaagagtctcgctctgtgagccaggttggagtgcagtggtgtgatcacagctcactgcagccccaaccttctgggctcaagcaatcctccctcgtcagattcccgagtagctgaaactacaggcatacaccaccatgcccagctaattttttaactttttgtagagacggggtctcactatgttgcccaggttggtcacgaactactgtactcaagcaatcttcctgcctcagcatcccaaagtgctgggattacagatgtgacccactgctccaggcccttacattctattttgaataaactgaaattcaaagcattgggggctgcaatcattggacaaagtgtgaccctgacctaaaaatctggaagaggcccctcccctaatcttaaaaatattagaaccctaataagaatacaagactaaaaatgtccattaatcatagttaatctcatctagaacttttttttttcctcagttatctacattctggagctaagtctactggaagttatatactatgctgagaaaaatacccttgggttgatcatattcaggttaaaggttgctgtatccaataaagttaaaaaaggatgttaaaatattttggctaaattgttttttatacctcaattttttcaactataaaataaatccaggtgttttccaaacaccacagaggtattatcagaaaaaaggggggacaggttccgccacaccccccaaccacagtatgagtttagtgtatcctttccactttccttaatgctcatgcacatggactcatgcattttaatttgtagaagacagagtcatactctacacaatactccacatatagtgttcacataacccatcaaggcatgctccaggccaacacacccaagtctaattcatcctctccaacagccacacatgggaagcatctccactcattcgaccagatccttactgatgggttcaagcttttcccagttcttcatatgataagtgacgccacaatcaacaatctgatacatgtattcctgcttaatctgctagac

SEQ ID NO: 410 - DNA, 200 bp, Homo sapiens
  misc_feature (1)..(200): DMR2:238780501
actttaggtatagtataaaaaccttacaatagtatactttcacatcttcactcccagccttgatgctaaggttgccattcattttacttatacatatgttaggaacctcatgctctgttattatttttgttaaatggtcaattttattttaaagagattctgtataataagaaaactatcaatatatttactcacatagt

SEQ ID NO: 411 - DNA, 3000 bp, Homo sapiens
  misc_feature (1)..(3000): DMR2:239301201
gaagggggtatctccctcttcccagcctctggttctaaagtcggtctcccatcccagccacgacgaggggcgatggtggggcgtatgcagcgtgggaactgaccctgccgtgaacattcctcctgcctgctgagtcctcgatctgctctcaaagtaacagctccagggcgagagcagcagcccacagccagtgatgccaggcgaggccagtgatgccaggcgaggctcccacactggcccacatttctaaattctgctggtgctttctttctttttttttttttttatttttctctcttgaaacagggtctcccctctgtcacccaggctggagtgcagcggtatgacatggctcactgcagcctcgacctcctagctcgaaggatcctcccacctcagcttcctgaacagctgggactacagacgcataccaccatgcccagctaatgtttttaatcttttctgtagagaggaggtgttcctatgttgtccagattggtctcaaacttctggcctcaagcaatcctcctgcctcagcctcccaaagtgctgggattacaagtgagagccactgtaggcctatttctttctttatgaaaaaaagtaagagtaaattgtgatcaaatactacaatgctactgcggtgtgattcctgaatggtaaaaaccttaccatgctttgtttctccatcagatgccttgctcctcactactgccaaggagattacgcctaagactgatggtacaagtcttttctttaaaacaaacaaacaaaaaaacacaacaacaacaaaaaaaacaggcagggggtgggggattcagagtcctttactgtgaggtcaagaataattcctagccatggaaaataatctctaatgatgctataaacagacagctcaccaaatcaatcagaaaacattctcagtatcattctcagtctgtcaagaacagaaaacctaactcctgcaggctttactgtgaaatgcttagaactctgtcctgattggagaacatggccccttgtgatggacaggcaggcggcggccaaagcccagaacccagcattagccaaaggaggcatcaagctgaagtctcgggtgagttcatttcaaagtcaagggcaaggccaccctggcagcaaattcttctggctactcaaattcgaatattgcagaactagcactagagttgccaagctataaaacacgagcagagagaggaggcccttccacaggaatccagattagcaaaaccccttgctctcttcatcaaaactcagataagttagctgaaaacctggggacggaacagcttcccccaggaaggagaatccacgtggggccatgaccaagcactccaaacactgcagcgggcgctgcccctcttccagcgacacagtgggagcagcccagccatccagtgactttttgtggacatggcccagcccctcaaccctcgagccaggacccagtccaagagcacagcaccctccactctccctgggcctgagcatggcaccaatgtgcttcacgcagagcgtttcgtgggcgcacccctgcaggaagaaccatcgctgctcaaggcagtcatctaagaactgctcactcttgagaagggcaggtcatcttactcctccccaaaagagtctctcaagttaggctctcacccataggagggacttgctgggcgtgcggggaatggcattgtggtgacagccccaagcagggggccacacaggctcaggcccggagcaccttggcagggagaggaaaggtgtgggcactgcctgggcactctgcatgctgggctgggcgtcacccctgccacctcgggagtcctcaaaccccccccgggtgggagaggtcatcacctccgcgtactgaacagaagcccagctcagggttcagggtgggcccctggattcaaagtggcaacagagcctgactccagcctcagggcgtgaggcacctggccctggcctgttcccatcccacacccggctgctcaggcctggggacaggagggcacagggacaggcctggaggacaaggtccctggaatccccgacagcttgacaatgtgaaataagtttcgcttcctttttatctacgctcccggattgacttgtcctcctctgatgcctggttcctctgccatcaagacccgccgtctggtgtgaagggaaacgtccctcacccttctgcagtcgccaccgagcactcgtggtgtggcccacagggcatcctgcgagagcgtcacaagcaccccacgaacaagacacggcagcgtgcttcctcgatctccccgctcctttctcgggacagcctgtggcttgttctcccttaagaatcctctcatcaatgttacgttgtcagctttctctgttttctttctttcttttttttttttaattcacaattgaggaaaccaacaggttgagctgctgcctcaagtaaaaaattcaagtcagccctgatgctgtccatgttttttgtaaaacttgctcacttgtaaacaacgtcgggcagcaactgcaggcctcacccctcactcttcaaaagcgactgcgacagctgcatcccccgtgctcaactgcagggcgcggcactcgcctatgctctcatgaagccccgtgccaagggcttctccgggaccccagatacccaccagaccctacaggcctgccccgtggccctgggaatgcttggcaccaaggtcccacttcccacctcagtcaagcacctgcctcccaggcctcaccagtcttcatctcagcccgccaggtcctctcgagcccctggagtgccctgtgagccacagcttataaagcagataggaccagctctgcatcagacccctgtgtgcaggcccagctccccgacccgtaagcagttgacctcagaccagctgcttaacctctctgagtcagctttcttacctataaatgaggataaaagcaggatattcacaaagcccagagctagaatgcctcaagcagtgt

SEQ ID NO: 412 - DNA, 1900 bp, Homo sapiens
  misc_feature (1)..(1900): DMR2:239918201
tggcacatggccagcacctgccatgttgccaggaaaacccaccattgggtattttccactgaggtcccacagccctgggcagcaacaggccagggaggccctcaccaaggaggactggacactggacatacatgcgccccatcgcccttgctctcaggaagcccacccttgcaggagccttgaacccgaggcctcctcaggtgcccccgcacgccaggcctgacactcagtaccagtggagacttcctcttgagcccctccacccctgtgctaacccaatcctgtctcccaaggacagaccctgacacagaggccagggaaaacctgacttggcaaaatcactttctcacccatgaacacaatctcataccttagttccctcccctcctgcagtggcagcctcatccacagaccctaagaaagcccccagctctggagaacagctctccaccattcacaagttctctctcctccactttattcccaggtgtgggtaggggtggagttggtgcctcatcctcacagaacaaagatggaaatccagcattgggaccacgcatggtgactggttacccacgtcagctcccacccgtgtcctcgctctccacgctgagggcttgccaaggacacagccagttcaggaaggggtggcccgtgtggcagggtctcctccaggtctgggtccagctgcctctgatggagttcaccctcctcctgctcgtccagtgtccatcttcccatccccactcacagcaggtgggaggccaatggcagggacacagtaaccggctgcttccaccccatgaagggcagactcctgacaagatctgaagacagcagggatgggaggtggcacttgtctctccaggtctaagcaccatcttgggaggcagcagaggggccgaggtgggacagactgacacccactgctgaggaggaagccagaccaggactccagtccctgctccagccaccatgtggaccttcggtggcacagaaggcatgcagctctggagccactgacaacagcagccctgcccctcttcgggctgttttctcttgatggtttgtttctcctggtttgtctcatgccccctttgcactggggcctcccacccctgcttgaaatcacccctccctcctcactctctgcccctccctgtccttcatggctccttgaattactcgactagcctacttctgtctccttctagaatgctggctcctcgagggcaggggcatcctcacggctttgttctctgctgcacttacagctcccaggatgattcctaacacgcagtgggcatgcggaacggggtaagttgaaggaataaccaaacgcagccttaaggctcatacagaaacagattcaccaaaacacctgcagtgcccgccactgggtgtggggttatgggtgattttagcattcttcctacagtaatccaagtaattcctgtgaaactgaggccccatcctaagaggatcacattctcagaaaacctgacacacaaacaaaaccatccctgagaatacctcgttttccaaagggcttctccacctgcagcctctctccacacttcacccttccctgaacacatcttccatgaactctgagttctcctgccatttggagagaatgcgggggaagacacggcccctacggaaggaggggtggggccgcccaggtctgccatagggaggcaaggaggctggtgcccctgcctacgccagtccttccccatcaggatagccacggtccaaggcctgaaattaaggtgcagtactgtgtgtgccccagcacctgtgagattgggggccccctcaccctgctcccagggtgcttcccccccattcatatgttgaagccctggtcccagcataatgggatttggaggtgggg

SEQ ID NO: 413 - DNA, 2500 bp, Homo sapiens
  misc_feature (1)..(2500): DMR2:240108901
cagaagggaatatcccccttacgggccagcgtgagctcatccagaagctgaacagggcagctggtggcctcttgcacactggccagcaatgcaccggctggtccctgtgctccatgggacatgtgatcctgagactgtgacctacttcctctcatggcctcttactttctctttgccccaccatgtccctgctcaggggttatgtcaacccacagaaatggaaatctctcagtggttcctttgtgggagagcatgctgaagggacttgagggtggcctggagaaccaggccctgctctttgctgtgttcccaggtctatacatggtgaccatcccgggaaacctcaccatgaccatggtcatcatcctggacacgcacctgcacttcccagtgaacttcttcctcaggagcctcccccttcctggaccttggccatgcctccatcaccccaatgccctggttaacttctcttcctcgtccaaggtcgtcacctttgcaggctgtgctgcccggttctttttctccttgctgtctaccactgagactttcctgctggccgtgatggcctatgactgcttcgtggccatctgtagtctggtgtggtgcccagtgaccacgtgcctctcgatctgcatcatcctgggaccaggcacctactgcagggtctgcctcagctccatcgtgcagaccggcctcatgttccagctcccttctgcagggaccaaccacattgaccactctgtgacatgccccagctgctccggctggcctgtgcatgcctggccctcaatgagctgaccaagttcagcctttgtgggctcatgatgggaacgccactcttgtggtcctcgtctcctttggctgtgtcacagtgaccatcctgaggacaccctccgcagccagtgacataaggtcttcacctgtagctcccacgtgatgaccgtgtccctgtttgatgggactgtgtttgtcacatatgcccagccagggactatggagtccatggagcagggcaaggtggtgtctgtcttctacagcctggtcatcccgatgcttggccccttcatctacagcctacgaaacaaggacatgaaggaggccctgcggaggctgggccagagacaagcactcatgggaaggatggtggcctgagaaagacagggtgccctgggggctggagggagggcaggagggagaccctgggtggtgaggagcccccacccttccccaggtgcacatggaattggatgcactgggcaatgtattcacatccctctaatccccctgcaaagcatgctatgagcaggcagtgactaagtgtgtgatgcagagatggacaggcatgttctgcgtccagggctctaaagggtcagacagggtgcaatggtcccagtcatgtgaagacccagcacagcaaaatgaagggtccaaagcagggcgagccttctacctcccacccggcatggcttctgggccattccatgtgttttcgtgggagagaggttaggtatttgtgcatcctgatcaaacttgtcaaagaaaaaaatgtcgacgtgcaatttatccccaaccctccaaacccctgctcccccactccaggcagggcctgccatgcccggtggcctcttgagagcacgaactgaaagggcctcctgcctccgcttttgcctcttttcagctcatcttccacagcatcctcaaataggtctgtttaaaatagtaacttacctctcgctttccctccatgctgccccccacccccaaggttctcccaacaagcccccgggtgccatctggaaaccacctggctgaatacacacctccccctcctccccactctccttctccttcccctcctccttctcctctcttcctcctcccatcctcctctcctctcctcctctcctctcctcctcccctcctcctctcttcctcctcccatcctcctctcctctcctcctcccctcctcctctcttctcctcctcaccttcctcaggctccaggccaggctgtggctctgctgcatgccgctgtgccccactgaccacctctagatgtacttcttggctcacctggcaaggaagacgaagaggtttgcaactaaggtggtaatggcgtgtagaaatgaggaaggctgaggacctcaaggaaaagagaggaaggggagagagacttggcgaggctggggattacgaggttgactctgaacccgatggtgatcatatccatccgcacacaccacactgccgtggccccagcatcctcagaagtctcgggatggccaaagatgggagtcctgtgcgtggacggatcaggaccagaccctgcgagaacaagcaggcttgacctccacacaccgctggatcaaacacacctctgaactttataaaaggccacaaaaataaacggatcctgctgccgagggacagatatgaaaacacaaagaatcccataaaactgattcgcaccacaaggaactcaatgtctttggcagggagc

SEQ ID NO: 414 - DNA, 300 bp, Homo sapiens
  misc_feature (1)..(300): DMR2:240305301
atgaggccccagattcgcaagtcccaggtgatccacaccccaggtcatctgctctgttagagttgtgcagaggaaggaatagctctgaaacctttcaaaccagcaaagcccccgcgaggtaaagaaaaaaaaaaacctataaatacacacacacgcacacacacatacacccttacacacctagctccacgtggctctatacacattacctacatgatctacgagtcgtctaaaagagtgcttgtcctcgggaggcggagcaagccgaggtcgcgccactgcactccagcctgagcgtca

SEQ ID NO: 415 - DNA, 4700 bp, Homo sapiens
  misc_feature (1)..(4700): DMR2:240891401
ggaacacacatgcccatgggggcagaggcagacggaggaccctgcagatcctcctggctggggccaggggagcatgggggcagtggccccttcctgccccctccccaagaaccttgtgaccaggagggtgcgcctacctccagagctgggcgctggccggcaccaggtccaccccttggctgaggatccttctcaagctgccctcagggaatccgggcatctgctgcaccccctccagggcaggcgccccaagcttccttctcaccacgggcaccacgtggaagctgattgttctccagccgctggacaccagcaaggacaggtggagctgctcctccctcaggctggccgcgttcagcgaacctgcaaagacccaagtcacgccggcccctcgacttgcctcacctgcccaggacactccacagccctcctcctgctgccaacttggcccctgcccctcatcacctctcacctgcagccctctctgctggcccccacctgcaggctgcagctccccaaccccagacacctgtgtccatccctggacctcagccaagtgaggagctggccaccatgcctgcccaatggtgacagtcctcggcacaactgtcagctcagcgacttgcagcaccagtgatgacagcagcgtcctacatgaggttttcctttgccaggcaccaccctcaccccacaccccaggaccacgcctgctgtgccttcccaggccttcctgagcctgctcactctgccccagccctggggccaaagtcccagccctcagctagccccctacctcctgacgatggccctggcatctctgctgccttctctgcaggggaggaggcagcagcagtccaggctggggccacagggctcccactccagagctggagagggtggagcgaagctaggcctttcctccccagaactcacctcctcctcccccctgccccctgccccctgcccctgcccctggaagcttccctgagagccccctgccactcaaatcaactgcatgcatgggaagcccatgttggatccagctaggggaccagtctacatgatgggggcagctggggagagagggacaggcccaggctgaggctcagttcccatggagagaagaggcggcggcagctgccagtagtggagagccagctcggccaccgccgtttctgggctgcccaggccagcaggctcacagtgacggagctcagccacccccgtttctgggctgcccaggccagcaggctcacagtgacggagctcagccactattcctgaccaggtctggatcctacacttcccagagagcccttgcccgagagccccatggcccctgtcccccacaggaggcacattctgaccaagaggtttcccactccctcccctcctcggaccccacccgggacccagcccagtgcccacttcactaacacagagcccagagtccctggagggcctgttccagggtgtaatggggctggagctggggctgggggcattctggtgagtccaggggccctctggcctctgcctcagttgccctacccccccaaaaacaaattaatatccgagaatgaagaggtgaggtgtcactcagggtgactgcagacacccacacggcccccgcctgacactggcccagggaccggaggagaggccgcccctcccctccccagtactgtccagccagggtgcccaggtcacagggagctgggcccaggcagcatgctggcgtttccccgagggaatcctggcatgtgccttgggaaaggtccccatcatgagcgagcatggggcctgccttcccaccatcccaccgccccagggtccttccggagggagcctggtcctggctgtgtggacccctcagcccccacaatctcccgtggggcagttctggggacgcctctggggcccacctcagggcaaccctggccctgctgcctgggcggcccatcccacaggggcctcagttcccatcaatgaaagagaaggagggcccccccatgcagcacttgaggtgcctgccattcagagccgcctctagtggccacacacctcatctgccgtgggccacgcacgctcactgcccgtgacctggcagcttggaaggcagctgcaactgcaccagcccggccacaggccacagccccgggctggtctcaccggttcccagggtgggggcagcctgacccctgtcacctaggctgccacttcccctttaaggtgagtgtcaggaaacgatgcctggaatctccctgcatgcccagcccagcgcagcttcaggggctgtgggcgcggcctgcagtatcgagtctgctttctcaggaggcactctgggggcgtgaggagcctggcggcttagagcaaatccgaatgactcagggcctggcacggcctcctgctcaccccaatgggtgggcctgtctcacaggtggggacagggccaagtgaggtcgggaagaagatagaaatacccaccccatggcctgcatgattagaggttcagaagatgctggagcaggaagcccgaggggctgggggcagggtgagggctggctgggagcaccagaagctgacaccccagaggtcaggtcagtcacttaccccagggcactagacaggtctggggagggcttctgttagaatccaccctcctggcctcccagcatgcagactggaggcctggctatgtgcggcggtggcagcacacccttccccagaacccacaggaggtgcccctgcctccaggcaggccccagcgccgggcatccccaagcagatcatggcctctcgcgaaggtgagctgaccccacccgctgacctcacggaggacatgagggtcagatgaatactagggaggtgactcgaggcaacaaagccctgtgaggactgtggtgactcacatgtgacaaattctgttccagtccccagttcccttccaggacaacctgaccccctggaggatggctgtaccactcagggtccccatcatcctggcccctgcacaggctgagccctgtcctcccagcgaccgtcgccgtccaggcagcccctgctgaaggagccctgggctcagactcaccctggaccatatcaacaaggccccaaaggtgggcctggtgctgtggctcacacctgtaatcccagcactttgagaggcccaggtgggcggatcatctgaagtcagaagttcgagaccagcctggccaacatggtgaaaccctgtctctactaaaaatacaaaaattagctaggcgtggtagcccatgcctgtaatcccagctactcaggattctgaggcaggagaatcgcttgaacccaggaggcggagtgagccaagatcgtgccattgcactccagcctgggtgacagagtgagactcagtctcacaaacaaacaaacaaaaggccccagaggagagactgaggccagcccctggtccacgcagaagcccagcctcagagcccacttggggctcaagacaccaatagacaactcagccataagctgataagacacgggcacacacctgcacacgcattcacacccctgcactcacgcgcacgcaggcaggcacacacacacccctcccacctggtgcaacatcatcagacactggaagtgggcacgggatggcctcggggagcctcgaggtcacaggctgtgactggcaagagagccgcctgcccagagccgtgtgagggaccctcctgcaaggccaccagtgaagcagctgccccagactccagccactggacgactggcagccgtggaacccccgtgcaaacacacacgacacggaacacgtcatctgtcttgttacaggcatttggagctggaagacctaagtgaggtctcccgacttctgtgccccaacacactgttcacacttgcacagtgtcacacacgtgcacacatgcctgtgcgtgcagtcacacacagaagacagtcgccaccctgtgtgcacgtacatggcaatcacacacatgtgcactcacacacttgcacacagacacccacacagcagcccctcggtacacgcagatacgcgtgcagagtgggctgtgcctgtacctggtgcgatgagactgtggtgcttgcagtgtacgatggctgctaccagcaggtccttgaggacacacaggaccttgctgggcacaatgtgtccacggcacttggcgtcaccctccgaggaggcagtgaaggtatcctcggtggtccaccgctccaggccagccccttccctgggcacacccaggtggcataattcaaggccatcctccggctgggtggcctctggttcctcaatcagtagagcctcggcatccacccacaggggcacctccatgtccattgggtcctcagaggagcgcagggcgaactggaaggcctccaggccacgggagtagtccacgatgaagcgggggtccagggcatgcacgcgctccagcaccgtgagcagcacgttctctgcgcgctggaagtcctgggcacgcggcgcctcccgggaccggatggcctgcaggtagtggtgccacaggggcacctgcacggccatggctgaggtggggagagcaggggcaggcatcccttcaacagtggcaggtgagggccagtggcccctgaggaggactccgcaggccagctgtgcagatgggctgtgaggaggcacctgcccaggtgagcagcag

SEQ ID NO: 416 - DNA, 2100 bp, Homo sapiens
  misc_feature (1)..(2100): DMR2:241405201
cataattgtaattgtgaatataataataacaattatattattatttttgagacagggtctcgctatttgttgcccaggctggagtgtagtggtgtgaacacagttctctgcagcctcaacctcctgggttcaagctgtcttcccacctcagtctcaagataattattttcgttcatctacttattaaattttttaaactaaggcatgtagtagcacttctcagttcttctgtaattgtgtcagatgaagtctatagttgtctgagtcacccataattttttgtattactattataaattgaagaaaaacgtgtagaaataacttcattatatcagaacaaggatctctgaggaaagaaaaaataactattttataccaataaactaagataatgtacctttacagtaatcagatttcaaaaataatgtgtttttattactattaataatactggcccggtgtggggctcatgcctgtaatcttagcaatttgggaggcccaagcgggcagatcacctgaggtcaggagttcgagaccagcctcgccaacatggtgaaaccctgtctctactaaaaatacaaaaattagctaggcgtgatggcgcatgcctataatctcagctactcaggaggctgaggcaggagaatcacttgagcctggaaggcggaggttgcagtgagccaagatgacaccactgcactccagcctgggcaacagattgagactgcatctgagaaaaaaaaagtagatgtaaacacattaacttttttttaaaaaaaactttttcatttatcatttttttccctaaaacataaactgggggccgggcacggtggctcacgcctgtaatcccagcactttgggaggccaaggtgggcagatcacaaggtcaggagatcgagaccatcctggctaacatggtgaaactccgcctctactaaaaatataaattagccgggtgtaggggcatggtggggggcgcctgtagtcccagctactcaggaggctggggcaggagaatggcatgaacctggaaggcggagcttgcagtgagccgagatcacgtcactgcactccagcctgggcgacagagagagactctgtctcaaaaaaaccaaaacaaaacaaaaacataaactggggaaaaaatgtctctctctctctctttatatatatatatatgtatgtgtgggtatatatatgtctgtgtgtatatatatagagagagagagagagagcacgcgcatgtttttgtgtgtggaggggtgggcaatctcgttctgtcacccagcctggagtgcagtggtgtgatctcagctcagtgcagcctctgcctcctgggctccaccagtcctcccaccttggcctcccaagtagctggaacttcaggcatgcgccaccatatctggctaatttggggtttttttgggggggagaggggcgggtagagatgggatttcaccatgttgcgcaggctggtctgaaactcctgggttcaagtgatccaccagcctccgcctcccaaagtgctgggattacagatgtgagccactgcacccagcctatttaaattttttaatgtgcaatttcctacttgtttttatttatttatttatttattttttgagacggagtctcgctctgtcgcccagactggagtgcagtggcacgatcgcggctcactgcaatccccgcctcccgggttcacgccattgtcctgcctcagcctctggagtagctgggactacagtcacccgccaccacgcccggctaatttttttgtatttttaatagagacggggtttcactgtgttggccaggatggtctcgatctcctgaccttgtgatccgcccccctcagcctcccaaagtgctgggattacaggcgtgagccaccgcgcccagccctacttgtttttaaggcttccttgagtaatccctgctgaatgcaaaagattttaaaattctatatatatatgtgattggtacttgggactcataaattcatatacaggaaatgcttctttgttttttcttttgttcggagacagggtctcaccctgctgcccaggctggagtgcagtggtgcagttgtagcac

SEQ ID NO: 417 - DNA, 900 bp, Homo sapiens
  misc_feature (1)..(900): DMR3:2443201
aaaggaagccctgtggaagccttgcaggaaaaagttttctttgacaaacctgtcctttcaacataattgatgagttggttccagcctggttccttgtgacccatccagcactgagtaggaaatgacacagaaaatgaatgttgtggtctcatttgtcagccagggccactagtttcttgcaggatacctgaattttcttctgtgcttttctcacatgtgcccatccctccttttctttcagtgcctttctctccctttaaccaccagggcgactgcccttttattagtttcttagcgttagttctaaagagtctgatggcctcttgtaacgtacatattgagcttccatagcaaagaatacaaatcatcacaaatcacaatagtccaataagaaagaatattgatctttccaaagtaatttcagtcatatatgactgagctcaattttaaatatgtatttcagtgtcgacttacccaacacactgaacctgcttctctgatctggtattagacttgtactctgcctacagaccagtgcctaggttagttcatccataaagggaccaaaagcagtgaccactcctcctggggtgaagttcagtgtttctttttttcccatttacttagttaagcagtcagttttaactttactatccagctgattttgtgtataaatggattcatttgtagtttatcttgtttttgctaggctgtgggctaggaaggaccaaatggatttacgtagtttatcggataaaccaattttgagtatcattttgtcaggaaaccctttttaacctcttcctggatagccccagccaccttaatttacactcctctgggagcatttatctttccttcatggcaatgtaattttgtatatatttacatgttcttttt

SEQ ID NO: 418 - DNA, 2500 bp, Homo sapiens
  misc_feature (1)..(2500): DMR3:3007701
atcacacaagactggcttggtaacccatagattggtatgggagcaagataaaagtagggtatgcaatagattctgtgctggcatagcaaaatgggagcaatgaggaagtgacactgggctatcatataatcttttatcccaattagaataaatggggtgctgcagataggctggaacaacagagataaacccaagaccatcctgggcaagcaaggacacatgtcaacaataaagtcataccctgttttgtaatttaggaaactttctcatgatgttgagtaactgggacatttgggattaatgatgtatctgtgatgtactcctctgttggattccctgagaaaaatcttttgagatataaactaatcattgcttactattcagccatgtagagaatgtgtgtttccatacttaagataatgagtcctactaagagagaagaggtattaattcttgggagggataattttatatcaagtttagacagttttcagtctgcactaagctccttttttatggccagtttaggaaaaatgctaatgcctcgtatccagacctgtttggagatagagcaagtcaagcagaaaaacgccattctcctaaatgagcgttaggccacagaacacgaaatctgtcaggcagcattttacctggcatggatccgccaaagaaaacaaacaaatcagagttggattttttaagactaaataacagcaagccaaagaaagagcatttacactgaaaaaactgtaaaggttgacaacatcctcaactcattaaatatgatggggaagagtaaaatatgtagcacttttgctccttagtgtgggcttttaagcctctccttcaatcgtgatttcactacttcgtctctaagctatagattctgcctttgcaaaaagagaatacccacctccctaagtcgttccgtgtctaagaaaggtaacattatgcagagcattaaacatgtaacctgacacagagacactctacataataataggtcatttcccttctcaaacgacccagatttctagaggcaactagctatagcttgatgcaaaagtgttgcagtttttaccattacttttaatgcaatttaaaacgcaactacttttgcaccaacctaatataataggaatagacaacagcagtagcaggcattcgggtttcccattgtcctcggcattctagggcaaaccaccaagatctaataagctgtgagattccaaaagaagggcgccaaaccttgggctgcacggcttcaaacttcgtcattacagaatcaccagcgtctttcttggtatgatctgcgggctagaggacaagcctggtgttattagcacagtgagcaagtggcaagagcaccacctccggagccacaattagggaagtaccatgccttgccctggcatgactggagagtaggggccaatgttagactataagagttgactaggattgattgccataaacagtgggccatggttactttcctcggagcattgcagagagcctctttctctgggaggccagcctacaggagatcagtcttagacaagttaacctttacctttcaattatcatggcttaaattttcaggaactctcttctagtatctgaatgttccttatttgtagcacccttttcttgtttatgcaaataaacaagaaacacccttttcttgctactgtcaattcaatatctaatatttctctgaaaataataatgacagaatttcttttttttttgagatggagtcttgctctgtcgcccaggctggagtgcagtggcgcgatctcagctcactgcaagctccgccccccgggttcccgccattctcctgcctcagcttcccgagtagctgggactacaggcgcccgccaccacgcccggctaattttttgtatttttagtagagacggggtttcaccgtgttagccaggatggtctcgatctcctgacctcgtgatctgccctcctcggcctcccatagtgctgggattacaggcgtgagccaccgcgcccggccagcatttctttttgcttgccttgaaattgatcttttgtgttagttgtcctcacatgtctattgactcacagttgttggcccatatttaagagtgtggcacgaaaaagcctatgtgaagccgtgaacatgtagatgaagttcattgactaagaactgggccatttccttgtggaactccccatacccacattaatatttcggtgtttccttttcggctgatcgctacctagagaaagaatatctagtacctagtctcatttggaagaacacagaactcaacagcagtgtcctgggagcctccttggggaaggagactgagaatctcagcttcactgtatgaacactcactaaatccctgctatcctcagttcaacctggtgtcctctggcccagagacctacctctgtattacctgctcagaaagtaaaatcccagaatacttctgggatggggagggttagtcacctg

SEQ ID NO: 419 - DNA, 600 bp, Homo sapiens
  misc_feature (1)..(600): DMR3:5093401
catccagaatccctgcctcttgtaatgatggaaacctctgtttgagcttaaaaattagtggtttcaattagccgggcgtgctgaagcatgcctgtaatcccagctactctggaggctgaggcaggagaatcacttgaacccaggaggtggaggttacagtgagccgagatcatgctattgcactccagccggggcaaaaagagtgaaactctgtctcaaaaaaaaaaaaaaaaaaaaattagtggtttccatttgcaacgtctgctattggaacaaactgcaatttactaatttattaggcagtagtactctagagatttaacaaaaaatgagcatgtccgttactattccaggttggcaactgagctctcttgagagagcttctcactaaaggctcactaagatgatgggctctgagtacacctcatctagagccaggaaatgatctcaagggatatagatggggcaaaggccttcagacttgatctcctgttgtcagatttcttctcaggatttcacttgtttttgcattttctgtttgcttttctaagcctcattagacagttccttaaacattcattcccagctgtctattttttc

SEQ ID NO: 420 - DNA, 400 bp, Homo sapiens
  misc_feature (1)..(400): DMR3:5349501
catattgctgttggcctcgtggagatagttcaggtcagagattctttagctcttggcagggtacaaggtgaaatgctaacaaatttagtcaggctaaggctagagtatgctgcaataacaagccacatatggtttaatgttggttaagtggttctccctgaagacttttctgtaagcgtgactcaggaattttgtctgtttttatctgtggggagctgagacaactggcagtgttagtgggtgaggtgcaggcagtggcaatcagggttctccactgagcagggagctaagatctgagggagaggcgaggatgagcaaatctggagagaagcataaaataggtccagtacaggtggcaaatgtatctgtaggcaagatttgtgttaaacatatgtgctaa

SEQ ID NO: 421 - DNA, 300 bp, Homo sapiens
  misc_feature (1)..(300): DMR3:5401101
cacagtgtgagagagctacgggcagtgttcctatagtgtgtgtatgctgttctcatagcgcatgagagctgtgcatggtgttcctatagagcgtgagagctatgggcgctgttcccatactgcgtgagagctatgggtgctgttgctatcgtgtatgagagctatgtggcgatgtggcactcttaccgccacttcccccctcctgtgttcttagcaggcatacctaaactgatcacagtactcttccttgctgggctcagcttggggtctcactatccttctcaacacgatcctttgaac

SEQ ID NO: 422 - DNA, 1100 bp, Homo sapiens
  misc_feature (1)..(1100): DMR3:5525401
ccattggtctatatctctgttttggtaccagtaccatgctgttttggttactgtagccttgtagtatagtttgaagtcaggtagtgtgatgcctccagctttgttcttttggcttaggattgacttggcgatgcgggctcttttttggttccatatgaactttaaagtagttttttccaattctgtgaagaaagtcattggtagcttgatggggatggcattgaatgcgtaaattatcttgggtagtatggccattttcacgatattgattattcctacccatgagcatgtaatgttcttccatttgtttgtatcctcttttatttcactgagcagtggtttgtagttcgccttgaagaggtccttcacgtcccttgtaagttggattcctaggtattttattctctttgaagcaattgtgaatgggagttcactcatgatttggctctctgtttgtctgtttttggtgtataagagtgcttgtgatttttgtacattgattttgtatcctgagactttgctgaatttgcttatcagcttaaggagattttgggctgagacaattgggttttctagatatacaatcatttcatctgcaaacagggacaatttgacttcctcttttcctaattgaataccctttatttccttctcttgcctaattgccctggccagaacttccaacactatgttgaataggagtggtgagagaaggcatccctgtcttgtgccagttttcaaagggaatgcttccagtttttgcccattcagtatgatattggctgtgggtttgtcatagatagctcttattattttgagatacgtcccatcaatacctaatttattgagagtttttagcatgaagggttgttgaattttgtcaaaggccttttctgcatctattgagataatcatgtggtttttgtctttggttctgtttatatgctggattacatttattgatttgcgtatattgaaccagcctcgcatcccagggatgaagcccacttgatcatggtggataagctttttgatgtgctgctggattcggtttgccagtattttattgaggatttttgcatcaatgttcatcaaggata

SEQ ID NO: 423 - DNA, 600 bp, Homo sapiens
  misc_feature (1)..(600): DMR3:8679301
catgaggcggggactaagagccagcccctcttcccgccccttgctcttccgacccccatcgcattggcgggaggcatcccccaggaggaggggactgagagccagcccctcttccccccctggctcttaggacccccatcacagcggggggaggcaccccccgggaggcggggactgagaaccagcccctattccccccctggctttgggaccctcatcgcaggtaggggaggcaccctcagcgaggcaggaactgagagccagcctctcttccccccctggctcttgggacccccatcgaagggggtggaggcacccccggtgaggcggggaatgagagccagtgcctcttccccccctggcttaggacccccatcgcggattctaagatccttaggacccacctggaggactgtgggtattaggtgtctaagaagaaagctcagatctgcggaaggcaagtaccttacttgggatttactatcccacaggggtctgaacgcagcccaggatcagaaagaaagcaggtcatttgcaatctatcggagcctaagggaagaaggcaggtgagagaattcttaagagctgtggggttttgta

SEQ ID NO: 424 - DNA, 100 bp, Homo sapiens
  misc_feature (1)..(100): DMR3:8715901
aaattttaattagacaggcatgttagtgcatgcctacttaggagcgacttaggaggttgaagtgggagtattgcttcaacccaggaggcagaggctgcag

SEQ ID NO: 425 - DNA, 3000 bp, Homo sapiens
  misc_feature (1)..(3000): DMR3:9237801
tagtctcatgcaatgagatgctactgaagggttttaaacagggaagtgacatggccagatttaaatggtgtacagattactgctggctgctgtggggagagtagactatgggacaagaaaagaagcagggagaccgcttagaactgtggttctcaactaggagtgattttgtccccaggggacatttggctatgtctggagacatttttgattgtcacaactgggagcagggatgctactggcatctagtgggtacaggtcaggaatgctgctaaacatcctatgttatacagaacagcaccttcaaccacaaatgatccagcccaaaatgccaactgtgggtgagaagctctgagtcaggagaccctgagaaactttgggttgcactggtcccagcaagaggtaatggcaggctaggccaggatggaggagatggagaaggaaggaaattcactgtagttaatactttgaaatattgaatgcttttctccaaattttcttgacccccttggtccctcctcagtcagggagggcattctgtgttcattgcctcagggataatgcagaaaaagagtcaattcttggcattttttcaaaagtccttagggaggagagaaagaacgtgagatttatggaaaacagctttgacagaatgtctgatgacaaagccaggataccacccttgttccccgccccaccacacgagcatatgggtaaagatttcctagaccaaagtggagagtaaatcagtaaagcaaagtatatgtaggtacagggatctataagaaaaaaatctgcaccctgcccaactcatcccgaacaagcccggggagggagatgatgaggcaaccaccaaacagattcacagaatctaagagtggagagaagccggatcccttccccaggcagagccctagggaggcaccaggggagaagcaagtgttgagtgtggccaagacaggcctgaggcaaatatccagggtccctcatggcccagtgtggtgtgtgagcagcagaatcgcctctggtgccagcaaattgcatggaaggaaccaaggagagggggacacatgaggaacaaagaaggattgctgacacagaccaaccaccaaagactcaataagaaagaggatgtcccagtagctgccaaagtagattgatgataaaccacaacagatgtcctcacaagggccttggtgctgcctaagtccccctggatcttggagcacaaccctggagggaaaccccaaattgacttatacttatttctgtcacccccagcagaataaagatgtgaggccggccgcagtggctcacacctataatcccagcattttgggaggccaaggtgggaggatcacttgaggtcaggagttctaaaccagcctggccaacatggtgataccctgtctctactaaaaatacaaaaattagctggacgtagtggctggcacctgtaatcccagctacttgggaggctgaggcagaagaatcacttaaatccaacaggcataggttgcagtgagccaaggttgcaccactgcattccagtctgggcaacagagcaagactctgtctcaaaaaaacaaaagatagagatgtgaaatggagactgagtcaccaagaaagaaagaaaaatatatttcttgtgcacctgggtttgtagctgagatttgttcactctgaggcacaagggaacatgggcttctctgtgttcatctgtgccattatcacctagcactggctatgcaatcccagggggaagagccaggtccattcaaggaacctggaacactctgctgcagcagtgtgcaccccattaccatcacgcacagatgggcacacgcaatgcatattgattagggctgcactgtttccaaattaccatttaaatcaatggttgagcactctgtaattggaaatgtcaaaatccacatttcctaggtgaactcaaagcactacattgatatcactcagctcaactagatgtgcatttgttttacttctttccctcttcaaactgctctctgagacaagtataaaacattagggaactgagccagaggcaaaaagaaaaagcacccagatgatccatgaattgtgcagcctgacatattctaaaatgtaactcagaaaacagagtcttgtgacccagtccatgaaaaatatctacacaatcaagtaagtttgaggaaactccatgggccctactgagcgattcacacttaacacaagcaagattcccagaagtcctgggggaagcaggcctatttcacactgtttattctagaacttccaaaatctattagagcacacaactacttttttttcacccaacacctctttacaaccaatttaaaggaatactcttagggaacattatcccaaacataaactagcataatgattcaacaaactgagggaatagagttaaagtgccattatttgccagccaagatgttttatgaacaccaacaagccatcaggaatgaatattttccaagtgaaatcaagcccaagacagcttcctgggccctgtattaagccagaagttctcaagctcagcacctttaaaaagtcaaccccgtcccttcctaatagctgtgaaggaaaggactcaatttcaggaggcagcccaaactcaccccctcctgacctcaccaatccttacccggctagacacccttgcctcatctttctttccaaggtactactcagctctgcctccccaggcaaccatcacacaccagaacaattcaactcagtaatatgtattgatcaccaactagatggtgggcactacgctacagcaatgaaccaagcagataaaccttccaccgtcatggagagacagtctaaaagtaatctgaaagccacagcccctctccaatcatcaatttccacatctgaaaaacaaatagagttggactagaagacacctaaaatttctggttccgtatttccaggttggtggtggactgggctggctggtgagaggta

SEQ ID NO: 426 - DNA, 2000 bp, Homo sapiens
  misc_feature (1)..(2000): DMR3:11652701
taaggaatggtgttttaaataaatcagaataaatcagtgcgagggaagggaatttaattagattagcatccccaagaaaagagaaatctcttgcaaaacactttaacttgttagttttacaactactgtcttacatgtttgacaatacaaatattttcttgcatgtttacatacatgattattttagtgattttcgctactacaaccaatttaggttcagtaagtcccattcaaagaacattcacaattaaaacgctattctgatattcactttgtaccaagtcataattactcatagatgtattcctgcaagattgactagaactgacttccatggtaaaaatagaagaactggagaaaatgtcccaaatattcaacaactgaagggctaagttcgctgctagccccaatgtgtgacccaacttcatttcacaggtcagtctgcctgcacagtgcttcattcattatgcagcacgctaagcacctccacagtcatccttccaaccagttagggtgccgtccaggaaagagaaatcatggctgttatttatatagggagaattttaatgtatcccacctccacctattccttcttccagtaactacccccatagggtaacttactatcctaacctttaagaacgtagatcagttgtataacactttatagaaagagaatcgtatgatgctagctactcttgtggctggattccttcactccacatattttatgagtggtagcattatttttatgtgcagttgcatagcattcatttgcattgctgtctagtactccattactccaatatatcgcagatccttcattctaccactgatgggcatttaggtagtttctacctgggggttattataaatagtgctgctatgaatattctagtgtgtgtctcttatcagcctcggaatgcatttctgtcgcacatgtactcagaagcagatacgcagaaagtgtatgttcagcttaagtaaatattgccaaatagttttccacagcagttgtacccgtttatactcctaccagcagggtatgagatttcaagttgctccccatccttgccaacagttttccaactctttcattcctgttattctggtaggtctggagcagccacactacgactttacttcgcacttctctgatggacagtaagaactctgtgacacttgtagcaggcagagggatagaattcacccgagacaacacagagggaagggccccggccagaggctctcaaccaaggagattctgccctcctcaggagacatctggcaatgtctggttatttcaaatttgggggtgttgttaacatctagtggttaggagccagggatgctgccaaacatcctacaatgcataggacaccccccaccaccaccaccacaacaaagcattatttggcaaaagtgacaataatgccacaaatcaagaaacccaaatcaagcaaatcattattgggcattttctccttagccaaatcatcattctctgatacagcacaagaggtcaatgtcctattgtcttaaaatgttatttttcctagagttgaggggatagaaagacaacaaaggatactaagtgccacactccatggcacagtgcatatcttctgcatatcctgtttctttctcagttctcgcgacaatgcggagatgaggaaacagataccaagcaggctccttggctcctctaaactcacgcaaagagcagcagagctgggaccagaagctgtgattttccactgcacccagggtcttacttttaactaaaaataaggggagtttttagagtccacaattcctgttaacttgcaaggcatgaattttaccttattagctttgcaaaaggcaggcaaataaaacgaggtatgagaaaaagatcatttgcaatgttaagattattaacctgcacctgtaagtatcttaaaatatttcaacaaatccaccttcctcatcacacggtgatctctttgaaatgaaaccca

SEQ ID NO: 427 - DNA, 3000 bp, Homo sapiens
  misc_feature (1)..(3000): DMR3:12030601
tcttgggagagtgtatgtgtcgaggaatgtatccatttcttctagattttctagtttatttgtgtagaggtgtttgtagtattctctgatggtagtttgtatttctgtgggattggtggtgatatcccctttatcattttttattgtgtctatttgattcttctctctttttttctttattagtcttgctagcggtctatcaattttgttgatcctttcaaaaaaccagctcctggattcattgattttttgaagggttttttgtgtctctatttccttcagttcttctctgattttagttatttcttgccttctgctagcttttgaatgtgtttgctcttgcttttctagttcttttaattgtgatgttaggttgtcaattttggatctttcctgctttctcttgtgggcatttagtgctataaatttccctctacacactgctttgaatgcgtcccagagattctggtatgttgtgtctttgttctcgttggtttcaaagaacatctttatttctgccttcatttcgttatgtacccagtagtcattcaggagcaggttgttcagtttccatgtagttgagcggctttgagtgagattcttaatcctgagttctagtttgattgcactgtggtctgagagatagtttgttataatttctgttcttttacatttgctgaggagagctttacttccaagtatgtggtcaattttggaataggtgtggtgtggtgctgaaaaaaaatgtatattctgttgatttggggtggagagttctgtagatgtctattaggtccgcttggtgcagagctgagttcaattcctgggtatccttgttgactttctgtctcgttgatctgtctaatgttgacagtggggtgttaaagtctcccattattaatgtgtgggagtctaagtctctttgtaggtcactcaggacttgctttatgaatctgggtgctcctgtattgggtgcatatatatttaggatagttagctcctcttgttgaattgatccctttaccattatgtaatggccttctttgtctcttttgatctttgttggtttaaagtctgttttatcagagactaggattgcaacccctgcctttttttgttttccatttgcttggtagatcttcctccatccttttattttgagcctatgtgtgtctctgcacgtgagatgggtttcctgaatacagcacactgatgggtcttgactctttatccaacttgccagtctgtgtcttttaattggagaatttagtccatttacatttaaagttaatattgttatgtgtgaatttgatcctgtcattatgatgttagctggtgattttgctcgttagttgatgcagtttcttcctagtctcaatggtctttacaatttggcatgattttgcagcggctggtaccggttgttcctttccatgtttagcgcttccttgaggagctcttttagggcaggcctggtggtgacaaaatcggtcagcatttgcttgtctgtaaagtattttatttctccttcacttatgaagcttagtttggctggatatgaaattctgggttgaaaattcttttctttaagaatgttgaatattggcccccactctcttctggcttgtagggtttctgccgagagatccgctgttagtctgatgggcttccctttgagggtaacccgacctttctctctggctgcccttaacattttttccttcatttcaactttggtgaatctgacaattatgtgtcttggagttgctcttctcgaggagtatctttgtggcgttctctgtatttcctgaatctgaacgttggcctgccttgctagattggggaagttctcctggatgatatcctgcagagtgttttccaacttggttccattctccgcatcactttcaggtacaccaatcagacgtagatttggtcttttcacatagtcccatatttcttggaggctttgctcatttctttttattcttttttctctaaacttcccttctcgcttcatttcattcatttcatcttccattgctgataccctttcttccagttgatcgcatcggctcctgaggcttctgcattcttcacgtagttctcgagccttggttttcagctccatcagctcctttaagcacttctctgtattggttattctagttatacattcttctaaatttttttcaaagttttcaacttctttgcctttggtttgaatgtcctcccgtagctcagagtaatttgatcgtctgaagccttcttctctcagctcgtcaaaatcattctctatccagctttgttccgttgctggtgaggaactgcgttcctttggaggaggagaggcgctctgcgttttagagtttccagtttttctgttctgttttttccccatctttgtggttttatctacttttggtctttgatgatggtgatgtacagatgggttttcggtgtggatgtcctttctgtttgttagttttccttctaacagacaggaccctcagctgcaggtctgttggaataccgtgccgtgtgaggtgtcagtgtgcccctgctggggggtgcctcccagttaggctgctcgggggtcaggggtcagggacccacttgaggaggcagtctgcctgttctcagatctccagctgcgtgctgggagaaccactgctctcttcaaagctcagatggaaatgcagaaatcacccgtcttctgcgttgctcacgctgggagctgtagaccggagctgttcctattcggctggttataagtaattcttgtgctttctttactttgggaatgaaacagactgtgctgtgaccagtggtaagcttagataatttccaggtgtgaggcagactagggtacgagagactaatacaatatgtagctgggactctcttttttcccaaattgagatattatttgcataccataaaattcacccctttaaaatatacaattcgttggttttagtatattcacaagattatata

SEQ ID NO: 428 - DNA, 3200 bp, Homo sapiens
  misc_feature (1)..(3200): DMR3:13704501
aaaccaccgtgtgatgcagctggtccacaatttgctggggtggggggcggggtggggaggcacacatggaaagaactgaggaaatggccatgtaagaaggcttgcataccattgaggtgggggcatgtggatggaactgagaagacccctgtgtgaggtggttggcctttcattggggtggcagcacatggaggaaaacagaggaaaccactggtggggaggcagatctactattgggaactgtggagaccttcatgtgagaaggctggtgtaccattggtggcgccatgtggaaagaaataaggggattcccgtgtgaggagactggtctatcattgggggccaagtgaaaagaactgaggggacccccacttgaggaggctggtctacaattagggtggggggacaaggaaaaaattgagggatctgcaattagggtggggggacaaggaaaaaattgagggaccttcatgtgaggaactggtctactattatgggggcatgtggagagaactgagtgaacctctgtgtaagaagggtggtctactattgagggcgccacatagaagggaactgaggaaacacccattgtagaaggaatgtataccctttgggtggaggcacatatagagaactgaggggacccctgtatgaggaggctggtctaccattggggttggggcatgtggagggaactgaagggatgcctgtgtgaggaggcttgtctgtcattgaggaggccatgtgaagggaactgaggagaccccgtgtgaggaggctgatctaccactgggatgggggcacatagagggaactgaggggtccctcgtgtgaggaggctggtttaccattgagtaagttatgtggtgagaacaaggggacccccatgtgaggaggctgttctaacattaaaaaggtagggaactgagaggatccagtgtgaggagactggtctaccattgggtgggcacttgagaggaggctgagtcaaaacaactgtgaggaggctggtctaccaccagggtgggagcacatggagggaactgaggaaactcttgtgagagaaagctgctttatcattggggcagaggcacataaagagaaactggggaatccctgtgtgaagaggctggtctttcattgagggggcatgtggagagaactgagaaaatccctatgtaaggaggctggtctaccattgtagatggggcacatggacagaagcactgtgtgagaaggctggtttaccattggaggggggcatgtggaggcaactgagaggaacaccatgtaaaaaggctggcctaccactgtggtgggggcgcgtagagggaactgaggagtcccccatgtaaggtggctggtttaccattgagcaggccacgtggagggaaatgagtggtcccttatgtgaggaggctgttctatgactggggtggggccacctggagaggagatgagtggacttttgtgtaagaaggctggtgtacattgaggggggttcacctagagggaactgaggaaacacccctgcaagggaggaggctggtctaccattggaggggactgtgtggaggaaactgagtgggcccccttgtgagacatctggtctaccattatgataggggcatgtggagtaaactgaggggtcccccatgtgaggaggctggtctactcttggggtggtgtgtgccttggaatggaaatgaaaaaaaccccatgtaaggaggctggtctaccatggggagtacacgtggagggaactgagaggacccctaagtgaggaagctggtgtatcattgagggtccacatggagggtactgaagagacccccatgtgaggaggctcttttattatcgggatgtgggcacatggagaaaactgagaaaaggctggtctaccactgagggggccctgtagagggtactaaggggcccttcatgtgatgaggctggtctactattgagggggccaaatggaaagaactgaggggaccatcgtgggaggagactggtataccattgaggtgtaagcatgtggaggaaattgaaagaacccccagttgaggaggctgtcctacctttagggagtctcatggagggtactgttggaacccccatgttgggaggctggccaaccattgggtctggggcacttggagggaactgaggggaccctggtttgaggaggcacctgtgtgatgggggctttgggaggaagctgaggtacccctgtgtgagtaggcttgtctaccactgggggaatcacgtggagagaactgaggtgacccttttgtgaggaagctggtttactgttggggtgaaagcacatggagaaaactgagggtacccccttgtgaggaggctggtctaccatttaaaaggccacatggagagaactgaggggacatctgtgtatggaggctggtctaccattgagggggcaatgtggaaggaattgaggggacccttatgtgaggtggctggtctaccattgagttggggacatgtgaaggaaagagaggggatcccccccgtgaggaggctgttctatcattgggggaccatgtggagggaactgaggggaccccccccgtaagaaggcttatctaccactggggtagcagcacattgaagtaaatgaggggacccccgtgtgacaagtctggtctacctttggggtgggggcacatagaggggaactaaggggatccccgtttgagaagactggtctaccatcagggtgggggcacttggagggaactgaggaaacccctatatgaggggattggtagatcactggggttaggaaatgtgtagggaaattgaaatgacccctgtaaggaaggcacatgaaaaatactgaggggatccccgtgtgaggcagctggtctactattatggtgagggcacatagaggaacctgaggggaccctcgtgtggagaggctggtctatcattgtggtagagcccacatggagataattgagaaaacctgtgtgtgaggaggctggtctaccattgggtgggtacatgtggggaacagaggggaagcccatgtgaggaggcttgtttaccattggggtagggtaacatggaggtgagtgatgggactcctgtgtgagaaggctggtctacctttggggtgggggcacgttgaaggaaactaaggggacccctttgtgagaagaccagtctac

SEQ ID NO: 429 - DNA, 600 bp, Homo sapiens
  misc_feature (1)..(600): DMR3:14411301
ctagaccaagcgtccagctctctcagccctgcccatgctggtccctcagcccgcaaggcccttcctcccatcactccttattcccactcttaaggggcgagcttggagctgcctgctctgggaagcattccttgagcctcttaacagtgcctggcacgtagtaagcactcaaaaaagatgacgtgagttaaagtggacttcagctcgccctgctctgagccttgtggtcctttcctctggcctgagctcggacctttatggtcttaccttatacccatgcacttgactggggacacatcaaggggagggatggatgctccagcatccagcctaggggtgtggcacacagttgttgctcaacatacaaatcaagagagcctaattccttctactctgaaatgggaacctatggtttgaacatctgagtggctccaggcttggaaattatattcacctgtcaccatccatcaatccatccatccatctcacaaatattcacttgttccaggccctgtcctaggccctggggatgtggctggtgaacaagacagaccaaactgtaccctcatggagctgtctgtctggcagggctatggacgt

SEQ ID NO: 430 - DNA, 1200 bp, Homo sapiens
  misc_feature (1)..(1200): DMR3:14611901
gcctggtgacagagtgagactctatctaacaaaaaaaaaaaaaaaaaaagctacttgaataggtgtgtaggtgtagtagcatctcattgtagtttaaatttgcatttctccaagcttgttttttgtttatttccttcacatctcagtagtgttttctctattcctcctttttccttactggcagggtgtggcttattcaggtgcttatcccatatctgagtgatgcaggaataggtgatcttttctcagtctccaaggatcaaattagattgatccatatcagttatgggaaccccataatggttcatgattggttggagtgggcttagggctcaagtctgtccaacaagacttgaggggatgtcaatttggggacttcagggaaaggtttccttatcccgcatgaccacgtgctaagatgtgatgcctggaactgtggcattcaccttgtcaaaatgagtaagagactgtgagagtgaagtagacatttctagagattgcaaggtagagagaaggaaagaattgggttctcaagggtatcacagaacaactgaatcaaaactacccatctcagactttctttactgtttaacattattgtttaaaccagtttcagtcagtttttttttgttatttgtagtctaaaacatcttgaccatgtaactcagggggaaaagtggcatacttgttctatggagcccaagaagacaaaattaaaacccacaatggtggcagtatattgtgattaacagaacaagtattcagttccttgtacaactgacttcacctctcaaagtcccagctggcttatctgtaaaacgagtaaaataataatacctaccttagatgactgttgggaggattcgagactctacacagtttggctggcacttcataagctctcaaaatgttatctataatcattattataaagtattatttggaggccgaggcaggtggatcacttgaggtcaggagtccgagaccaccctggccaacatggtgaaaccccatctctactaaaaatacaaaaattagctgggagtggtggcacgcacctgttctcagctactcaggaggctgaggcaggagaatcacttgaatctgggagacagaggttgcagtgagctgagattgcgcctgggtgacagagtgagattctgtctcaaaataataaatacataaattaaataaaataaa

SEQ ID NO: 431 - DNA, 600 bp, Homo sapiens
  misc_feature (1)..(600): DMR3:14971701
ttgattgtggttttgacttgcacttccctaatgattagtgatgttgaacagcttttctttttttgttgttgttcacattaaaaaattaatttacctaaatttcttttttctttttttttttttttgagacagagtttcactcttgttgcccaggctggagtgcaatggcatgatctcggctcactgcaacctccgcctcccaggttcaagcgattctcctgcctcagcctcccgagtagctgggattacaggcatgcgccaccacgcccaggtgatttttgtagttttagtagagacggggtatctccgtgttggtcaggctggtctcgaactcctgacctcaggtgatccacctgctttggcctcccaaagtgcttgggattacaggcatgagccaccgtgcccagccataaatttcttttaattaagaaaaaaaagttctcattctctctcttttttttttctttttctttcttttttttttttttttctgagacagtgtctcattctgtcacccaggctggagtgcagtggcatcatttcggctcactgtaacctccgcctcctgggttccagagattcccatgtctcagccacctg

SEQ ID NO: 432 - DNA, 1500 bp, Homo sapiens
  misc_feature (1)..(1500): DMR3:16091301
gcaagtcttgctatggattggaagtaatttaaattaaaagctgccctgtgggggaaaaccctatgattcctccctgaatgaaaagcatcttttaaatctgtgacttcattctcagtgactggctttatacttttcttcattctctttgatctgagatctagggagtagcacaccctcatatctgcattctaatgataggaagtgtggaaggggtaaagaggagacagggaaggactaggcagatggctccagacaaatggttgggttttgggggagctggagtggagatcaggacctgaggctgaggcccatgatggaggctcaatgctggaggaagccccacagaggcaagggtggcactcagatgcccagggctcacaccaacaccaggccagggagtgtgcagcgatactgcttggactcacctggtggtcgttgggaagctgctgacaccctggttcccatggctggatgggagttggcctgctgatggttggtctggaattctagtggctgaatggggctgggtagaggaaagggctgagaaatttagaagataaaataaccatctcacttctctagaagtacctggtggtgttataacagcaggctctgcctggccctgctttctcaaagagtgcagggtaaagttgtcttccagggatggggctgacacagctgcctggaagaatgactgcaggagtagggaaggagacagctgggtggtacagatagggcagggaatcttggttagacagggacagacagtagcttttcctctccagcaattgttatgctcattggctatgatcaactctggggcaggaaaaatgtaatatggagttgccgaaatgcagagctcatggaacagacagacagcaataaaatcttctggggtatagggaggaacatggtagctgaatttccatggtaactggttccatatgggagggggttcagaaggccaacatccagattttcaagcagttcaggccacctagacgctccttccattaaaatagctgggagcccagcagtcctggttctttgctctcaagctccactccactcaggctggtgaccacatgacaccgcaacccgtctgccttcagacctgcctccagctccacctgccgctgcctgcctttttctcattccatctccatctccagggtggcccatctacaaggctcacctcgagcccctatctccttttacaaactatctgcctcagtttcatatttttacccatcattatgtgggtaaaaattcttatgtactttattgggagaggaaaaatgaggcaaagtgtatgaaaatgcccattaaacactaaagggctataaactatgagaaagttacattttattaatagtcattatcacaacaagaatatattctattttatgtaataatatgaataatgtagatttatattattttgtaacaatgtttgacttgcattaaccttgtcttctcagccagctggtgaactccttg

SEQ ID NO: 433 - DNA, 900 bp, Homo sapiens
  misc_feature (1)..(900): DMR3:17503401
gtttattgatcatttacttctctctgctgagcacccccaaatctggctactagtcataaacaccatggtatctttttcaatgttttatttccagcacttagaacaatgcctagtacacgcaaggcactcaaatatttactgaatgacaaaaaatgaactttaaaagcttaagaaaagctgctactccgatagttactggttctatcatatttcatacaaaaaacaaacaatatttgctatataccacgttagtaagtttaagaaaccaggtatcaagaatactatctacacaaaatgttcactaagaattatgtgcattaaacatgtgtattaaatgtaagcatattacatatagtctatgctcccaaattatggccacaaatttcttagaaaagtaataatttatttccttagctttccctttgccaagtgattactgctgtgcattaactcaataattcttaatcatcataacttgacatttatttgccagaaaactctctgcccatttggttttatgcaaattctgagatgggtcatatttaaaagaaaacatggaataagtgaattttaggagaaacttcaaaggaagagaggtcaaagagaacagaggataaaacaggagagtatattaacttttgaaaccctaaaaggagaaaaattcaagtgctagaattatcagggacaataaaacagagttcatacattacaacttaagataggaaagagaaagacagatggaggaaagaggcattaagcaattattaattaacataagtggaggtactcaaactgtgttgttttatcagtttgagtacctccacttatgagaacacatggacacaggaaggggaacatcacactctggggactgttgtggggtggggggaggggggaggg

SEQ ID NO: 434 - DNA, 2300 bp, Homo sapiens
  misc_feature (1)..(2300): DMR3:17582701
acaggcataaatccattatgagcattaaacaaaaagaatggcaatttaaactctgattaaaaaaactacacagataccaaaaagcaaaaaaaaacaaaaacaaaaacaaaacaaaacattaaacaaatgtgaaagaaaatattagattttgagcaaatgaagaaaagtaagaaaccttttattctgggaaaaatatgttcactggtcaggtaattctggagagaaaacagaactgaatgatagtctgaaatgatataattactatataaaaaatataactgctaaataagaaataaaatacgggccaggaatggtggcttatgcctataatcccagcactttaagagaccaacgtaggtggatcacttgagctcaagagttcaagaccagcctgggcaacatggcaaaaccctgtctctacaaaaaatacaaaaattagccaggtatggtggctcacgcttgaggtcccagctatttgagacgctgaggtaagaggattgctcgtgcctaggaggtagaggttgcagtgggctgagatcatgccactgcactctggcctgggagacagagtgacacccaatctcaaaaaaataaaagaaataaattacttaaatatgtaagaaatatataatcatttttctactttgttaaaagtcatttatcggtatcataagatttcctgataatcaaaaaaaaaaatggaaaatagtaagtgttagcaaaatgtagagaaagtggaacccggctgggtgcgatggctcatgcctgtaatcctaacactttgggaagccaaggtgggcagactgcctgagctcaggagttcaaaaccagccttggcaacatggaaaaaccccgtctctactaaaaatacaaagaattagccgggcatagtggcatgcatctgtagtcccagctactcagggggctgaggcaagagaatcgcttgaacctgggagacggaggctgcagtgagccaagattgcgccactgcattccaggccacgcaacagagcaagactgtctcaaagaaagtagaaccctcatacactgctgacaggaatgtaaaatgatgcaactgccatggaaaacagtttgatggttcctcaaaaagttaaacatagaattacaatatcacctaccaattccactcctaggtacatacccatatgaacagagaataggtactcaaacaggttcatgtacacgcgtttagagcagcactattcagagtaaccaaaaagtagaagcaaacaaaatgtgtatgaacgaataaatggataaacacatggactagcattcagccaagaaaagtaatgaagtaataataagtgctacaacttgaataaaaatttgaaatattatgttaaacgaaagaagccacccacaaaacgtcacatattttatgattacattcatattaaatatacagaacacattaaatccatagagacagaacgcagattgatcgatgtcagagcctagggctaaggcagaattaagacaaactgctaaatgggtaaggtactttactttggcatgatggaaatgttccaaactcgacagaggtggaaggttgcataacactgtcagtgtactcaacgccacggaactgttcacttcaaaatggtgaattctgtgttacataaatttcacctcaatagattatcttaacataaaagatattctgctttcagttcactctttctattttcttatttccagagtaaagatttccaaagatgttcataatgttatttaacttcggaaggctcttagaaactcatatttatggttttaggatgggggaacgtatatgaggttcaataattctttaagcttcatttcagggtttttttttcctctgtgaaattcaagtaaaattaaatgtaataaacttcattttttaaatggtgtatcagttcatctctgtatgacaggattcaaaataatttttttaattttttaagttgacttacgtatttatttattttgagatgcaaggctggagtgcagtggcacgatctcggctcactgcaacctccacttcccgagttcaagagattctcctgcctcagcctcatgagtagctgggattacaggtgcctgacatgacgcccagctagttttttgtatttttagtagagacagggtttcgccatgttggccaggctgttctcgaactcctgacctcgtatttcacccgcctcagactcccaaagtgctgggattacaggcgtgagccactgtgcccagccaacatttattttttcgacagagatggggatttgctatgttgccta

SEQ ID NO: 435 - DNA, 800 bp, Homo sapiens
  misc_feature (1)..(800): DMR3:19240001
acatgattatattgatttctttaaaaatctatactgcagatcatatttaaacataaaatatacttagtattggcgtggaaacattgtgattagtttcatctaatttcatgagctctctctttactcactttccgctttcttggctactcttttcaggctcatttgatggtttctcctgatttttttcaacctttgacagtttaagttttctggattcagtattcagactttatttttgctctgtttttacttactttctaaattatccaatttctgctaactccaaatttctatctaagcatagctatcatccttaaacttcagaaattaggccaggcgcagtggctcatgcctgtaatcccatcactttgggaggccgaggtgagcggatcgcctgaggtcgggagttcaagaggagcctgaccaacatggagaaaccctgtctctactaaaaatacaaaattagccaggcatggtggcgcatgcctgtaatcccaggtactctagaggctgaggcaggagaatcgcttgaacctgggaggcggaggttgcggtgagccgagatcgtgccactgtactccagcctgggcaacaagagcgaaactctgtctaaaaaaaaaaaaaaaacaaaaaaaacttcggaatctattcaactgcatactttatatctcctcttggatgcttaatagacttcttaaacagcatatataagaccaaactgtcaaaatcacccagacctgcagagtttttgttccatctcataagatacacctctgcctttctagttattaaggcaaaag

SEQ ID NO: 436 - DNA, 300 bp, Homo sapiens
  misc_feature (1)..(300): DMR3:19947101
cgctgcgtgcagcgacgtggcggcggggccggcaccgggcagcggaagtggctccggcggtgggacttgagtgtttgtgttttggttcgtgaaggagccggcggctggccttaggggaggaggcagagggaggaggaggaggaagaattagtcggaactccagcgccggcggcggcggcggcggcggaggaggagaaaggaaagaggaagggggagcggcgagaggcggagacggagcccgacaggggcggcaccacggcacgagccccgcacagtccagtgtgaggggagcggcgctaa

SEQ ID NO: 437 - DNA, 300 bp, Homo sapiens
  misc_feature (1)..(300): DMR3:20043901
atgaggagggatctagaaagagataaggtagttcactggggggcttttgaaagaaaaacaggtcccaggcctgatataaatctggcctttaaacttcacaaacgaaaccaaaaaagaagggagctaagtcagccagggtgacgtgccacaccccagagaatagaaaaagaaaaaaaaaaaagaaaaaagaaaagaaacaaacaaacttgtttcgcaggatccagatctttgaactgtgtcctggtaaaggttgcttcagagtcattttggttctgtgttcattaaaaatgtagatctagg

SEQ ID NO: 438 - DNA, 100 bp, Homo sapiens
  misc_feature (1)..(100): DMR3:21651301
aaaaaaaaaaaaaaggtgaagaaaaagtctaaggctaagagcatataaaatattatctcatttatgttctgactcaggttattttaattattttcattca

SEQ ID NO: 439 - DNA, 500 bp, Homo sapiens
  misc_feature (1)..(500): DMR3:22798901
gggatgctttcaacaggaagggcctttggaggaggaagactgccctcagatcactagagccactttgcctccagacacagagagttggaagtgcttgggattttatgtttacatggatcagccattagtcaatgactaacatgtatgagtgcccagctcccttgccttggtttttgacaactccgaggtgtatcctatacccagcattccaccaaaggatctaggtgaagctaacctccatggaattttgcctgagacctcactcttctttagcttcttcctctgtcccaggcccccatccttttctaggttatcttgaacacttctgtaatgaatcaattgcacacaaacgtcatcccaggatctgtttctagggaacctaacctaacatgctgggatgcaaaaggcaactttggccataagggacgtatctaatactcataaattcaacaaaaggtatctaatactcgtaggttcaagactgagaaattcatggcatt

SEQ ID NO: 440 - DNA, 200 bp, Homo sapiens
  misc_feature (1)..(200): DMR3:26369201
ttgaacccagagatagttacaaaaaggatggtagaggagaatcccttctgttgttcgtccattggtatactttcctggcgtgcgctgccagcagcagcaggctgtgtctcctcccggcagcaggaggtgctgtgcaaggtgagtcatccagtattggactgtagttgctgccatgctcacaggactggttctgtgggacg

SEQ ID NO: 441 - DNA, 1000 bp, Homo sapiens
  misc_feature (1)..(1000): DMR3:32179201
tatatcatacaattcaaccattgaaagtgtacgatgggtttttgttacaattttagaacattttcaccaacttgaaaaaaaaaaaccttcaccttttggctatcatttccctattcccccatccccaaccctaagcaaccaccaacctaccttctgtctctatcaatttgcctattctggacatataaatggaatcatataatatgtggtctattgtgactggcttctttcatttagcctaatttttcaaggtttatccatgttgtagtatgtatcagaactccattcctttttatgaccaaataatattccatcgtagggatatgctacattgttttcccattcatcagttgaagtaatgtttactgaaaaatgtaactgaaattcaaaactgtttttaatagcatctgatttctactcatctgatctgattgcttacccctgacctctcctcacacataaataaagttggttttgtttgttttgttttgtttttaccatgatgatcaaaaagtttctgactggctttgaactgtacttcattggtgaaaatcctccattccaatccctataattaaagaggtaggcctggggacccttgttatcctgtgtggcctgggatcaagagcatcagcatcacctgaagctcgttagaaactcactctcgtctcgcagacctgtctggattagactctgaacttgaaggagatccccaggtgagtcctgtgcccatttgctttgacaagctccgccctggaccactctttctcacccgggtgagtgttgaaatcacctggaagcctttgggaacaatgccaaggacctgcccgcctttccgagattctgatttcactgctctagagtgggtcccagacttagagtgtctccagagctcccacgggatcccactgaacagccagacctgatgcagagatctttgaggagcaatcccaacttttttctgtaaaccactttcatttagggatgtttagtctacatg

SEQ ID NO: 442 - DNA, 1700 bp, Homo sapiens
  misc_feature (1)..(1700): DMR3:34224001
tttttttgagacagggtctttctctatcactcaggctggagaacagtggcatgatctcagctcaccataacctctgcctcctgggttcaagcaattctcctgcctcagactccccagtagccaggattacaggtgcatgccatgcctggctaatttgtgtatttttagtacagatggggtttcaccatgttggtcaggctggtctcaaactcctgacctcaagtgatccacctgccttggcctcccaaagtgctgggattacaggcctgagccactacacccagcctcttttgtgcattctcagagacctccagtagggtctctatgccttactattttctggggcgatgcacacactctttgctgacttcttacaaatcctccccatatctagcttgtcatggcacatcatcaggaatgctttgctccagcaggcggtcagtgctcttcgatgaggtcctctcaagatagcttaagcgtggactaaacttcacagcgtccacatgaaaaattggcttcactgatccaccaaattatcaaggtacactccatttctattctgccctcaagcggtgctccagccagcccttcatgttcatatctccccaggttctagggaaaccatgtccatttctctgaacagctctctcacattccaacctcatcacaagattctctggctgcacaaaccttcagccagggaggaagtttctacttgttcctcctatctgacaatgccaatctccaaaaatgagtttttgggaactccttcagttgttttggggtaggtgaggggcaagaatcttctctaatgattccacctttaattaacccaagtcttcttttgtgtaagctggatgttaaagacgggctgaatgagtttggtggcttagtgagccaagtcagcataggctaaatgctataacaaacaccacagtggctttaaatgtcatgtcgttgaccaaagtggtcaataggttggtggttgtaggggagctctgctctgtgtagttgctcagtatctaggctttttttcactagtgtctttgctgtattctatgtgaagggtcttattttatgccatggcttcctttggtagtctgttaaaaccaacaaagtgtggttaaaaataatattttgttggttctgagcctgggcctcaggaaactttacacacttctgctctttttcttgaaatcctgccacttccaaataaacaagcttggattcatctgctggaaaatgagagacacgtggtcagctgtgcagtcaccccagcctatagctagccaaactccagaagcagagaaggttgctgacctgcctctgactgcagacacaaaagggagccatgacaagactacagcaatcacccaacaagcttgacctaacttgctgacctgctgaattgtggtatagataaatggttgttattttaagccactaagtttggggtggtttgtttcatagaaataactcactgatacaaagatgataacttttcttttaattgacatggctggttggtgaactagttcctttcaattacattccattgctgaaagctagttatcgggcctaccttacatagaagaggagattataaagtgtagtccagtactgtatccagaggaggcagaggacatggatatcagtggatccctgtcataagcacttactcatttttctgaggcaatgga

SEQ ID NO: 443 - DNA, 2300 bp, Homo sapiens
  misc_feature (1)..(2300): DMR3:34519401
ccagctggcttcacctctcaatcccccctctaaaaaggacaccccaactgcttttgggaattgggtgatgaccactctagctacttcctgctggatggggcgaagtaggggccctgcagttgtagtgtcctccggaggggaactctttaggccagtcaaagggccagcaggttggtccaggggtccttggtagaagttgttagttgagctcatttggggttccatttgtaagaccatctgtagcttgatggcctcgatcctacaggaaacaaatttgacaaggaggttaaaaatacagggcctaaaggtgagtaatagcaagatggctgtcacaggacctagaaaggggagaagccatgttgcccaactccagaggttggtataagagtttgaaacgtgttgtctgatttcagaaaccttttcttgtaaacactgggcagcatctcatactatccctgactggttagtgtaaaagcaacacttttctcctaagaaggtgcagagtcctcttttctcagcagtgaggaggtctaggcctcagtggttttggtagcaaaatttacttttgttgaaaactttgtaagtttgggatttcaattattcttcactattaataagacctcgttcagtccatattaacttagaattggtataggtggctccttcctgattctgtaagtactttaaggtttggctgagtgcaaacagctttcacatttgagcagaccaattgttaggcaattttcctaactctgcctctacaagaatttccttatcacttactgaatacccattgtgtctttttcccttaattgcccaggaggaacaatctatcatcctgtcctgaagggagttcctcctaggtctggtggaacctttgtatggcaattaattaagacatagatcccttgttaggaaacctgctgggttaagaatttttgataggaaggctacaggttgtcagtggcctcagtgcttttgggctatgctcttgtttacactgacaacaaggtggtattggagtgttatagggttacagagaagaccttcaattatcaattatagattttacatttaccctggcttttaaaggaatagggtacactgtttcttctttactacttctgtctctttctgtctctttgacttcttctttctctctgacttcatgtctgtcacttcctctctttccttctctctttgactttctgcctttctgtctgtctttgactttgtctctctgtctcttcctctctctgtttctttctctctctctctaactctctgctggtctttccctgcctctgccagctgcttatgctgctgttctcccctctccttccctttggatggcttcagcagtgtaagactgccacctctttgggtttttgcactgcatgcagtaactccatggtttccttgtgatatttaatgggggttcccctagaggttagaaactcgcttttttcccatattgcagcatgggcatgtaggattagataagcatacttactgtctatagcaaaatctcccaattacaactcaggaggtgggagaaatatctggttacaggctgtcccaggattccttggatggtaatggaccttgaggacagtcatccaggacaggagtttcacactgagaaagccatgctagtgtccaggaggaagtcattttcctggccttcaatggttacacgtacccggggctcagtgggggtgattacatgagttgtcgcttgccctgggcactctcagtcctgttgttggatcatctggttgggggcttttggcccagagcacctttgtcctcttgggcagtgcatcttccagtgattgcctcagcatagtggacagggggcagctggtttcttgttggataatcttttttaaagtgtccttgtaaaccacactgataacaagccctactaggtgattggcctgctccattttctatcctctctgaaccaccaaggtttgtttgtctgagggccatggctaaggctgtggcctttctctgatctcgcttttcccttttggcctgttcctcttggtctctattatagaacactgaggttgccaggtttaattatgcctccagattttgttcagggcctagggctcacttttggagctttctactgatatctgtggctgattgggaaataaacttaccttttaggatcaattgaccctcaagggagtcaggtgacaggggagtatattttcttaaggcctcccatagccacttgaggaaggcagaaggattttcttcctttccctgagttatggtggacatca

SEQ ID NO: 444 - DNA, 3100 bp, Homo sapiens
  misc_feature (1)..(3100): DMR3:34653201
ttttttatggctgcatagtattccatggtgtatatgtgccacattttcttaatccagtctatcattgttggacatttgggttggttccaagtctttgctattgtgaatagtgccgcaataaacatacgtgtgcatgtgtctttatagcagcatgatttatagtcctttgggtatatacccagtaatgggatggctgggtcaaatggtatttctagttctagatccctgaggaatcgccacactgacttccacaatggttgaactagtttacagtcccaccaacagtgtaaaagtgttcctatttctccacatcctctccagcacctgttgtttcctgactttttaatgattgccattctaactggtgtgagatgatatctcatagtggttttgatttgcatttctctgatggccagtgatgatgagcatttcttcatgtgttttttggctgcataaatgtcttcttttgagaagtgtctgttcatgtccttcgcccactttttgatggggttgtttgtttttttcttgtaaatttgtttgagttcattgtagtttctggatattagccctttgtcagatgagtaggttgcgaaaattttctcccatgttgtaggttgcctgttcactctgatggtagtttcttttgctgtgcagaagctctttagtttaattagatcccatttgtcaattttggcttttgttgccattgcttttggtgttttggacatgaagtccttgcccacgcctatgtcctgaatggtaatgcctaggttttcttctagggtttttatggttttaggtctaacgtttaaatctttaatccataaaaaggcaggggttgcaatcctagtctctgataaaacagactttaaaccaacaaagatcaaaagagacaaagaaggccattacataatggttaagggatcaattcaacaagaggagctaactatcctaaatatttatgcacccaatacaggagcacccagattcataaagcaagtcctcagtgacctacaaagagacttagactcccacacattaataatgggagactttaacaccccactgtcaacattagacagatcaacgagacagaaagtcaacaaggatacccaggaattgaactcagctctgcaccaagcagacctaatagacatctacagaactctccaccccaaatcaacagaatatacatttttttcagcaccacaccacacctattccaaaattgaccacatagttggaagtaaagctctcctcagcaaatgtaaaagaacagaaattataacaaactatctctcagaccacagtgcaatcaaactagaactcaggattaagaatctcactcaaagccactcaactacatggaaactgaacaacctgctcctgaatgactactgggtacataacgaaatgaaggcagaaataaagatgttctttgaaaccaacgagaacaaagacaccacataccagaatctctgggacacattcaaagcagtgtgtagagggaaatttatagcactaaatgcctacaagagaaagcaggaaagatccaaaattgacaccctaacatcacaattaaaagaactagaaaagcaagagcaaacacattcaaaagctagcagaaggcaagaaataactaaaatcagagcagaactgaaggaaatagagacacaaaaaacccttcaaaaaatcaatgaatccaggagctggttttttgaaaggatcaacaaaattgatagaccactagcaagactaataaagaaaaaaagagagaagaatcaaatagacacaataaaaaatgataaaggggatatcaccaccgatcccacagaaatacaaactaccatcagagaatactacaaacacctctacgcaaataaactagaaaatctagaagaaatggatacattcctcgacacatacactctcccaagactaaagcaggaagaagttgaatctctgaatagaccaataacaggctctgaaattgtggcaataatcaatagtttaccaaccaaaaagagtccaggaccagatggattcacagccgaattctaccagaggtacaaggaggaactggtaccattccttctgaaactattccaatcaatagaaaaagagggaatcctccctaactcattttatgaggccagcatcattctgataccaaagccgggcagagacacaaccaaaaaagagaattttagaccaatatccttgatgaacattgatgcaaaaatcctcaataaaatactggcaaaccgaatccagcagcacatcaaaaagcttatccaccatgatcaagtgggcttcatccctgggatgcaaggctggttcaatatacgcaaatcaataaatgtaatccagcataaaaacagagccaaagacaaaaaccacatgattatctcaatagatgcagaaaaagcctttgacaaaattcaacaacccttcatgctaaaaactctcaataaattaggtattgatgggacgtatttcaaaataataagagctatctatgacaaacccacagccaatatcatactgaatgggcaaaaactggaagcattccctttgaaaactggcacaagacagggatgccctctctcaccgctcctattcaacatagtgttggaagttctggccagggcaatcaggcaggagaaggaaataaagggtattcaattaggaaaagaggaagtcaaattgtccctgtttgcagacgacatgattgtttatctagaaaaccccatcatctcagcccaaaatctccttaagctgataagcaacttcagcaaagtctcaggatacaaaatcaatgtacaaaaatcacaagcattcttatacaccaacaacagacaaacagagagccaaatcatgggtgaactcccattcacaattgcttcaaagagaataaaatacctaggaatccaacttacaagggatgtgaaggacctcttcaaggagaactacaaaccactgctcaaggaaataaaagaggacacaaacaaatggaagaacattccatgctcatgggtaggaagaatcaatatcgtgaaaatggccatactgcccaaggtaatttacagattcaatgcca

SEQ ID NO: 445 - DNA, 800 bp, Homo sapiens
  misc_feature (1)..(800): DMR3:35290001
aaacaaaaacaaaacaaaatggtacctacgtttcaagaaatcacagattggagtaaagatatcagcaaatagtaaaactatactaacaactttctttctttctttctttctttttttttttttttttttttttttttttatgagatggagtttcactcatcgcccaggctggagtgcaatatcacggtctcagctcactgcaacctccacctcccagtttcaattgcagcctcccgagtagctaggattacaggtgcccaccacctgctcagctaattttttgtatttttagtagagatggggtttcatcatgttggccagactagtgtcgaactcctcaggtgatctacccaccttggcctcccaaagtgctggcattacaggcatgagtggccacatttggcctactaacaacattcatttggtaaaattggtgatgattaaaaagaaacaaaatacaatagtgaggtttctaggccacatgatgagaactgaccaggcaaaggagcaggctccctgtagcagtagaaaagagatttgcttttgtgggcaagcttaaggtaccagaacagtcatggctgccaagtgtatgataaaaggaagagacataaacaggttggatctaagagacaaaatcagcacaaaaaagccaaaatttatttttagtttaattttaacacagcatattgcatttgaagtaccgggaaaaagcacatattcctatcggtgtctaggggtgaggaggaaatatttagggcataataaaaatatgcagttctgatggtatgtattgtgatctg

SEQ ID NO: 446 - DNA, 300 bp, Homo sapiens
  misc_feature (1)..(300): DMR3:36010901
catgaaaagaatgggatcctgttcatttgcaacaacatggatagaactggaggatattaaaaataagccaggcaaataaagacaaactgcatgttctcacttatttgtgggagctaaaaattaaagcaattgaactcgtggagatagagtgttgaatgatagttaccagaggcaggaaaggctagtaggagtgtagggtggaagtgagaatgataatgggtagaaaatatagtaattgtacagtttaaataacagtacagttatttaatataactatattatatgtatattaatatatac

SEQ ID NO: 447 - DNA, 800 bp, Homo sapiens
  misc_feature (1)..(800): DMR3:36836601
ttgtgaagaagaggataaacaaaataacatgcaatgattgggccccatacccaccaatggtgggcttgccatgaacagaagagtctacgagactcttcttcctatcacagctcccatccagttcaccagctaatcctgtctgctcggtttccctaacatttcccagatatgccaccatcccaccacttccaccaccaccatggtagtccaggccctatcatttcagcctaagctgatgctagactctaactggcctttctgcttcagctcttgctgccctatagacctcttcacagagcatccagataattagcttcatgtcagtcttcccatcaaagtcttccactggcttcccatcatgcttgaacaaagcccagtccttgccacagtcaccaaggccctactgatctggccctgccactttctcttactcatttaccatttcttgtggtcatctcacccaaactgactagcaaggttcaaatcaaccaacttggcagcagccttcttctggatcctcaggatccatcacctgccttttcccagttcccaaatgcattctatccacggaaagaaatgtttatgcaggtgccacaagagtgaaagctttcctttcagggattcctgtgccttgcctgcttcttgcctctagagagcagcgttgtatccctgttccattcccttctcccacatcttaagaagtcacatcccataataaacatggaacagggtaggcagcatctggagggccttatcctcttcttcgcattgacttggggccacacttcaaacttcccagt

SEQ ID NO: 448 - DNA, 600 bp, Homo sapiens
  misc_feature (1)..(600): DMR3:37487801
ctgagtgctgtggcctatcacagaaaaaaaagtcatattttttttcaatggcataattttatgaatttttgggacactacactatagacttgttaagctatgtttcagttttgcaattatagatacactctgtagacaagtcccagtaggtacagagggcagacgtgggtcctcagactgataaaatgtagccaggagaccaatctgctctagtctggagtggctgcttactgggaacatttggtttcagtatctgcacagcagtttgtctgtccatgctttggtgccagttatttcatgagtctttttatttttattttttggttatatagatcagaggtttccgtgttgcccaggctggcctcgaacgtctagcctcgccttcttatgcgccaggacaacaggcctgagccactgcagctccctatttcatgagtcttttagctttggtcccaaaattgaattctgctcagttctgagctggggttctcactgaaatgtgactgtcccatgttcagggtcacttttttttttctgagagtagagcatgacataatgcatagtaagttgcatgtctatatatacattattatgtgcctg

SEQ ID NO: 449 - DNA, 800 bp, Homo sapiens
  misc_feature (1)..(800): DMR3:38894101
actcctcacccacaagattggtctctgcagaaactgagtttgttcccagcactgccttttttttctaaaacaaacaaaccaaccaacaaacaaaacatgctattcagtttacttcccaatccccttttcctcacttttcagccagtccaaattctacatttcttgtagagttcaaccaaaggaactccccctgtcatcccagcccactctgattttgctcccctctgaactcttctgacacctcctatctgtgccacacctgcaggaccacaataaagaacctgtcctgagatgtgcacatgggtatcaaagggcagccacgttttgtacccttattatccttgcatagtgcctagaaaagggcaggctaccagtgccctgtgataactccagctttgtatgacctttaagtctatgtgtgaaccttcatacctgttgttcaggctcaggttgtgtgatgcgctgtgcattatcttcaccagaaaattcaacgtcatcttcctcctccgcaagtggtgccaaccaagtccaatcatgcctgacgcccagggtctttggtacagaggttagtataccaagctcctcctgggtctctgagccccttttcatctccatgaccaggggaatgatgtctttgctttgtgcagcacagcctcctgccacctctttttgctgtggtaagttttgcttcctgcaccacttgtgacagaaatgctcaagagtgtgtctcacaaaacaaaaagcccggcggaatcgatccagtgctaactggactttagttttcctggcctctccttcta

SEQ ID NO: 450 - DNA, 2100 bp, Homo sapiens
  misc_feature (1)..(2100): DMR3:40683001
tatgtaagaaacctgccaactttctgcatttactttgtaaatgatcactttattgaatttgcttattattttcaacagtttttcagttaattgtatttggtttttgaggaatgcaatgacagtatctgcaaataatggtaaacttgctttctcatttagaatattaatgtgtcttattttactttttagttattttattgtttaacctatttatattgtttgggactctaatcaacgattatgtttcaccattaagcaggatacaagctattggatttgtttatgtatatagtattaattgttttgaattttttttttttttgagctggagtctcgctgtcccccatgttggactgcagtggtgcaatcttggctcactgcaagctccacctcctgggttcacgccattctcctgcctcagcctcctgagtagctgggactacaggcgcccgccaccatgcctggctaattttttgtatttttagtagagacggggtttcaccgtgttagccaggatggtcttaatctcctgacctcgtgatcggcccacctcagcctccaactgttttgaacttttaaaaaatctggatgttatgcttttttgaaatatctcaagaaggccacatggtttccctctttcgtttaatgtgaagaaatatattgctagatttcctaattttgaattaacttaaaatactctcagattatattgctaatattatgtttgacttttcatggatatttaccaatcctggagtgtttttaaaaaaattatcatggacaaattctgatattggcactacatcagtgtctttaaaagaatagagatgctttccttctttccttccttattctctgatgtggcctaaagagcatatgaggtttgatttagaaataactctcccctgaaacaatttaattctggcacttttttgagtggtggtttctttctgacaatttccccagttttgatctgtggagatagaagaaaatgagttattttcagcttctcttatcaaagggagttgtcaattatcactccagccattaactgaaccctagaattggcttttctgggaagctatttccttttcttatgagaaaacatccaaggggcatctacagccatgtcaggtgcctctcagagctgcgggatggcaacttggagtaccaaatgcaggggtttggttactttattccctaggacaagacttcgttgagaagagaaagcgaagcagagactagggctggagcttcaaatctcacccctcctttgctctccctgctccctacctttaggaaccctgtcgctggttaggtaaaatctgcataatttgcacaaatgtttccaaatgcctcctaaacgtctcctaatggaaacctgacaggccgaagcctcacctctccctttgccctccaaacctcctgtattctttgatcaattaatgacaattccacgtattcaatttcccacatcaagaacttaagctttgtccaggacgattccttctttttcacctgtcccatttgatttgttgacaaaggctgcaattccatctcctcaacatctctcagatctatttctttctttctctaccaaacacagatgctttagttcagatccttcaatctggttgcctcattattgcaatagccttgtcatcagtgtctgactccagtcttcctctcctatgtactcccactccccaaatcttcctctacctgtctaccagaatgagcttttaaaaaatgattttgatatttctcaaagtactgtatagagttaaaaatatcaaataaagtctacagtcactggtctgtattttttaaaaataaaaaaagctttgaaacggattttttggcacttctggcaccaaagcttattctggtggcaaaacttgacctaaatttagtttcattgcaaaaatattgcattgaatacagcatgcttccccacaccttgatgggagtaagtatgatgagtatgtgcatgatattccctcttagaaatcagaaaatgttagaattctgaactacatttggctctatggattcaaaattgtggattgtgcatgtgtagtatgaatcctctgccctcat

SEQ ID NO: 451 - DNA, 400 bp, Homo sapiens
  misc_feature (1)..(400): DMR3:42858501
cagaaaccccatctgaaggccaccaacatcaaagaccaaaggtagataaatccatgaagatgaggaaaaaccagtgcaaaaaggctgaaaattccaaaaaccagaacacctcttctcctccaaatgatcacaactccttgcaggcaagggaacaaaactggatggagaatgagtttgatgaattgacagaactaggcttcagaaggtgggtaataacaaactcctctgagctaaaggagcatgttctaacccaatgcaaggaagctaagaaccttgaaaaaaggttagaggaattgctaactagcaaaaccagtttagagaagaatataaatgacctgatggagctgaaaaacacagcatgagaactttgtgaagcatacacaaggatcaatagctgaat

SEQ ID NO: 452 - DNA, 900 bp, Homo sapiens
  misc_feature (1)..(900): DMR3:42940801
gaaaatggagtaatatgagtaacccaaataatcactgggatatatacaaattagggaggggcttagagctaagctgacagctatgttcgggggtcagttctccttccacaagtgcacttctgtgatcgggcccaagcccagcttctatgcagcagcttcagcgtctgtggaggtcacatgtttagaagctcatagcggaggtgtacttgtttctcactgggaaaatatgctgaactctgactggctactttaattctgcatcttcttcctccacacctaaattttacacaaaaactctgtaggcacgtgaaggacccaatactgaatacgtatcatttgtagatgcccttctcaggtctctcattggcagatttgaccatcaccaaagtactgaggtctgggaaagtaggaacttgtcgtttcaggaatcagtggcttttgaggacgtggctgtgtacttcactacgaaggaatgggccatcatggtgcctgccgagagggccttgtacagggatgtgatgctggagaactatgaggctgtggcctttgtaggtaaggcctctctgctgctggtttctgcttgggccctcaggttgaagggctcttttataattattagctgaccccaaatagcgatgtcaaaggttgccaggtatagaaagccctggtgtctattgacttgcgaaaggctttccttctttttctagcgtaaaagctaccctccttccctacctgcctcagaggtgattctgagtacagtagggcttgagctatatcttgatacccttagcctagtattgaacctccaatttatcttaagagaatgcagccactttgtctccctctgggagttactcctaggagccatttgtctttttcccatagtgagagattttcatc

SEQ ID NO: 453 - DNA, 900 bp, Homo sapiens
  misc_feature (1)..(900): DMR3:44379601
ccttagcaaactaatgccgtgacagaaaaccaaataccacatgtcctcacttataagtgggaacaaaataatgagaaccaatgggcacaacacagagaacaacagacactggggataactagagcggggagggagagagaggggaagggtgtttctaactatcaggtgctacactcaatacctgggtgacaggatcaatcataccccaaaccccagcacgttacgttacacccatgtaacaaacctgcacatgtactcccaaatctaaaataaaagttaaaattatatctagggaagagagtgggaggagggagaggatcaggaacaataactatcaggtactgtgcttagtacctgggtgaagaaatggtctgtacacgagacctccgtgacatgagtttgcctttgttaacctgcacatgagccccagacctaaaataaaaaaaaaattaagaattttaactcaattagatcatagacttaaatgtaaaatgtaaagtagtaagacttttaggagaaaaaggaggggaaaattttcagggggatatgaagagaggttgattaatgggtccagatatacagtttgatagaaaaaaataagatctgtctgatagatcagtaaggtgactatagtttacaatcatcaatcgtgtatttcagaatagctagaagagaataattggaatgtttctacaataaaagaaatatttaaggtgatggatataccaattacactgattttttacaaattatatgaatattacattactgaatgtaccctgaaaattttaaaaaaatgtatgattaacaattttgagcaaaaaagaaaatatagatgaatgaaaacaaaaacacaatgtaccaaaatttatgggacccagcaaattcagtgaagcaatg

SEQ ID NO: 454 - DNA, 1400 bp, Homo sapiens
  misc_feature (1)..(1400): DMR3:44495901
caacaggcaggatggttcttctgcagacatgactggcaatgtccaactcagggcggggaaccagaaatgtccaactcatgtgctcatatagtgtggggctcttccctgaaatctgggggctcccaaaataagacagttaaagaggaaaaagtcctatctgcatatcttttaaaagaaaatggaaaaaaatacaaaaaaacaagctgaaaacatttaaaatacatattcacaaatggtaaaattccagccgtgtcatgagctccggtttgttgttttgttgttgttattgagacagagtctcgctctgttgcccaggctgcagtacagtggtgtgatcttggctcactgcaatctctgccctccaggttcaagtgattctcttgcctcagactcctgaatagctgggattacaggcgtgcaccaccacacccagctaatttttgtatttttagtagaaacggggttttacaatgttggccaggctggtctcaaactcctggactcaggtgatctgaccgcctcagcctcccaaagtgctgggattacaggcatgagccactgtgcccagacaagtttagaaatttcaaaaggccctgaaaaactttaggcccccagtaatcctttctaactttgtctgagacatctccccaacaatcacatttaattctaattttcttgatcctcaactctctttcctttctcctgcattgtctgaaacatacaccacagtgcacaaaatcacccctccaggttacatgactgacattgcccctctagcctcctcctccacctttgtcatactgcggatcctgtcagcctgttaagaaatctgggggatggaggccaggcgtggtggctcatgcctgtaatcccagcactttgggaggccgaggcaggcagatcacgaggtcaggagatcgagaccatcctggctaacacggtgaaaccccatctctactaaaaatacaaaaaaaattagccgggcctggtggcgggcgcctgtactcccagctactcgggaggctgaggcaggagaatggcatgaacctgggaggcagagcttgcagtgagctgagatcgtaccactgcactccagcctgggcgacagagcaagactccgtctcaaaaaaaaaaaaaaaaagtctggggatggaaagagaacagggtgaacattagagtaaaaggtccaccggcactgggccattattgcaagggtggaaggaaaggtggttcaagctcatggactgacatatgactgcagaaggaaaggtggtctggaagataattaaggcacagttctcatcttgaaattaagacagcagttgtagtgagaaaggactagctgataaggaaaacagattagtttgatactactattttaccaaaaacctcatcactct

SEQ ID NO: 455 - DNA, 900 bp, Homo sapiens
  misc_feature (1)..(900): DMR3:45080001
gaagtacaacatgtttctgacaattaaatgtaacagacataatttctagggcacccactgcattggacaatgtgagacagatggactaagtacaagacatggacctctacctctgaaaaaagtagcatcttggttaagcaaaagacacacaagcacaagctttttaaattatgaaactaatacagctacatgcagaagaattatgaatcaaaaggactattgggatttagaaggagagcttagcagagttggagggcttcctggagaaaatgggctctgtgatagactctgaagtgctggtaaggcatggaaggtgggcagcttttgctgtgagttgtccaggaacaatggcaagagcaaggtgtgggcaagagcaaggtgtgggcaagagcaaggtgtgggcaggagtggattcagagccccactggaatagagttttgaagtcatggatgaagtgggcggagagaggtctgaagaggttaggagggccaggcagtggactggaggtgccacaccaccagcaaaagaccaaggattctgttctaagggccaaccaagtctggaggcacagatttcagagtgagggagtcacatgatgaaaaaggaatggtggaatagagggggatgttggatgggaggagaatctagaacaatcagggtgagtgacagggatgaaatgaagttaggtccaatattctgggcctgggtgactggaggaatcaaagcattctagagcgtgaagtgaccttagaagatgtaatcttgtatagccattcagaataggttaatgcctttcctgggtccacggcaagttcttcctctcttagttctctcaagagctggttgttgaaaacagcctagcgccaccccttcccctgccattctctcccttcctctctc

SEQ ID NO: 456 - DNA, 1300 bp, Homo sapiens
  misc_feature (1)..(1300): DMR3:46281901
gaaaatacagttttctcccttttggtacagagaggcacccaaagaagcagtttgtctccagctgtcaggagcagagtacacgctgccatcctgcctgggagtgatgctactttcaggtgatttgcctcactgtaatctgcagggaccttgtgactgcatcacctgacaggacatcactttggtccacatggttaatattgtgctgagaggacctgggaaacgggaataacaaaaaccttcaatgtcttgataaaacacacggctgacagagagtgaaagataaagccggagaaaatatcagagtctccaacttcaggcaagaggtgaggtccagtgaaagcagatagcctcagtgtgtggagtccatgcctggtctccttccctgtgccactgtttacgctgttcatgagcctctgagaaatcatctggctgccataggaagggtgacccagcatgtgctattttccaagtttcttccatcctggggggcattttggtgagaattcacatgagatatgaacatttttaggtttgggtctcattcaaataaatccattgacatactcctccaaatcttgataacaattttccatttaattccttctgtcttcccttacatctaaccatatataataaacactttctagaaatatgtgtagattctgacccttggtgatctctccttcgaagcaaagaggacactatgataaacaccttgatttctgccacctgggaggtgtcttctccacttgtcctttagggctacccctgagaggggctgaatctaacacaatctacctcaggttggtgcaagcaaagtgcagagtcctctatccataagacaggcatgagtgttttcatcctcagacagatcatcgcagccaacttcctgggaggccacaggtccaggtgaagggagaggatggcagttgttgggactagggatgggataggcatgaataacctgcccatgctgcctttcgaacctgtgtggattacatcctatataatcccacttcccctttatgatgcagtgttattgggtctctctgtggcaaagtaggtcaggtggcagtcagttcataataaacaacctgagtgtcatggtaagctggtgtctcatagtcaaactctcagagtcccctggagtccagtaacaacccaggacttatttttttgctgaaagggatgtagcatttcttcgccctccaaggggctgctgccatgctcctgtccaggcttgtatccaaaatttgactcaaggagttcaagaatagcaaaaacgggtgtcatcgcaaag

SEQ ID NO: 457 - DNA, 1100 bp, Homo sapiens
  misc_feature (1)..(1100): DMR3:46661201
ttcccactgagcagaccttgggtgtggacttgaagcttcaaaccctccttgctcacttctcggcttagtgctggggcaaacaacctgaaaaccgatctgagtctccaggagtgctgccctcccccactccacccccaacacagaggggcccagtgggtcttatttccattggaaatttcactgctgggtggtttagagtccttgtcattctcttccctgtcctagctcatggatgtgtgttactgtttcagttcggagcagggtccttaaaggggcagggtcatggctccccagcctcaggggtgtcatcaataatgttctgggccaggtgtggtagctcatgcctgtaatcccagcactttgggaggctgaggtgggtggatcacttgaggtcaggagttcaggacaagcctggtcaacatggtgaaacactgtctttactaaaaatacaaaaattatccaggtggtgcatgcctgtaatcccagctacttgggaggctgagacaggagaatcacttgaacctgggaggcagaggttgcagtgagtagagatcatgccattgcacttcagcctgggcagcagagtgagactctgtggcaaaagaaaaaaaaacagtgttctgaattattcaagccctgtcctggagtcaaactgaactcttccctctaactccccaactagcgccacactgaggagcaacagctgccttgaatcccccgctgttccattcactaaactagattagatggggagggggagggcatagaaggtgctggggagctgcagcctcattgttgtgattcattcacttaatggatcttgtgcagagcacagttcaaggccctggggatgaagtagtgaccaagacagaggaggcctctccctgccctccccaggcacccagtccagcaaggagtgggggatttagccaggagagggtgtcagtgaggacaaaacgtgctcaatgacaggatacagggagagggcagaggcggcaaaccgcgggtcagggaagcctctcgtgggaagcactgtttagcctggaacctgaaggacaagaatgagactgctccagggagagtgagggccaggaggagga

SEQ ID NO: 458 - DNA, 800 bp, Homo sapiens
  misc_feature (1)..(800): DMR3:47735801
agctacagtgagcaaggatgctaggatagtgccattgcattccagcctgggcaacaaagtgacacctcatctctaaaaagaaaaaaaaaaaaaaaactcaagaaaaaaatttcttttgatgcaaatatatcaaaaaatccaaaacattactatggttgtcatttattagaggcttacaactacaaaatgaagtgatcgtgtctattattatctgaagtgattgtgtctattacctgatgtcgtttgatgatatctttcaatttgttagccaacttcagatcaatgtctggaatgaggtagatgttgggtctggtcaaacaattgttctgaggatgaaaagaacagactttcaaattctcttagttttgaaataatatcatattatttatgcaatatacaaaccacccccagataaccttttctgccacaaaaaatattgagaagcatgacctaaagaaattcagcaactttttcattaagataccataccagattgccagattaatcttcctccccaattttacccaaatttactttaatggtctaatgtagtgtttttagctacggaagggattacagttaatcttaaaaatagcaatggcaagtggctcacgcctgtaatcccagcactttgggaggccgagatgggcggatcatgaggtcaggagatcaagaccatcctggctaacacggtgaaaccctgtctctactaaaaatacaaaaaaattagccaggcgtggtggtgggcgcctgtagtcccagctactcgggaggctgaggcaggagaatggcgtgaaccc

SEQ ID NO: 459 - DNA, 1600 bp, Homo sapiens
  misc_feature (1)..(1600): DMR3:48189501
agtgagacaccccctgccccccactcaaaaaaaaaaaaccctacagtttgaaaagccatgctggacaggtggaaaccccaaacctttggccccaacaccagacccttcacagtgaggaacctctctctcaggattcatctccttttctgtgcaccagtgctccaccacccaggaacctcccttccctccagaaaccccaggctatttaggcctctctgcacagttcacatggtctgtggtcccactgtttcaaatagttctccctgtcgtatctctgaatactttcctctcctcctgtgttttatgtggtttaatacttggctcaacaggccgggagcggtggctcacgcctgtaatcccagcactttgggagaccgaggcgggcggatcacggggtcaggagatcgagaccatcctggctaacatggtgaaaccccggctctactaaaaatacaaaaaattaccgggcgtggtggcgggcgcctgtagtcccagctactcgggaggctgaggcagaagaatggctgaactcgggaggcggagcttgcagtgagccaagaccgagccactgcactccagcctgggcaacagagcgagactccgtctcaaaaaacaaaaacaaaacttggctcaacattcctgttactgcattcattcattcaacatatgtttatttaaggattactagaacaaattcagtgcttgaaataataccacaatccctgctctcagggagctctggtccgctgagcataaagctccttctaataatggaattattaccatgacaatagctgtggtttgtggagggatggtgggcacctagaggaggggcggggactggggaaggcagtacggtggggggcacgtcctaaaggagattaaaactaaaggtcaaggttgctggagaaggggagcttggggctggtgggaagtgctttctaaggaaacggccctcggcagccaggaggtgaggaggaacgccgtacttgccgggagctactcctgagttgatccagtcggttctagaatgggcacatgggactggctgtgagggacagttcttgaaaggattggagtttgctgaagagtttggccttatcctgtggacagtggagggtgtgtgataaccggatcagatttgctttagggtggatcagtggaggagagtggggaggcctgaggaaaaaggaggtggctgtctcaaaagtctgggagattctgaagcaaggtgggggccttggagacaaaggaagggaatgattctgtgagccctgaaggaggtagatctcatcagattttgataattgagagttaagattgtagggggctagagggaagggaggaggctagaatgattcttaggtaatgattcaagtacctgggtggatgtaacatttcaacaattggaggcatacttcttggaggaatttgatgagctcagttttgtgctggtggactggctggggggtgtagtcaggaggcagatttggtgttgattagcatgaagatggtaatgcccattgaggatgtacaaagggtttttaggaccctggatctggggagcaccagcattgaggacttgatgtagtgagacagg

SEQ ID NO: 460 - DNA, 1500 bp, Homo sapiens
  misc_feature (1)..(1500): DMR3:48461101
ctctgaacctgagatgtgggtaaggtgaagaccacacatcacaagcacgttgaagtttagtggtttccctaaggaagcagaggatgtggagagggtctgcagcccacgggctgaccttgctgggagtctctgcctgtcattgtgcccatctttagcatgcatctggggtggcctgttcttcttaaggtttgtgggtagtatattatagtgaacctagcgaatgaacactgtgatcataaattcctcccttgggattccagagccgcaagattggggagaactgtgaacacaaccagcccaccccctcatccagtaatccagtctccctcagcactctaccaaagggtcagtttctatgttggaatgattccactggctgaatatatcttaaatcatctcatctctgagctcagcactgctgtttcctagatctgtttccatctgaatatttttggttggtctggcccatgctaaaggtggtactcagctggacacagcactgcagtgtagtgtgggcagtgggatcaggcagactcaggactcaagtgcccagcaggggcccagctcatagtggctgtttttttttgttgttgtttatttgtttgtttttgtttttgttttgagacgaagttttgctcttgttgtccaagctggagtgcagtggtgcgatctcggctcactgcaacctccacttcccaggttcaagcagttctcctgcctcagcctcctgagacgctgagattacaggcacctgccaccacacctggctaattttttatatttttagtagagacagggtttcaccatgttggccaggcttgtctcaaatgccggacctcaggtgatccacctgccttggcctgccaaagtgcaaggattacaggcgtgagccaccgggcccagccttggttatttgtttaataattgttaaatgaatgaatcccaggctgggcacagtggctcctgcctgtaatctcagcactttgggaggccaaggtgggaggatcacttgagcccaggagtttgagaccagcgtgggcaacaaagcaagactcccagctctacaatttttttttttttaattagccaggcatggtggcagtgagctatgaccatgccactgcactccagcctaggtgacagagtgagaccctatctcaaagaatcccagaaaccatgtttttactggtggtagacacaccattattccactcctgttgagcttgtccacagggacattcaaaacacagccacagctgggcatttatctatttcatgtactggggctcttcataaaatttcatttaaagaggttcttaggggctgggcatggtggctcacgcctgtaatcccagcactttaggaagccgaggtgggtggatcacgaggtcaggagatcgagaccatcctggctaacatggtgaaaccccgtctctactaaaaatacaaaaaagtagctgggcgtggtggcaggcacctgtagtcccagctactcgggag

SEQ ID NO: 461 - DNA, 400 bp, Homo sapiens
  misc_feature (1)..(400): DMR3:49270901
ggtactgggtatattgaacatcaatcaaaaaaacacattcaagatgtcaaggaaagttaaaaaaaaaaatcagtaataggaaacatttcaaagcaatggaattcaaaaaactggtctcacagcttaaaaagggacacaactgggatttaaaaagggtctggtaattcaggttctgccaaccttttgagaaatgtggcccctgacggccattgtagctgcttctgctcaggctcaagggcagcctcctgctgtaaggaatcaaagcttagataactgtccttactcaatttggtatttaaaagacgtcatcacattgtagtcctcttccaagtccagaacagtctcaacaatattatgatcatcaaaagcctgtttgaggctgccagggtcagcatctgtg

SEQ ID NO: 462 - DNA, 1600 bp, Homo sapiens
  misc_feature (1)..(1600): DMR3:50021601
agtgcactccagcctgggtgacagagcaaaactttgtctctaaataaataaataaacaaataaaatacatacctatgtacatacatacattttaagaatcattttgatatattcatctccatactgaggaatttaagtgcttttttttttttttttttttttttttttttgagacagagtctcactttgttgcccaggctggagtgtggcggcacgatcttggctcactgcaacctctctacctcctgggttcaggaaattctcctgcctagccgggtgagatttcctctttagcttgtgtgttatttagaagcatgtttttgtacctatcgtagcttctctagagaagggaggtaggagaatcgcttgagcccgggaggtcaaggctgcagtgactgacccatgaccatgccactgcactgtagcctgggtgacagagtgagcccctgtctcaaaaaggaaaaaaaagaaatcagcatattttatgacttaataaatgtattcaaattccatccagatatttcctaatttattattttactaacagtgtttgagagcacttgtctcccctgccttccaaccagtgtcaagtgtattttaacaaaatacttgtattgggtagtagtacatggttggttgttactctctaatcgcctgttgtgtttgaaatatttaataatttttttaatgttgctagtgtagtgaagaagataatgatttagtttttcttctttcttttttttttttgagatggagtttcacccttgttgcccaggctagagtgcaatggtgcgatctcagctcaccaaaacctctgcctcccgggttcaagtgattctcctgcctcagcttcccgagtagctgggattataggctcatgtcaccacgcctggctaattttgtatttttagtagagacagggtttctccatgttggtcaggctggtcgcgaactcccgatcttaggtgatctgcctactttggcctcccaaagtgctgggattacaggcgtgagccaccgcacctgacaaatgatgtagtttttctcccttaggttattagtaggcagaatagttttacatttgattattagttattcatatttcttttgtgacttgttggttcttaatatatctattcagccaaaaatgaaaaataggatatcttagcctgtctagtcttaaggtaaatatatgtgggatataagggagtttgggggctgggcgcagtgactcacacctgtaatcccagcacgttgggaagctgaggtgggctgatcacttgagcccaggagttcaagaccagcctgggcaatgtagcaaaaccccatctctaccaaaagtacaaaaattagccaggtacagtggcacatacctgtattcccagctactagggaggctgagatggaaggatagcttgagcccaagaggttgaggctgcagtgagctataagcatgccccactacattccagcctgggtgacagagcgagaccctgtctcaaaaaaaagatttttttgaaaagttgaaaatgagtatattcgctgaatacgagatgagttttcccaagaatttatccctcagaatctttcacgttcttcc

SEQ ID NO: 463 - DNA, 1200 bp, Homo sapiens
  misc_feature (1)..(1200): DMR3:51385701
gagttattgtccccaccaccatctagaggttaccgctccccgttcggcgtcgggagctccagggctggccgtgggtgctgcgccctgtctgttgggatcacgaagctgcacctctgggtccgctgttgtatttggaaattagcagcagcattttgatcatttttctcttcaccttccagtctctccatttatgaggtcacagtgagtcccgtctcaaggacacgtgttcaccatgggcttaaacttgatgaaaggagcagggagaagtcgtttataggtcattgggtgatgcttggtcctttgatgccctgggtgtaccaggggacccccgccacttggaaccgggttctgtctacctgtagacacctgagaaaaatcggtgatggaaaagctcacctctaatgattcatctccgtgtctcctattaaaattgctggcggagttcttttctggtggattggaacagcttggtgattgctgagcatctcccgtccctctcttttccagtttgtatttcttatctgggaagattttaccaggacctcaaagacagagatgtcacattctcaccagccactattgaaaacgaacttataaagttctgccgggaagcaagaggcaaagagaatcggttggtaagtagctggtgatcctccccaactggccctggctcatgttaaccctcggcttcaccagccgtttgataaaaggccttgcccacctctctgttcaggaagccagctactctctccataaactaatgtgagaagactgaagtgcttctatgtccttcccaaagcagcatgtgttctgcaactgtgatttttttttatcctgttagtctttattaagcacctactatgtgctaggcactgggaatatcaggggaaagaagtgacagtcggacacacaaataatgcaatgtctgggtgtcatgaagaaaatggaccagcaggtgctgatttagagtggccaagaagtctctgaggaagggttatcattgaagtggggtaagaccatcccatacagggaacagcagtgtgagtgcccagaggcctgaaagagtgtggcatgtatgtggacaggagaaggtgacagggtgcctacaggataggcaagggccgaatccaagacaaaagccctagtgaagcaatgggttttctaacttgaatttctctgacagtctctggcttttctctc

SEQ ID NO: 464 - DNA, 2400 bp, Homo sapiens
  misc_feature (1)..(2400): DMR3:51469201
cattctttttccacacacaaattttttttttttttttttttttttttgagacagagttttgctcttcttgtccaggctggagttcaatggcatgatcttggctcaccgcaacctctgcctcctgggttcaagcgattctcctgcctcagcctcctgagtagctgggattacaggcatgcgccatcatgtctggctaattttgtatatttagtagagacggggtttttccatgttggtcaggctggtcgcaaactcccgacctcaggtgatcctcctgcctcggcctcccaaagtgctgagattacaggcgtgagccacagcgccaggccaaaatttcagactcctctccacaaaggactgcttcaggctatcaagcttatatgtactatgggcccatgcatgacttcagctttgcccactggtgatctaccttatagtaaacataaaatggcagtctcaagtccctcataattctgtaccactgtagcaaattccataccaaagcaggtgctatcatggctttaattagcccaaaattggccaggctcagtggctcacgcctgtaatcccagcactttgggaggtggaggcgggtggatcacttgaggtcaggagttcaagaccagcttggccaacatggtgaaaccccttctctattaaaagtgcaaaacttagccgactgtggtggtgcatgcttgtaatcccagctacttgggacactgaggcacaaaaattgcttgaacccaagaagcagtggttgcagtgagccaagatcgtgccactgcactgccggctgggcgacagagcaagatgccatctcaaaaaaaaataataataataaataagcccaaaataaaccaaattaacacgagaaggcatactttagttctcaagacaccaaagcagacataagcgtcaaggttccaaatatcaacttcctaactaaaagcaggacactgaatgctttctcaactatatttccccaacagtaaaaggataattatttagaggataattattattagaaagatgaaggcacagagaagaacaccttttgtttttatggtttaaaaaagttggttgggcacagtggctcatgcctataatcccagcactttgggaggcccaggcgggaggatagcttgtgtccaggagttcgagaccaacttgggcagcaaagcaagaccccatctctacaaaaaaataaaaactaaaaatcagccaggcatgatagcacacgcctgtagtcccagctactcaagaggctgaggtgggaggatcgtttgagccaggagatccaggctgcagtgagctatgatcatgccactgcactgcaacctgggcaacagagtgagtacccatctccaaaaaagaaaaagtctgaaaggaagacaatttttctttttaattctttgtcatcatatcaactgagttaactaaagtacacctacttctgttcctttaggttagttatgtgatattcgattggcaaatatcaaaaatatttccaattttttccagaaatttatttttcctcactagctccaccttgagcaacattttaacaaataaaaggtcttaaaacttaccacaaaagacgctatttcaattcaaaaattttcccataagcaatttttcttttttagaaaagaaaaaaaagaccctcgctttaataaaagtgtcttaaaagaaaaaaaaaagacccacacttaagagcacaaatcttaccaggatgtcgatcatcaaatgggtctggatcccctttacgatactcttcagtttctttttcaatcaattgagacatcctagcacaaaggaaacaaggggtcaactctggacaagcataaaaaaatggaccaccactacaacagtcaattcaacggtcaaggtagaaaataaaagcaaagttagaaaaagactatttcttctgatgtacatagaaatctacacaattatctcataaaagagtttcctctcccaaactcattcttttttttttttttttgacagtctcgctctgtcgcccaggctggagtgcagtggtgtgatcttggctcactgcaagctctacctcctgggttcatgccattctcctgcctcagtatcccgcacagctgggactgcaggcacccaccaccacgcccggctaactttctgtacttttagtagagacggggtttcaccatgctagccaggatggtctcgatctcctgacctcgtgatccacccgcctcagcctcccaaagtgctgggatgacagacgtgagccaccacacctggcccccaaactcattcttatataaactttcccttcttcaaaaaataacattaccttcacctcagaaaccaaaaatgtaggactcatctttaaaatcttccttttcttgctgggcatgatgg

SEQ ID NO: 465 - DNA, 300 bp, Homo sapiens
  misc_feature (1)..(300): DMR3:51597101
gttacagtgagccgagattgcgctattgcactccagcctgggggacaagagcaagacttcatttcaaaaaaaaaaaaaaaaaaaaaaaaccccacaaaacctagggcttttctcaagaattttataacaaatcaaagtccaggtcagaaactacagacataagtaacttactgattattctaagaatgactgcttgccaaagagttttatttccaaacttagttcctccatttgtggttgggggtaactgggagtttatggagctttaggatgaacttgacaaacttgttagaatgtcag

SEQ ID NO: 466 - DNA, 200 bp, Homo sapiens
  misc_feature (1)..(200): DMR3:52622301
gcactccagcctgggagacagggagagactccatctcaaaaaaataaaaaaaaagaaagacaaaaaaatacttaggaggacaacaattcagatcatagatactgttgtagtaagtacgctacaattttagaatttcataggaaatgggacataaagggtcctgtgctatcaaaataagtatattacaacaattttccaat

SEQ ID NO: 467 - DNA, 700 bp, Homo sapiens
  misc_feature (1)..(700): DMR3:52729001
tgtttatcaagacaatatgtgcacagctgaacatagacccttatcagtagttctgattttgcctttgtcctgtttcctcagaagcatgtgatatttgttctgccttttgccctttgaagcatgtgatctttgtgacctactccctgcttgtacaccccctccccttttgaaatccttaataaaaacttgctggttttaaggctcaggtgggcatcacggtcctactgatatgtgatgtcacccccagaggcccagtacaaaaattcctctctttgtactctttctctttatttctcagctggccgacatttatggaaaatagaaagaacctacgttgaaatattgggggtgggttcccccaatactgcactccagcctgggggatggagcgaaagcctgtttcaaatattttaaattaaaaaaaaagggcgggcacggtggctcacacctgtaatcctagcactttggaaggccaaggtgggtggatcacctgaggtcaggagttcaagaccagactggccaacatggtgaaaccccatctctactaaaatacaaaaattagccaggcatgatggcagttgcctgtaatcccagctacttgggaggctgagatgggagaatcgcttgaacccgggagacggtggttgcagtgagccgagatcatgccactgcactctagcctgggcggctgagcaagact

SEQ ID NO: 468 - DNA, 200 bp, Homo sapiens
  misc_feature (1)..(200): DMR3:54446501
ttcagaaaagaacaatggataatataacaaacatcaagattaccacccagaattgatgggtattcaccttttatcatttttgctttttttgtgtcctttttttcccttaaggagtactgcctctttttgatcaaatcatatttggggtatagtgctaatgatgggattcctaaatgacatttaagcaagcctcatgatga

SEQ ID NO: 469 - DNA, 1000 bp, Homo sapiens
  misc_feature (1)..(1000): DMR3:55470001
aaaatatttctaaaaaccaaaaaccagaatcactgtactttctataaataagcgggtcctgggagcggggctgagtgctgggtggcacccactacttgcacacaaactggtccacgatctccgtgcacttcttgcacttgacgtagcagcaccagtggaacttgcagtggcagcgctccgtctgcacggtcttgaactggtcgtagccacggccgcagcacatgagctcgcagccatccatgccctccgacgtcttgttgcacaggcggccctgcgtgcccagcgagccggtgctctcattgcgcacgcagtagtcagggctggggtcgatgtagaccaggtcttgtgtggtgggcgagttgaagcggctgttgacctgtaccaacttgccccggctgttgagccgcatggccgccgcgctgtcgtacttctccttcagggcatcacccaccttgcggaagtctgccagctgcagccagcatgtcttcaggctacatgagccggacaccccatggcacttgcaggccacatcagccaggttgtacaccgtctgcagggaaatgggggcaatcaatacacacattcatggaggagccagatgcaggctataggaacaaagttctcctcgaccttctccatggagctatgttccccagctgaattaaggactgtattatatttccttcattaccagaagtcttatgttgccttctttaaaaattcttccaaataaatatgttcttaaccactcattattatatcattatcaacaacaactgtggttttttaataggaacaggaaaaaaaaattgttccagctgtatttttttcagagaaagagcagcagcaacatgtggacactcatcccagaggttgttcacaatgcattacctgaattaatcccccgtaccagctaggtgagaagtgctagtatcatcccatttcacagagaaggaaagtgagacccagagagatgagccactcacccaactcccgggga

SEQ ID NO: 470 - DNA, 1700 bp, Homo sapiens
  misc_feature (1)..(1700): DMR3:55544001
ctgctgttggtcccagtgctcagccctcatccaatcaaccatggctggggcagggcagcatgggactaagcaaggctgcccaggcaggagaggctaccgatggggatgagagtgatgtgggcctttagatacctctgggcctgtctgggacgctccctattcccctcttcaagcacctaagtctaggcctccaagcttcaggtctcagcctcccaattagagttatactcctccttgagctccagggccctgctgcttgggttgggcaagtgttcgacagacagaaaagggctgtcctcccactcacacatgtggcccagtgatgggctactgggtttattaggcctcaacgacagcattttattagtgactgatgtgccatttggcctccattccttacctcccacccccagctctatcacatccaccctttgtctctggctggaaagaggccaaatccttctccacctaagaagttctccacctcccccaccccatatcagtgggggaggatgacggggcagtccttctaggaattgtcccctggggcattatttggtttcctctcacttaccagagtcacttaggataaatctgaattctgagttgtttgccaaatgctggatcctcgctggatactccttggattccttgaagaattcagcataatataaaacagcttaaagtcaagaagccccttctgagacccttaccaagggaggcaggaggagggacaaaatacaacaatcactatcattccacacaaccatatacaaatcatcatagcaatggatgctgcctgttacgtgcctgactccgtgctagggctgttacctcatcatatcctcaaacaacaaaggaagaattacatctcacaaagtgtaaattctttgccaaagggtcctgtgaccaatgtcagacaagagatttgacatccatatctttgctaaaggtgtctacttctgtggttatcattgtgacgtttccttcatgtaatgcaaaatagcccctactttccacatctactgaactgcaccttcatctgtattgtcagtcatcattttcctggctgtataagtgctttctccaaaagacttctctcccatctcatcaatcaccaaaccctgatgcttttattctttagaatatctctggaaaccagtgcccattctccatcctcactccaccacggccacatctctcttctagattcttgccatagtttgctaatagaactccctgcgtcaacatcctccagcccatccatactccaaactccaaatggcaaccagagagctccttctaagacgcaaatccaattacatgactccactggggagggatcagaaggatggagtggtaagaagcagtgagccaccaggacacgcagtgaacactgatgtcctactgcatttctgcagagcggcggaaggtgtgggctgctgtgcgtcggatcacgtgggaatgcatgggatcaggtagaatggatgggtcacaggagtgccaggcattgtaaatggggaagagttgaacatctcagtaactgaggaacaatttatcctttcagtgggactcttaggggtaatctgcttccattggagacactccaagaagcactcacagaaaacctctgccctccagtcaggagtttctgtgtgtgtcatatggagcagacagagtacaccaacactgcaaagaac

SEQ ID NO: 471 - DNA, 2700 bp, Homo sapiens
  misc_feature (1)..(2700): DMR3:55567401
ggtaccttatgggacatggaagtcctcataagtcatttggattgcatccaaataaaatgagattccactggagggtttttagggagagcttgatctgattttcatttcaaaaactggtccttctgagcgtatagagactacggtggaagcaggactcagctgggaggtgatggtggcctggagtgggtggtgaatggtgagatggtaagaaagggacagtggtgaggctgacaggaggtgagagaggagggagaggtgaggatgatgccaaggtttttcaggaggaggactgcatctggagtgagggtgagaaggcactgagaaggagatttcccagtggccaatggaagcaggatccggggccctgatcagggctttagagtcatcacccatgaagccagggggagggatgaggtcaccacggtgattagtgaagtaacagacagcagcctggaaaatttccttccggccttttctctcataactgttttatcactatctggtgagtttcactcctggtgatggcttccctctttgggcccttctaatctgtttccttttagaaggtggctgttttcagtggtttttcatttctttctctggactaattttattgctcataggcttctcttcagctgccttggcagggagatgctgtatattaaaatagttattattttattttatagctcagttgaatctatattctgctcattacaagtgtataggcctcactagccaagtacatttcataatggcaaactcttattgagacagaaatctcatgttctctcagtgtctcccaggaggttgccctctgaattgtgatgagtggtatgtgggcacgaggagcccacgggttggatcagtgctagttaaatcattgccctggttcaacttggccggggacccatgtggtctaagctcagagtgatgaggaggtagaagaggagtcatccagcaagcaatagttagcaggcatctcaaaattaatatgtccaaacctgagctccggaacatcatcatttggcttctcctgtaatcttccccattctggatggcggcagcctcactcttctggctgctcagcccaaaactctggagccatctttggctcctctttccttcatgttccacatccaatatttcagcaaatactattacctttcacttgaaaacccatccaaaatccaactgcttccctccatctccactgccatcaccttggtccaaaccatcaaacgtctgttttctgtattacttcaatagccttcctgcctttgcccccatcctgtttattctcacagagagaaatagccagagaaatcccattcagatgaagccagctcaggaccaacatctgccaccatcttctggtgacttccctcctcgttcacagtgaaagcaaaagccttcactgtgacccatgagaccctacacagtctgacctgctccccctctgacacgtccctgactgctctacctatcctcgctccactcatgtcacgtgtcatgaacacgtgctaggcacagtctcacctcaggggctttgcatgtgctcttctcactgccaggaaagccccgcccctagatatcaccaaaactcgctccctcaccttcttcaggccttcactcaaatatgacattctcacggaagcattcccttgggcctatacaaggaacttccaggtaatgtggttgagggggaggggctgcacattacctttgaacccacttcaaggaaatagcaccaaaactctagaagtcatcaccctcagggagaaagaatgcttatctataagaagcctagcacacaacagcttcccaacctatctgattaaacaaatacacatgaagaccgcatttggcggcaagaaaggattaaaaaaaactcctccaagattatcttgggctaaatctgaagaaggaatctgcactccttccattccgatggcatgtttaagttcagtggctgaaaaatctgcagaaccagttgggtccctatgccgaaggggcagggaagaggcatgcgctgctctgccaatggggaggaaaaaaatttaacgagggcaagataagagccagacgtgtggaaatatttctctttgaggatattctttgtaccaattactcttcaaagatatcatgttagcatttttggcacaacttgacaattaaattagacgaatcgttttcagtgtttttgcatttgatgtgcctgaaactcctcttaagctaaaatgttcagcctgtcacacacatttttttaaactttggcaagtcacatcaacactgatttcaattaagtcaagaatttaaaaacatttcactactcatctttttaaaaaattacatgacatataattaattgggtttgatgatcatttcgtggtgtccaaagtttggggatagaaagaaacacagtcaataaatttctattttggagatgacttcatttctattttttttttttttttttttgagacagagtttattactcaggctggagtgcagtggtgcaatctcagttcactgcaacctccacctcccgggttcaagcgatttctcctgcctcagcctcccaagtaactgagattacaggtgtgtaccaccatgcctggctagctttttgtatttttagtagagacgggattttatcatgttggccaggctggtcttgaacttttgatctcaagtgat

SEQ ID NO: 472 - DNA, 900 bp, Homo sapiens
  misc_feature (1)..(900): DMR3:56280801
agggaaagaacaatacttatattctaatagcatggcagctatgttaccctgaggaagttacaaattctctgtgcctcagtttccttatctttaaaaagagaataaatcctgaatgggattaaatttaaaatgagtgcttggcacttagttgagtgcccaacacaaagttaagtgctcaataaaggggagctaagtaagaacagcttatacacaacccattaagaatattttgataaatcataagaagttcttaagttgtccaaaaagctgtaacaaattgtaattccttccccagtcattttctaaatgtatcgaatacttcatttgctataggacattaaaagtatagaggacaggccgggcacggtggctcacgcctgtaatcccagcactttgggaggccgaggcgggcggatcacgaggtcaggagatcgagaccatcccggctaaaacggtgaaaccccgtctctactaaaaatacaaaaaattagccgggcgtagtggcgggcgcctgtagtcccagctacttgggaggctgaggcaggagaatggcgtgaacccgggaggcggagcttgcagtgagccgagatcccgccactgcactccagcctgggtgacagagcaagactccgtctcaaaaaaaaaaaaaaaaaaaaaaaagtatagaggacattatctctgcttacaatttgtgcacaattatgacaggatatatatcaataatgataaagaacagtgtgcaagctgctggtgatactaaagatgagtacaatgtgattcctgccctcagggaatgcacagtcttgagagaagacagattagatatagatacagatatagatatagacatatgtttctacatgtagactaacatttattgtgcacctactaagtgccgag

SEQ ID NO: 473 - DNA, 700 bp, Homo sapiens
  misc_feature (1)..(700): DMR3:58317201
ttgcaaccctgtggttaaggcttactttttttatttaacacttaatgccttgtgtgttatatattggtacgctctttttgagatgtgaccacttgttatcgaaggcttcctctcaggatgctctgtaaaatgctcctgcatcagctttgtttatcctgtaaaactgggcatgtttccccattgccctgtgcttcagtgtggtttctcccaatgccttaacctttttctttctcttctaggtttctccatttcttcttgcattatctggtaatagtagggaactagtattggattgaatgaatagtcttccattttggaaacgttcatccactctcatatttattttttggtgcctgcatgtttgaagactgaagcaggctaaaagctcttgatgaaatttgagggtgctgaagatgttcccactaatttccagccatcacctttggtggggtgggcttcggaggacagtctgtctgaacctgccagtgctgaccctgcagcactttcagcatatgcacatcaaagttggagaccgcgctgaacttaggagggccttcacacagactgatgtggctaccttctcagaattaacaggggatgtcaatcctttgcatttgaatgaagactttgcaaaacacaccaagtttggaaatacaattgtacatggagttttgatcaacggacttatctcagctctcct

SEQ ID NO: 474 - DNA, 500 bp, Homo sapiens
  misc_feature (1)..(500): DMR3:59701001
tttttgtattttcagtagagacggtttcgccatgttggtcaggctggtcttgccgtcctgacctcaggtgacccacccacctcagcctccgaaagtgctgggattataggcgtaagccaccgcgcccggccccccatctgatcaatttctgcctgtttcaccatcactcgcacgagcccagttttagatatcttgccgtttttcatttatttctatttaacctcaatctcttcagctgcagaattaaaacctccatataaagcatgattttcagcgcagggtgggttaagtgaaaggaatcccatgtttagggtcctacctcgcacctgagccccagttttctggtttgtgaagtggtaatggtcatttcctatagcccacctacgacctcacagggaaggggagagaatgagtgttcttgaaggttctctacaaactgttgactgggatgtgtctgtgcagagaaaatctgatccatctctaagaacaacagtaaacat

SEQ ID NO: 475 - DNA, 800 bp, Homo sapiens
  misc_feature (1)..(800): DMR3:60963801
tattataatttctattcttttacatttgcaaaggagtgctttacttccgactatgtggtcagttttggaataagtgcgatgtggtgctgagaagaatgtatcttctgttgatttggggtggagagttctgtagatgtctattaggtccacctgctgcagagctgagttcaattcctggatatcattgttaactttctgtctcattgatctgtctaatgttgccagtggagtgttaaagtctcccattattatcgtgtgggagtctaagtctctttgtaggtctctaagggcttgctttatgaatctgggtgctcctgtattgggtgcatatatatttaggatagttagctcttcttgttgaattgatccctttaccattatgtaatggccttctttgtctcttttcatctttgttggtttaaagtctgttttgttagagactaggattgcaacccctgcttgtttttttttttccatttgcttggtagatcttcctccatccctttagtttgagcctatgtgtgtctctgcaggtgagatgggtctcctgaatacagcacactgatgggtcttgactctttatccaatttgccagtctgtgtcttttaattggagcatttagtccatttacatttaaggttaatattattatgtgtgaatttgatcctgtcattttgatgttagctggttatttcgcccattagttggtgcagtttcttcctagcatcaatggtgtttacaatttggcatgtttttgcagtggctgttactggttgttcctttccatgtttaatgcttcc

SEQ ID NO: 476 - DNA, 2300 bp, Homo sapiens
  misc_feature (1)..(2300): DMR3:61199101
tgaataagttgtccgcagtccaacagctagtaaaagccaaatcatgactaaacccatgtctgattccagagtaccaattcaacaaaagattttcattgagaataaagaaaatggactgtgcctgtgtggaaacattccccaagaggaaaggaagcaccatatctgtgccaaaagattacaaagttgttaagatggctacatcaccaccaaatccaattattcatgagcatttatttctaaaagctatcaagtatttctttattccaagatgtggctcaatggtccagagacatgtagttgtatggccaaaaataagaattatctactgcttaagatagtaatttcttcactgatgttcaacaattatggcaaaattccaagccaaccagttttcatgcaccagagtttagttgccccaaagcaaatcctaagaaaagaggatttttttataactcatatttttattatctaaaaggggttttctccaatatccctgtaaaattcttctttgccctccaaataaacatgaaaaattcagccccagaaatagatttgtcaagaagttaggaagaacttaaagtacatggtaaatcaaaatggcttttcaactttaactaaagtggtcatagtaataattgctgcaataaaaatgacagaaaaaaaccctaaaagtatcaaaaatgtaatttatgatgaaaacaaatgtaaaattatagcatatttcaccctggccaccaaagactcttgatgaaaccgcagccctataattgcccagaatgaattctttaaattaaaatacttcatgcagaacagaaattaaacaatgaatcaaagaacaaagctgtacagaggtatgctcataaatatacctagcaaagaggaaacaattacatttttccatgtaaaaaccaacttgattgtaatgtttcacaagagaccgagtaggtacttttcccattgcttcaagcttggaagttcatttcctgtaattcatttagggctcagagtgactgggtggaatgaaattagatacaccaaattcagtggctcttttctttctacaaaactggctcttccatgcaactgcacaactgactttcacaataaatttcattcaacccaattgaaatgccactctgcattttattttaaatgctttatttggccagctagttttatttaactattggccagaagtggtacaagtgcattctttttccatctagcattaatcttagtaaacttagctccattggaatgtcttagctgctgagaagaaagcaaaagtcagcaagcatacaattgcatttgtctactctcaacacatcattttatttcctcctgctctctgctaactattgctcagcacttttgcctaagagggaggacaagcaggtggttaaggaagttgtcctgtcagctatatctttagtccaagtgtttaaatctctgaataaaagaaaaatcaatgttgtaaaggcaatgtttgtcaaggccatgtaataaatacacttacctttacagactgttctcagtggatttctcttctttcctgagcttcaaagctacaaagacataaaaatgaaagacagagttgtctgtgagtacaacaacaaacattttctccccatgtctctaaatagaatttccatatgccatggtatatggtgctagccaaataaaccattgataaaacttgtgcctcatacctcccgcacaagaggccaaaaaaagacagtcagaaactgaaaatggtgcacacatctacccagaattgaagcacacaaaccttggccaaatctacagtcaaatcttttggagtgtgtactcctcaacagaatgggaacggcttatagcgagatgaaaatcaaattaaacatgagtgtgacatactcagtctgactaagcattttattttcttatttctttttgtcatctttcttgcatgctctatttccatttctctgaaaaagtttcacttagggatgcctattccatttatatgacatgcatggtccttctaatataaacctcaccacttgctccgtaagtatatgtgtgcatgattacagggacaatcacccttcctgtatgtagactgcagccttctctcggaagaaactcacaaaacagaggaagccacaacttgacatttcaaatcaaatcttgttaacttcagctctctgtgatcaaaacataaatactatgcactgaccacacacaaatcaatgtgacaaaagatctgcaaaagcaacagtaataacttacagtatcgtgaagctggttctttaatcatccaa

SEQ ID NO: 477 - DNA, 1200 bp, Homo sapiens
  misc_feature (1)..(1200): DMR3:65314301
tcacttctgttctctaattcatggtttctcaagttagtgggtcccctaacaaaccctctacaacataaaccacaattgacgtttaattttggtggttgaaaaacagttcgtgtcaaggtttgatttaaaaataagtcatcctctgacacaaattacattcctaatgtaatgtgatggacacattaaaagaaggctttccagtaaattccttagagtttccgtcagctcagcatacaggagagattgaatatctgctcaaagcatatgtttatcagggacatatgcactaacacgtgagttattttttcaaacaagattttaaaatccaagtatttttatgttacaagacattaaaggcactgatcattcaccatatgaattacagccgtgtactgtatggggaaccagtgggtaattctttgcacatcaaaagatgttgtctctaaacgtaccaccctccctctcggtgttaatgctggccttggctgatccctcatgaaagactagtataatgtctttttaaatgacttttttttttgacttatgtaacattcacaaactaggtattcaggaaaaaaaaaaaaaccttagcaagtttttgggaagagatgaaagcatgttctgttttaaatgttcatctaatccttcatagagggataaaataaacacgttttcaaaagttcagcaaaatttttcagaagttcaacaaaaaattcctggaaagctaagaagtgtcagttcctttcagcccagcagcactgtcccagacaatgtttaacacaggtggcacaaggccagtagtaatgtcctttctgaatcatttaatttttacccaggaagtaattcatctagcaagctcttgcctctttaatcacccaccagcccctacctggccctatcatgatgataaaatgcattgctggcatcctactatcagccaacagataggagcacccctgggtgctcactggtttgaaaactctgtgcctttcatactgcctgtctcttatgtttgtctgtccatattcccaacaatctgactgtcttagttcattcagacagccataacaaaatgccttagaccggatcatttataaacaatagaaatgtactgctcacagttctggaggctggaaattccaagatcaagataacagcagattctgtgtctggtgagggccccattcctcacagatggtg

SEQ ID NO: 478 - DNA, 700 bp, Homo sapiens
  misc_feature (1)..(700): DMR3:68059901
aatctattcctgggaggcagctggggagcccccgcaggcttgttcctggcctcctcctctgggggctagaggagccagctaagcacacggcattctttaggctgaagtgagaatttactcctgaatgctaaaggggcttgctccatgtataatcaaggcttactgaaggaaaaaaaaaacacacacacacgcacaaaaaactgggaaggaaaatttatttttgatgcctccatatttttctctgacttatgtgcctcatcacctcaaaagtccaccattgcaactgtgtgtgtgtgtgtgtgtttgtgtgtgtgtgtgtgtgtctttcagaatctcctttttccctctggggatgtcaacttcctaaattgccagtgccctcacaatttttcacaatccctgtcttcctcagccttctcctgtggcaccacctccacacagcagcttcaattacatggtttccatgggtagaaacaagcaaaggcagacactggccataaaactgactgatgcaacttcaagttagcctggggcagatatttttaaagaacattgttttaggccataacactttaccttgacggagtgaaactaggccggtagaatttcaggcagagaagcggacaggtgtgtggactattctagaccagcaaatgagatggtgggtccttctccagaaatccttgcatcatgtttttac

SEQ ID NO: 479 - DNA, 500 bp, Homo sapiens
  misc_feature (1)..(500): DMR3:68191801
ctgattttcactgtgggtaattctggaggcctgattgatatagttattatctaagacgtgatttggtggtgttttcgtaaactcttcaatgtcactcaatcacttcaacgtcattcaatcaatgttgaataaattattcactttctttgcttcaaccattcttaggtgagttctaagtataggatctctttctatattcttggtttatctgcttttgctttggtttccctttcctttctaaagtcccgcctacatatatcatcagctttagttcctaagtgcttcttgtcttttcagctataagagcactattcgctctagtccaacaactatttactgagtaactactaggtaccagatccaggtgctgtaagggaccgagtgatacagcttttgctctcatggagattatgacaattaaaactaaacaggagtgattaaaattatgataaatgaggtcttttcccctctcttgccctgtaattctctccaaaatgatg

SEQ ID NO: 480 - DNA, 1100 bp, Homo sapiens
  misc_feature (1)..(1100): DMR3:73228201
gctctctctctctctctctctctctctcgctccctctcctctttaaatcccagatacctccctaccgctgcacgtgttcacttatgtttcattggtggaacagaatcagacgactgtccctagttgcaaggaaggttgggcaagtgagtatctagcattttccatttctcttgtgggaagtggatgctgcctatagggcagaagggagaagtgccaggctgctgtgttgataatcagcagtgtcagccatagctagagttttgaaactgaaaagacttaatgaccactgctttaccctgtagtcttacgaaaaactggcaccagaagagaatcaatgacctgcccacacagcttggtgtcagatccaaagtctgagtctacatgtctacattttttgactcacgacatagaactgaggttgactatgactaacatttgacttgcatattacagctggcatagtgagggctttgttcagcatgtattagcttgcttaatttttgcctttggcgctgcggggcctgcaggcttctcagagcagagggtgcatctgctgcagcttcccatgtctcctgctgaaaggtagccaatcatttcttcctaattagcgatcaaacatgatttcagatagtccttctcctaagatgccatgggagatgttccttgtatctgtcagtggcactgatcacgttgtcatttttggcaactaattcccggaatgaataataaaattataataatcttgtaccagagggagggtgaccaatttgtaaactccattaagaatcgagcaaaggattgtcctctaatgagatagatagcatcagggagaccattcatcaagcctctctgtcacagatgcacaaagggaccctggagggaggggctcctggaattcgggcagacgagggcgggttgtcttggatgtgcatttccatattgtcattgatcagctgccggagaaggaatgacaagcagaacaccagagttctccattgtaaggctccgggtgtgtttatgccacccttgattcattccccacagggtgagaagcattactcactattttctcatgtgccagaaagagaaatggaatcaac

SEQ ID NO: 481 - DNA, 1000 bp, Homo sapiens
  misc_feature (1)..(1000): DMR3:74209701
tgcaagtacaattgggcctcatgagggatgggaattagaaaatggaaagccttcagaaaacaaagtagttatattattggactcttcctctttcctcaaggcatcctagtcaactcttctgcttctctgaagacctgctttattatcttcccttgactgacattctttgtttctgggtacacattgaagatgttgaatacccctgtatacccaggttcacatgttctcacttccagcaatcaggaggactgactagcaattctgatttcaaaaatgacaagtatattactggtttaccttgagtcaagtatcaaccctggttcaataaatggtgaccatggggactaggtcacaaagttagtgccagctccagtgattggggctgggaggtcagggtctggacaattaccccacacaaaattattttcttgtttttgcgcttgtatgcttttctgaattgtttaatgtgaacacattcctcgtttgtactaatgtaaaataagacgttatcaaaaataaatttgtcttttaggttgagagaagcaatgaagataccaaatgagcctacctatgcaaataacagaaccatgggttagttatatcctgctaaaaatatcatttgaggtagagaatactctagctgggaactcaatacaaatattcgtgcatcactatgctctctacccctatatgttttattgaagatcctcaagtcgtagtagattatctattgggagaaggaaagctcagatttggggcccaagcgtgcaaaggaacatattgggaggattgggaaccccagcttcatttgttacccaagaaaagacaggtaagggaaacagaggaagcatgatgtgatgtaactttcactacactccaggagatgagtggagaggagtatgacccaccgttaggaagtcactcacacccactgatttttaattatgtaaaatgaatcaagttgaaccagacatcatctatagctcttaaaaaaaacaca

SEQ ID NO: 482 - DNA, 2000 bp, Homo sapiens
  misc_feature (1)..(2000): DMR3:75279301
gcttcggctcatgcatggtgcgcgcacccaatgacctgcgcccactgtctggtactccgtagtgagatgaacccggtacctcagatggaaatgcagaaatcaccgtcttctgcatcactcacgctgggggctgtagactggagctgttcctattcggccatcttggctccaaaatttgtgtgttaatttttatttgatgctttttgtcattgtgtttattacttctttggatattagttaacattttttgaagacttactgtaagggagctgcctatttaattatcttatttaattttcttaactatctattataattatcccaattttagagatgagaaaacttaggcacagaggtattaattaacttgagtaaggtcacacagctaggtgtgccagagctgaaatttgaatatgggcagtctgtctctagagtctgtactgttaaccaagatattctactgccaccattgtaacgtttgccaatatgactattataggtaccaaaaaatcctatctcaaacccacatagtatatccaaatacaaagtcatcttgtaatgtatgtctacacattgagacttcttgacaaatatagtaactagcggtttcaccttgcagaaattattaaattgtttttgctcctttttcttcaactctaaaatggttataataatagttatttaccttgttggggctcagaaaccaatacctcaaaatatgctgctctggcatgccaaagtaaagaagcacctttaaggtctccctctgactttcctctgccttcctgtttctctgatccttttgattttccaaaaggggctttctctgaaatttccctatttgtctgaggaaacttcttgtaaattaaaggaaattatcttaaaaccctcttcttaggaatctcatcaaataaccagtaaggattaacactggagaagaggagaaactggaaattgtaaccacatgcagacagacttttcatctattcttccaagggcagttgtgagaaattacttggggaaccgtacttgcataataagacagcccttgttcacaatgcagttctgccccacacccttctctaacttgtccacaagctattgtttgttctttggttccattcagcatccaaagagaatcttttgtaaatcattatcttgtccttgggtctgttcattcactttcctctctccaatgaagaggatatttaagcatcattcatctggcccttttttgagttttgaatattttttgtgtgactcctatgcacatgataaatttgttatgcttgtctcttatcttatcttttgttataggagttttggccatgaccctttatgaggagaaaagggatcaccccctttttgcctctacaaccttatagatatttaaatatcttttatggcatagtcaatgtatgtgtggggaataaaagctgcctttgatataagcttagtccagacatgatcaggaaaggaaatctgccatgaagaaaatcctgtatggaaggcattttcaggacagtgaaagatgggttcagagaagcagggctaccagcagagacactcctcaaatgctagcagaaaaaaacactaacaaatgcctgactgcagaagaatcctgggagcctggacttgcctctcattctgaattgcatttattctgggaactaagcagagtgctgtgtcaatctgctatgagggaggcagaattataaatagaatatgtgctagaaatagaaaatgagatgaaagatggcattttggggctttcacggcttcccccagcccccccacctccttcagcagagggaaaaaagtcatccagttttggtgaaggcaaaaaattcagaagccatcattccaagagcagtggaagggaggaagtagaaagtatgaaagtggtgaaaagtatagaagtgggaagagttgagtgagatgtgggagggtaagctggcctcctgggcagatgagaggaaaccaaagagaaaagcccaggg

SEQ ID NO: 483 - DNA, 900 bp, Homo sapiens
  misc_feature (1)..(900): DMR3:75658101
cgtgggaacccggagattcgcttgggggtgggagggagaagccgtcagagagggggctgagctggggaagcagagaggggctccggggacagccgggaggagagagggtcgtgtcggaggtggggagagagaatgggctagaaaaggaggaagggtgagagtgggcaacaggacggcttcccggcgcggcagggaactttgctgaaactgcgggccccagggaacagcgcgggcagggtgggagggagtagagaggacccagcacaccccaaggtcagtgtggagaaagggacatttcccggttccttcgcctctgcccagggttctgcgggcatggcccacccccccaggggcaggggaggaggtggctcccggcaggctcggagaactaaggggcgcacacccgcttctcagggccggggtgacaggggaagcctgagatggctgcggatctcgctggcccagtgggtgggcgcgggggacgcgggaggggccgagctcaccgggccagcgccggggcctgcaggtggccctggaggaatcttcaagcacccgcccgtgcagcgggccttccgggagaccagtgtggacagcgccctggacacgcccttcccagctggaacatttgtgaggctggaatttaagctccggcagacagagaagcggccggaggaaagactggaagaaacccaagtgcaaagtccagcccgagaggaggaagcagaaatgcctgacctgcgtcaaactggaatgtgaggataaggttctgggcaggatggtcgctgccctccagaggcgcagactcggcgggagcctgaggagcaccaggaggccgggtgcagccgggcggggcgggcggtgaggaccccacagctgctgcttccctgcacagttcgcctt

SEQ ID NO: 484 - DNA, 900 bp, Homo sapiens
  misc_feature (1)..(900): DMR3:78481101
tgggcaccacttcgttgccctcttctagatgcaggtgcccgcagtggaagttgcagccactcatggagttggcacctgtgccggtgcctggaactgcccgtcttactgcagcagctggcatgcctggctgtgcgcagtggccagaccgttcgcccacacacccctcgccattccatgcctggcttgcccttggcaggtgtgggatctgggccagtggtgtgaagcaagtgcagcctgccaggcagagtgggcagaacgagcccagcgggcgtgaacagtactcaggcagaggttgccactggccacagaggttttcagctggccaagcatcactccaaggatcctgtgacaaaattaaatgtaacacatatctcactatgatctgtaaagtcaataccccaaataaactgatgaaattagatttacagtttttacattctgtaaaacaaatacttcaacgctgaattatttaacaattacgtatttctatagatgaattttgaagcactccaccagaaagtgaaaaccaaagtataaactgaaacacaaacaaaatctaaataattacctctgaattctttgtatgtgtattctatttttagagacattgtaaaagactacacttggtgaaggaagagaaagcagttttttctcctatatcatttatactttttgtgttacaaagaaagaaaaccaaacgatgtgaatttttattggcttaaacgtgtgaaattttagaggaagcacaggtctttgagcgtggcctcgcagcccaacaatattaccgcagaacaagttctctctgatccttcatcttgcttttcatgggtcttgccttttcctcaggctctgtaaggtgcctgttccccaaaactcgaggcacaaccctgatttgaatca

SEQ ID NO: 485 - DNA, 100 bp, Homo sapiens
  misc_feature (1)..(100): DMR3:78658301
tatcattagagatggagtcttgctctgtggctcaggctgcagtgtagtggtgcaatcttggctcactgcagcctccacctcccgggttccagtgattctc

SEQ ID NO: 486 - DNA, 1100 bp, Homo sapiens
  misc_feature (1)..(1100): DMR3:81970301
ccttggtaattctaatgtaaaaatagtagcacaaaaattctttgttgaatttaatgaaggaaacactgtttcctctatattccacaagaattattgtcctaaaaggcctcccatgggctttgattaagaggtaagaatttcaaactcaggagagaggatagtggtaatggtggtggatgctctgtatagcgaaatctttagtaggaagccctctcaagcacagggatcactaatgtaaaaagtgtaaattaagcttttatgtcatgttcagggacaatgtgacctaagtaacagtgatagtcatttcactgcaagcacttgaagtccatgagatctgatatcagtatgtgtgatcataaagaatagaaaaatattgatacaggcatacctcattttattgtagttcatttgattgtacttcacaaatactgcattttttagaaattgaagatttgtggtaatcctgaattaagaaagtctattggcaccattttcccaacagtatgtggtcactttttttccatgtgtcatgtgttggtaattcttataatgcttcaaacttttcattattatgatatctgttatgataatctgtggtcagtgatcttcgacgtgacttttaaaattcttttagggcttcatgaaccatacttgtgtaagatggcacacttaatcaacaattgctttatgtgttctgactgctccaccggctggctgttcccccatctcccatcctcttctcaggcctctgtattctctgagacacaatagttttgaaatcagaataattaacaatctaacaatagccccgaaaagtgctcaagtgaaagaaagtgtcacacatctctcactttaaataaaaaggtagaaatgaataagcttagtgaggaaggcatgccaaaaactgagatgggccaaaagctgagctccttgtgtcaaacagttacatacgttgtgaatgcaaaggaaaagttcttgaaggaagtcaaaagtgctactccagtgaacatacaaatgataagaaagacaaacagccttattgctaatatggagaaagttttagcagtctggaagatagaagatcaagctagccacagtat

SEQ ID NO: 487 - DNA, 300 bp, Homo sapiens
  misc_feature (1)..(300): DMR3:85518101
ggttcaagcaattctcctgcctggagactacaggtgcgcaccaccatacctgcctaagtttcatatttttagtagagatgggttttcgccatgttagccaggctggtctcaaactcttggcttctagggatcctcccacctcagtctcccaaagtgctcggattacaggcatgggccaccacgtctagcctcagctgtttttctgaaactaagaatcaactttggtttccaataacatgttcttcatttctttctcagacttcaacaaaagcatctttaacattcatattcttaccaaca

SEQ ID NO: 488 - DNA, 600 bp, Homo sapiens
  misc_feature (1)..(600): DMR3:85782301
tttaactcttttgtaaacaggaaatatatctactctgctataatgaatgaaggaaatatatagtttcagaggctaagaaatacactccatttcttgccgagtgagatggctcatgcctataatctcagcactttgggaggctgaggcgggcggatcacgaggtcaggagatcgagaccatcctggctaacacagtgaaaccccatctctactaaaaatacaaaaattagcctgtagtcccagctactttggaggctgaggcaggagaatcgcttgaacccaggaggtggaggtttcagtgagccaagatcgtgccactgtactccagcctgggcgacagaatgagactcagtctcaaaaaaaaaaaagaaaaaaaaaagaaaaaagaaatatactccatttctttcgaatctttctttctctccttaaattaatgtattgcttagaggagaaaacttgcttagaaacaatacagaactttagaatactgaatttggatacaggtaataaaaccaagtcttagaaaagtgatagccactcccctgtgtcaacgtaatcgagggtagggagattaaagaagagagaaggaacagctacattt

SEQ ID NO: 489 - DNA, 100 bp, Homo sapiens
  misc_feature (1)..(100): DMR3:86209301
acatactaaccaaataaatatggatgacgttatctctatggcaaccctaaaaaatcatttttggtatactagtgctatagcagacttgttataattcaat

SEQ ID NO: 490 - DNA, 400 bp, Homo sapiens
  misc_feature (1)..(400): DMR3:86212201
aaattgagttggaaatgcctttctactggttctcctgacatgctgttcatgtcagtcatggagatgctgtgttttctagtgtcagcatgcaaaggggaggttcatgtgttccttgattgattaccctcgcagattcagcagttgacattgttgttgcatcaacagttgcaggaatgatagtagtttctgtttatctaaattgaagttaagggaattgaacgatgagaacacatggacacaggaaggggaacatcacatactggggcctgttgtgggatagggggagcggggagggaaagcattaggagacatacctaatgtaaatgatgagttaatgggtgcagcacacaaacatggcacatgtatacatatgtaacaaacctgcatgttgtgcacaggt

SEQ ID NO: 491 - DNA, 1300 bp, Homo sapiens
  misc_feature (1)..(1300): DMR3:87183701
ggcctcaacaaaggacttaaaatatttaataaaccctgctctagaaagatgctctgccatccaggctttgttgttccatttacagagcacaggcagagtagatttaggataagttttaaggtcctcgggattctcaaaatggtaaatgagcattgacttcaccttaaagtcaccagctttactaaccccaacaaaagagtaagcgtgtgcttgaagcttcgcagccaggcaatgacctcctccctagccctgaaagtgttagatggcattttcttccatcttaagcttctttcatccacattcaaaacctgttgctggccagaaactttgggatgccaaaaagggagaattgcttgagctcagaaattcaagaccagcctaagtaagacgaagagatcctatctctacaatttttttttaattagcccagtgtggtaatgtgtacctgtagccccagctattcgggaggctgaggcaggaggatccctggaactcagcagtttgaagctgcagtgagctatgatcacgccactgtactctagcctgggctacagagcaagactgtgtcttaaagaaaatcaaaatacaaataatctgtagtttagtgtagccaccttcatcaatgatcttagctagatcttctgtataatgtgccacagtttctacattagcatttgctgcttcaccttgcaatattatgttatagagaaggtttctttccttaaacctcatgaaccaacctctgctagctcccagctttcttcctgcaacttctttacttctctcagccttcacagaacttcatagaacatgaagaaagttagagccttgttctggattaggcttgtcttaagcaaatggtgtggctcgtttgatcttctgtcgagatcactaaaactttctccatgttagtaataggctgttttgcatttttatcattcaagtgttctctggagcagcatgtttaattctcttcaagaacttttcttttgcattcacaacttctctaaatacttagtacaagaggcttagcttttagcctgtcttgacttttaacatgccttcctcactaagcttaatcatttctagcttttgatttcaagtgagacaggtgctactcttcctttcatttgaacacatagaggccattgtaaggtaattaagcagcctaatttcaatacagttgtgtctcagagaatatggagacctgaggagaagaagagaaataggggaccacttgttggtggagcactcagaacacacaatatttatcaattaagttagacatcttatatgggtg

SEQ ID NO: 492 - DNA, 1700 bp, Homo sapiens
  misc_feature (1)..(1700): DMR3:88009101
ctgatcattagagaaatgcaaattaaaaccacgatgagataccatctcacaccagtcagaataactattattaaaaagtcaaaaaataacagatactatcaaggttgcagagaaaagggaactcttatacactgttgctggggggtgtaaactagttcaaccattgtggaaagtagtgtggcagtttctcaaagagctaaaaacagaactaccatttgacccagcaatcacttaaatagtgtctaagttcattcacttagatagtgtctgtggctgctttcacattataacagaagagtaggatttagaaggaaattggcactagatgccaatattggatataaaaacaccactaaagcagtacttagaggaaaatctatactactaagtgccattattaaaaaaagagaaagggcggagcgcagtggctcacgcctgtaatcccagctctttgggaggccaagatgggtggatcacttgaggtcagagtttgagaccagcctggccaacatggtgaaactccatctctactaaaaatagaaaaattagtcgatcgtggcagcaggcacccaaaatcccagctactcgggaggctgaagcagaagaatggcctgaacccaggaggcggaggttgcagtgagccgagattgtgccattggactccaacccgggcgacagagtgaacgtgactgtctcaaaaaaaaaaaaaaaaaagaaaaagaaagaaaaagaaaagcatcttgaataaacgatttcagcttgcactttaggagtagtataatttgacacagcctctagggcccacaaagcctaaagcctaaaatatttactatcttctctttaaaaaaaagtttactgatgcatgatatagaatattagaatttgacctaatagatatttatagagtatgccatccaacaatagcataatgcacattctttttaagtgcacatggaacacttatcaagagtgactgtattctgagccataaaacaagtctcaattcaaacggattaaatccacacaaaatgtgttcactagtcatgataaaatctaatatcaaaaagttatctggaatattctcaaacatgtggaaactaattgatacaactctaaataacttagaagttaaagaagaaaactaaagagaagtcagaaattattttgtattgaatgtgaaaacagaacatatcaaattttggggaaatgccagtaaagtattacttaagaggaaatttattataagagccagtattaaagagaaaaaggtctcaaataaattactttagcttccaccttaagaaactattttaaaagattaaattaattcaaagtaatagaagaaaggaaatcataaataccagagcacaaactaatgacataagaaagagaaacatcaatgaaaccagaagttggttatttcagaagatcaataaacttgataaaccgctagccagatagatcatgaaaaagagagaagatacagtgagagaggggacctcataaaagaatctacagttactaaagaataataaggaaatacgaacaactttatgcctataaatttacaccttagatgaagtgaaaaaaaaatcttgaaagacagaaactaccaaagctcactcaagaagaaatacacaacctaataaccctatatctattaataaatttgaatctatagtttaaaatcttcccataaa

SEQ ID NO: 493 - DNA, 300 bp, Homo sapiens
  misc_feature (1)..(300): DMR3:88574101
aaaaatctctaacaatctttcgttttatctatagagcacccgctgtcccaaatgatgccaaactgactgacagcaggtagtttttaagaaaaaccagctccttttctcccttgggcttctgtgcctttactgagcccttggcgtgggattgtacagcgggaaaagtcaatagcgcctgctgtcaacacaatgtgtctatgtgcattttttaagtctctgccttcttgaagttcagttgtcaggaacctcgcttttaaatagatttcagtgtcaatatgtgctgcttcccactaatgctaa

SEQ ID NO: 494 - DNA, 2400 bp, Homo sapiens
  misc_feature (1)..(2400): DMR3:89851701
ggcgttaaaagacatagaatctgcaggggaaaatgagttcactttggcttcaatattatgttcatagggaaaattgaataccatacaaagctgtggtggtaaattagatccagacttcacaggactcggtatgtcataacctttgtttacatgagatgaactcagttttgtttttgtttttggatttctttttttgttcaaacacttatttattttacatttcatgtgccttgtagttactttgaaaaaaataaaaaaattgaagtattttctttaattctgctagcttttggtacatttgtatggtaactatttttgttaaaagtaagtatatgtaacatgttttatcactctgtcattggaaatttgagccagtcgctgtgctacgaggccctctaaataattaagacataactagagggctgtgattcagtaaatcatggtgctagcccagggattggaaagggcctcgggtttctaacccccagcccgctaatgaatcccctctacaacatcgccaccaagtggccatagaacccctacgggaggcgctggactgggttagagaatgctttgctctgcaagtaaaaccatagtgagttagactttaaaggtaatcaacaaaaagtagtgtgtttaatttaaaacgcgtgtcagtatttatcattaaggtccccaattcttagggaaaatccatttctttttttaacagaacttgaggaatagaattgaaacagatatttcctaaccttaacaatattcatttttaaatgtttctttccacacatagtcttctggacagaggataagtaaaagaagccaagggttcatgaatatgaacagagatacagcaaaaagaaagcaggaaaaaagagaaaagaaatggacaacacactaaaaatggcttagtgggctgctatttgccttaggtttttatttttatttaaaggatgaacacaacattactttaaaaacatttattagtattacaggtagtgttagatcagctagtgtttccatcaacccatgcagtaaacacttggaagtataaacatataacacctggcaacatataagcagaatttgaaatgagtggaaaggaatgatgacaaataacgaggtatgggccgcttgttcctaaatatacagagttggcttattttgccaactcaatgttcgggacgtaattttattaagttgatgctacagatacttatcgttctcataaagcaactacaataacaaaaacaaaagtaaataaaatagccaacactgagccaaaaccaaactttctttttgtgaagaagaaaatataaattatttaccctatgagaacaacaggtaacagtatttattccccatctcagtaaggacagaattatttgtgggtaaaaaaataatgttacctctggaaatttgcagctatagatatgtattttctaaattagtttcactgttacagggcaaatcatcaaaccatcagcagtataaaatgtggcaccaagatatttcatgtccagacactattgccaaaattctactctttcatccctcttaatatatttgttcctttatatattttttatactgtgctttgttccagagtgacacacacacaaatacacacatgtatacatacataatacacacacttaaaaaattgagtgtatagttgagtgacttaggttgaagagaaaataaaaaaaagaaaattataaaaccaggcccaataagccataccaggtggtccagtgaagtcgctaaaagtgatgaccattagatgagactaaaaataggctctaaaacctttcttctcagactcacaggaccataattatcatcatttcaaaactgttcatcacactgactgtgtttccactctttgtgaccaccattcgatgtcattagagtctttgtttgtcaagatgattggatgttgctcttgggtgtccctgctgatgaggaatgtcagtatagcttttaggactgggtgtaggagggtggcctaaaatgattgactcattttactctttggtactatgtaaagaacgcatatcctgaaattggcttccctcctagaacccacactttatgtgtctgaaggtattgcaaacagagtaattgcacaaaattcagctcagaaccccaagcttttaccaatgggcctgaaaacatttcttcttcctttgctggagatgggatctttgtttttatatctgttaggctttactcctttttttttttttttttagacgaagtctcgctcttgtcccccaggctcttgtctcgagtgcaatggtgcaatcttggctcactgcaacctccacctcccaggttcaagcctttattcttaatattgctacataactaaaaagaggtttttttctttttttttttttt

SEQ ID NO: 495 - DNA, 200 bp, Homo sapiens
  misc_feature (1)..(200): DMR3:91693901
atttcttcgtgtaatgatagacaatagaattctcagtgaatttttttctgtgtgtgtgtattcaactcacagggttgaaccttcctttagacagtgcagatttgaaacacttgtctgtggaatttgcaaggggagatttcaagcactttgaggccattggtggaaaaggaaatatcttcgtataaaaactagacagaatc

SEQ ID NO: 496 - DNA, 1900 bp, Homo sapiens
  misc_feature (1)..(1900): DMR3:92182701
actttgagtgctttgaagcctacggttgacaacgaaatatcttcatgtaaaaactacaaagaatcattcgcagaaaccacgttgtgatctctgcagtcaactcacagagttcaacctttcttcctatagagcagttatgaaacagtctctttgtagaatttgcaagggtgtatttagagggcattgaagcctacggtagaaaaggaaatatcttaccataaaatctagtcagaagcattctcagaaactgagttgtgatgtttgcattcaactcacagagttcaacattccttttaatggagcggttttgaaacactctttttgcagaatctgcaagtggatatttggacctctttgaggccttcgttggaaacgggatttcttcatgtaatgccagacagaagaattctcagtgaattctttctgtgtgtgtgtattcaactcacagagttgaacgttcctttagacagagtagattggaaacactctttttgtggaattttcaggtggaggtatcaagcgctttgaggccaatgatagaaaaggaaataccttcgtataataattagacggaatcattctcagaaaccgctttgcaatgtgtgcgttcaactcacagtgtttaacctttcttttcatacagttgtttcgaaacactctttttgcagaatctgcaagtggatatttggacctctttgaagtcttcgttggaaatgggatttcttcatataatgctagacagaagacttctcagtaactgctttttctggtgtgtattcaactctcagagttgaactttcctttagaaacagcagatttgaaactctctttttgtggaatttgcaagtggagatttcagagctttgaggccaatggtagaaaaggaaatatcttcgtatgcaaactagacagaatcattctcagaaactactttggtacgtgtgtgttcaactcacagtgtttaacctttcttttcatagagcagtttggaaacactcagtttgtaaagtcagcaactggatatttggatgtatttgaggccttcgttggaaacgggatttcttcatataatgctagacagaagaattctcagtaacttctttgggttgtgggtattcaagtcacagagttgaagcttcctttaggcggagcagattggaaacactttttgtggaattttcagggggagacttcaagcgctttgaagtgaatggtaggaaaggaaatatcttcgtataaaaactagacggagtcattctcagaaactactttgtgatgtttgcgttcaactcacagagtttaacgtttcttttcatagagcagtttggaaacactctttttgcagaatctgcaagtggatatttggacctctttgtggccttcgttggaaacgggatttttcatataatgctagacagaagaattctcagtaacttctttttgtggtgtgtattcaactcacagagttgaaccttcctttagacagagcagatttgaaactctctttttgtggaatttgcaagtggagatttcaagcgctttgaggccaacggcagaaaaggaaatatcttcgtagaaaaaatagacggaatcattctcagaaactgctttgggatgtgtgcattgaactcacagtgtttaacacttcttttcatagagcactttggaaacactcaggttgtaatgtctgcagctggatatttggacctctttgaggccttcgtagtaaacgggatttcttcgtgtaatgatagacaatagaattctcagtgaatttttttctgtgtgtgtgtattcaactcacagggttgaaccttcctttagacagtgcagatttgagacacttgtctgtggaatttgcaaggggagatttcaagcactttgaggccattggtggaaa

SEQ ID NO: 497 - DNA, 1500 bp, Homo sapiens
  misc_feature (1)..(1500): DMR3:92286501
gcgctttgaagtgaatggtaggaaaggatatatcttcgtataaaaactagacggagtcattctcagaaactactttgtgatgtttgcgttcaactcacagagtttaacgtctcttttcatagagcagtttggaaacactctttttgcagaatctgcaagtggatatttggacctctttgtggccttcgttggaaacgggatttttcatataatgctagacagaagaattctcagtaacttctttttgtggtgtgtattcaactcacagagttgaaccttcctttagacagagcagatttgaaactctctttttgtggaatttgcaagtggagatttcaagcgctttgaggccaacggcagaaaaggaaatatcttcgtagaaaaaatagacggaatcattctcagaaactgctttgggatgtgtgcattgaactcacagtgtttaacacttcttttcatagagcactttggaaacactcagtttgtaatgtctgcagctggatatttggacctctttgaggccttcgtagtaaacgggatttcttcgtgtaatgatagacaatagaattctcagtgaatttttttctgtgtgtgtgtattcaactcacagggttgaaccttcctttagacagtgcagatttgaaacacttgtctgtggaatttgcaaggggagatttcaagcactttgaggccattggtggaaaaggaaatatcttcgtataaaaactagacagaatcattctcaggaactactttgtgatatgtgcattcaactcacagagtttaacctttcttttcatagatgagtttggaaacagtcagtttgtaaattctgcaactggatatttggacctctttgaggctttcgttggaaacgggatttcttcacataatgctagacagaagaattctcaggaacttcttttgggatgtatgtattcaaatcagagagttgaaccttcctttagacagagcggattggaaacactctttttgtggaatttgcaagtggaaaattctagcagtatgaggccaatggtacaaaaggaaatatctttcgtataaaaactagacagtaatcattctcagaaactgctttgtgatgtgtgtattaaactcacagagttgaacatttctttgcatagagcagtttggaaagacttagtttgtgcagtgtgcaagtggatatttggaactctttgaggccttcgttggaaacgggatttcttcttataattcttgacaaaagaattctcagtagcttctttgtgtgtgtgtattcaactcacagagttgaaccttcctttagacagagcggattggaaacactctttttgtggaatttgcaagtggaaaattctagcagtatgaggccaatggtacaaaaggaaatatcttcgtataaaaactagacagtatcattctcagaaactgctttgtgatgtgtgtattaaactcacagagttgaacatttctttgcatagagcagtttggaaagac

SEQ ID NO: 498 - DNA, 4700 bp, Homo sapiens
  misc_feature (1)..(4700): DMR3:92683001
attctcagtagcttctttgtgtgtgtgtattcaactcacagagttgaaccttcctttagacagagcagattggaaacactctttttgtggaatttgcaagtggagaattctagcgctttgacgccaatggtagaaaggaaatatcttcgtataaaaactagacagtatcattctcagaaactactttgtgatgtgtgcgttcaattcacagagtttaacctttcttttcatagagcagtttggaaacactctgtttgtgaagtctgcaagtggatatttaaacgtctttgaggcctttgttggaaacgggattttttcatataaaccaggacagaagaattctcagaaacttcttgattgttatgtgtgcattcaactcacagagttgaaccttactttggaaagagcagttttctaacactctttttgtaaaagttccaagtgaatactttgagtgctttgaagcctacggttgacaacgaaatatcttcatgtaaaaactacaaagaatcattcgcagaaaccacgttgtgatctctgcattcaactcacagagttgaacctttcttcctatagagcagttatgaaacagtctctttgtagaattcgcaagggtgtatttagagggcattgaagcctacggtagaaaaggaaatatcttaccataaaatctagtcagaagcattctcagcaactgagttgtgatgtttgcattcaactcacagagttcaacattccttttaatggagcggttttgaaacactctttttgcagaatctgcaagtggatatttggacctctttgaggccttcgttggaaacgggatttcttcatgtaatgccagacagaagaattctcagtgaattctttctgtgtgtgtgtattcaactcacagagttgaacgttcctttagacagagtagattggaaacactctttttgtggaattttcagatggaggtatcaagcgctttgaggccaatgatagaaaaagaaataccttcgtataataattagacggaatcattctcagaaactgctttgcaatgtgtgcgttcaactcacagtgtttaacctttcttttcatacagttgtttcgaaacactctttttgcagaatctgcaagtggatatttggacctctttgaagtcttcgttggaaatgggatttcttcatataatgctagacagaagacttctcagtaactgctttttctggtgtgtattcaactctcagagttgaactttcctttagaaacagcagagttgaaactctctttttgtggaatttgcaagtggagatttcaaaactttgaggccaatggtagaaaaggaaatatcttcgtatgcaaactagacagaatcattctcagaaactactttggtacgtgtgtgttcaactcacagtgtttaacctttcttttcatagagcagtttggaaacactcagtttgtaaagtcagcaactggatatttggatgtatttgaggccttcgttggaaacgggatttcttcatataatgctagacagaagaattctcagtaacttctttgggttgtgggtattcaactcacagagttgaagcttcctttaggcggagcagattggaaacactttttgtggaattttcagggggagacttcaagcgctttgaagtgaatggtagaaaaggaaatatcttcgtataaaaactagacggagtcattctcagaaactactttgtgatgtttgcgttcaactcacagaatttaacgtttcttttcatagagcagtttggaaacactctttttgcagaatctgcaagtggatatttggacctctttgtggccttcgttggaaacgggatttttcatataatgctagacagaagaattctcagtaacttcttttgtggtgtgtattcaactcacagagttgaaccttcctttagacagagcagatttgaaactctctttttgtggaatttgcaagtggagatttcaagcgctttgaggccaacggtagaaaaggaaatatcttcgtagaaaaaatagacggaatcattctcagaaactgctttgggatgtgtgcattgaactcacagtgtttaacacttcttttcatagagcactttggaaacactcagtttgtaatgtctgcagctggatatttggacctctttgaggccttcgtagtaaacgggatttcttcgtgtaatgatagacaatagaattctcagtgaatttttttctgtgtgtgtgtattcaactcacagggttgaaccttcctttagacagtgcagatttgagacacttgtctgtggaatttgcaaggggagatttcaagcactttgaggccattggtggaaaaggaaatatcttcgtataaaaactagacagaatcattctcaggaactactttgtgatatgcgcattcaactcacagagtttaacctttcttttcatagatgagtttggaaacagtcagtttgtaaatgctgcaactggatatttgggcctctttgaggctttcgttggaaacgggatttcttcacataatgctagacagaagaattctcagtaacttcttttgggatgtatgtattcaaatcagagagttgaaccttcctttagacagagcggattggaaacactctttttgtggaatttgcaagtggaaaattctagcagtatgaggccaatggtacaaaaggaaatatcttcgtataaaaactagacagtatcattctcagaaactgctttgtgatgtgtgtattaaactcacagagttgaacatttctttgcatagagcagtatggaaagacttagtttgtgcagtgtgcaagtggatatttggaactctttgaggccttggttggaaacgggatttcttcttataattcttgacaaaagaattctcagtagcttctttgtgtgtgtgtactcaactcacagagttgaaccttcctttagacagagcagattggaaacactctttttgtggaatttgcaagtggaaaattctagcagtatgaggccaatggtacaaaaggaaatatcttcgtataaaaactagacagtatcattctcagaacctactttgtgaggtgtgcgttcaactcacagtgtttaccctttcttttcatagagcagtttggaaacactctgtttgtgaagtctgcaagtggatatttaaacgtctttgaggccttcgttggaaacgggatttcttcatataaaccaggacagaagaattctcagaaacttcttgtttgttatgtgtgcattcaactcacagagttgaaccttactttggaaagagcagttttctaacactctttttgtaaaagttccaagtgaatactttgagtgctttgaagcctacggtagacaacgaaatatcttcatgtaaaaactacaaagaatcattcgccgaaaccacgttgtgatctctgcattcaactcacagagttcaacctttcttcctatagagcagttattaaacagtctctttgtagaatttgcaagggtgtatttagagggcattgaagcctacggtagaaaaggaaatatcttaccataaaatctagtcagaagcattctcagaaactgagttgtgatgtttgcattcaactcacagagttcaacattccttttaatagagcggttttgaaacactctttttgcagaatctgcaagtggatatttggacctctttgaggccttcgttggaaacgggatttcttcatgtaatgccagacagaagaattctcagtgaattctttctgtgtgtgtgtattcaactcacagagttgaacgttcctttagacagagtagattggaaacactctttttgtggaattttcaggtggaggtatcaagcgctttgaggccaatgatagaaaaggaaataccttcgtataataattagacggaatcattctcagaaaccgctttgcaatgtgtgcgttcaactcacagtgtttaacctttcttttcatacagttgtttcgaaacactctttttgcagaatctgcaagtggatatttggacctctttgaagtcttcgttggaaatgggatttcttcatataatgctagacagaagacttctcagtaactgctttttctggtgtgtattcaactctcagagttgaactttcctttagaaacagcagatttgaaactctctttttgtggaatttgcaagtggagatttcagagctttgaggccaatggtagaaaaggaaatatcttcgtatgcaaactagacagaatcattctcagaaactactttggtacgtgtgtgttcaactcacagtgtttaacctttcttttcatagagcagtttggaaacactcagtttgtaaagtcagcaactggatatttggatgtatttgaggccttcgttggaaacgggatttcttcatataatgctagacagaagaattctcagtaacttctttgggttgtgggtattcaagtcacagagttgaagcttcctttaggcggagcagattggaaacactttttgtggaattttcagggggagacttcaagcgctttgaagtgaatggtaggaaaggaaatatcttcgtataaaatctagacggagtcattctcagaaactactttgtgatgtttgcgttcaactcacagagtttaacgtttcttttcatagagcagtttggaaacactctttttgcagaatctgcaagtggatat

SEQ ID NO: 499 - DNA, 1900 bp, Homo sapiens
  misc_feature (1)..(1900): DMR3:93488201
agaagacttctcagtaactgctttttctggtgtgtattcaactctcagagttgaactttcctttagaaacagcagatttgaaactctctttttgtggaatttgcaagtggagatttcagagctttgaggccaatggtagaaaaggaaatatcttcgtatgcaaactagacagaatcattctcagaaactactttggtacgtgtgtgttcaactcacagtgtttaacctttcttttcatagagcagtttggaaacactcagtttgtaaagtcagcaactggatatttggatgtatttgaggccttcgttggaaacgggatttcttcatatagtgctagacagaagaattctcagtaacttctttgggttgtgggtattcaagtcacagagttgaagcttcctttaggcggagcagattggaaacacttttgtggaattttcagggggagacttcaagcgctttgaagtgaatggtaggaaaggaaatatcttcgtataaaaactagacggagtcattctcagaaactactttgtgatgtttgcgttcaactcacagagtttaacgtttcttttcatagagcagtttggaaacactctttttgcagaatctgcaagtggatatttggacctctttgtggccttcgttggaaacgggatttttcatataatgctagacagaagaattctcagtaacttctttttgtggtgtgtattcaactcacagagttgaaccttcctttagacagagcagatttgaaactctctttttgtggaatttgcaagtggagatttcaagcgctttgaggccaacggcagaaaaggaaatatcttcgtagaaaaaatagacggaatcattctcagaaactgctttgggatgtgtgcattgaactcacagtgtttaacacttcttttcatagagcactttggaaacactcagtttgtaatgtctgcagctggatatttggacctctttgaggccgtcgtagtaaacgggatttcttcgtgtaatgatagacaatagaattctcagtgaatttttttctgtgtgtgtgtattcaactcacagggttgaaccttcctttagacagtgcagatttgagacacttgtctgtggaatttgcaaggggagatttcaagcactttgaggccattggtggaaaaggaaatatcttcgtataaaaactagacagaatcattctcaggaactactttgtgatatgtgcattcaactcacagggtttaacctttcttttcatagatgagtttggaaacagtcagtttgtaaattctgcaactggatatttggacctctttgaggctttcgttggaaacgggatttcttcacataatgctagacagaagaattctcagtaacttcttttgggatgtatgtattcaaatcagagagttgaaccttcctttagacagagcggattggaaacactctttttgtggaatttgcaagtggaaaattctagcagtatgaggccaatggtacaaaaggaaatatcttcgtataaaaactagacagtatcattctcagaaactgctttgtgatgtgtgtattaaactcacagagttgaacatttctttgcatagagcagtttggaaagacttagtttgtgcagtgtgcaagtggatatttggaactctttgaggccttcgttggaaacgggatttcttcttataatttcttgaaaaaagaattctcagtagcttctttgtgtgtgtgtattcaactcacagagttgaaccttcctttagacagagcagattggaaacactctttttgtggaatttgcaagtggagaattctagcgctttgacgccaatggtagaaaggaaatatcttcgtataaaaactagacagtatcattctcagaaactactttgtgatgtgt

SEQ ID NO: 500 - DNA, 1600 bp, Homo sapiens
  misc_feature (1)..(1600): DMR3:93491501
agcagattggaaacactttttgtggaattttcagggggagacttcaagcgctttgaagtgaatggtagaaaaggaaatatcttcgtataaaaactagacggagtcattctcagaaactactttgtgatgtttgcgttcaactcacagagtttaacgtttcttttcatagagcagtttggaaacactctttttgcagaatctgcaagtggatatttggacctctttgtggccttcgttggaaacgggatttttcatataatgctagacagaagaattctcagtaacttctttttgtggtgtgtattcaactcacagagttgaaccttcctttagacagagcagatttgaaactctctctttgtggaatttgcaagtggagatttcaagcgctttgaggccaacggcagaaaaggaaatatcttcgtagaaaaaatagacggaatcattctcagaaactgctttgggatgtgtgcattgaactcacagtgtttaacacttcttttcatagagcactttggaaacactcagtttgtaatgtctgcagctggatatttggacctctttgaggccttcgtagtaaacgggatttcttcgtgtaatgatagacaatagaattctcagtgaatttttttctgtgtgtgtgtattcaactcacagggttgaaccttcctttagacagtgcagatttgagacacttgtctgtggaatttgcaaggggagatttcaagcactttgaggccattggtggaaaaggaaatatcttcgtatgaaaactagacagaatcattctcaggaactactttgtgatatgtgcattcaactcacagagtttaacctttcttttcatagatgagtttggaaacagtcagtttgtaaattctgcaactggatatttggacctctttgaggctttcgttggaaacgggatttcttcacataatgctagacagaagaattctcagtaacttcttttgggatgtatgtattcaaatcagagagttgaaccttcctttagacagagcggattggaaacactctttttgtggaatttgcaagtggaaaattctagcagtatgaggccaatggtacaaaaggaaatatcttcgtataaaaactagacagtatcattctcagaaactgctttgtgatgtgtgtattaaactcacagagttgaacatttctttgcatagagcagtttggaaagacttagtttgtgcagtgtgcaagtggatatttggaactctttgaggccttcgttggaaacgggatttcttcttataattcttgacaaaagaattctcagtagcttctttgtgtgtgtgtattcaactcacagagttgaaccttcctttagacagagcagattggaaacactctttttgtggaatttgcaagtggagaattctagcgctttgacgccaatggtagaaaggaaatatcttcgtataaaaactagacagtatcattctcagaagctactttgtgatgtgtgcgttcaactcacagagtttaacctttcttttcatagagcagtttggaaaccctctgtttgtgaagtctgcaagtggatatttaaacgtctttgaggccttcgttggaa

SEQ ID NO: 501 - DNA, 1200 bp, Homo sapiens
  misc_feature (1)..(1200): DMR3:94647601
cctgtttctatggattgtttgtaaccagcttttgctgcaactgttactgctggttaatatcttgctaatcataggttatggaaagactgtgtttctgttttaaggctctgttagaaattgctgatacacacactatattgtaaattcttatccctgtatactgtacttctgcatacagacgttatgttaaagaattacttcatccccatgtgaccatctcaccttataatcaaatgaccctaaatccctccctaacctaccctcgccctcactaaacttaatgataaatcctggtatatccagtgcattgttgacactgcaggaccagaaagcagtgacatcccctggacccagttttcactatcttgtgtgtgtctattgtttctcaacctgccaacccacctaggaacaaagagagagccccgttgcattgtgggctgctggccagatcctgcaatatttggcacccaacgtggccttctttgttcctgggctcagtgcactctgagtgcgggttcgtgatgactagtcttcagtctcgacagtaaggtctctgggtacactttttccaatgctcccctcttttcaggtttgttgactggtaatattccagggttattatgggacaattgcagtttaaacaccaggcttatctgtcttttattaaacttcttcttaaacagggtagaatcaaggctgattccaataaccttattctcttatttcagactattgaaaaacattgtccttggttccctgacaaagattctatggacctgttagactgggatagagttggcgccactctccgccaactcatgagagttggtgttttacatcctatttctgtttggactgactgggctcttattcgtgttgctttacttccttttcagtctggtgatactcttcaaatgccagaagttaaggtggttggtgaaccattccctttaccttgggtagctgacccccctactagtcctccttctgatgatgaagaagaattcgatctctccttgttttctccccaagaggaggaacctggtgttgatcccctccctccacctcctatcttggaacctgtatatattaactcttcttctaccaagccgttgtcccctctgccagaggaggatgtgtggcattcatctgaatcggctgtttctcattcctctcatccttttggacctctcccctctt

SEQ ID NO: 502 - DNA, 1500 bp, Homo sapiens
  misc_feature (1)..(1500): DMR3:94847301
gatgaaatgaatgaaatgaagcgagaagggaagtttagagaaaaaagaataaaaagaaatgagcaaagcctccaagaaatatgggactatgtgaaaagaacaaatctacgtctgattggtgtacctgaaagtgatggggagaatggaaccaagttggaaaacactctgcaggatattgtccaggagaacttccccaatctagcaaggcaggccaactttcagattcaggaaatacagagaatgccacaaagatactcctcgagaagagcaactccaagacacgtaattgtcagattcaccaaagttgaaatgaaggaaaaaatgttaagggcagccagagagaaaggttgggttaccctcaaagggaagcccatcagaatcacagcggatctctcagcagaaaccctacaagccagaagagagtgggggccaatattcaacatcctcaaagaaaagaattttcaaccaagaatttcatatccagccaaactaagtttcataagcgaaggagaaataaaatactttacagacaagcaaatgctgagagattttgtcaccaccgggccttccctaaagagcttctgaaggaagtgctaaatatggaaaggaacaaccggtaccagccgctgcaaaatcatgccaaaatggaaagaccatcgagactaggaagaaactgcatcaactaacgagcaaaataaccagctaacatcataatgacaggatcaaattcacacatagcaatattaactttaaatgtaaatggactaaacttccaattaaaagacacagactggcaaattggataaagagtcaagacccatcagtgtgctgtgtcaggaaacccatctcacgtgcagagacacacataggctcaacataaaaggatggaggaagatctaccaagcaaatggaaaacaaaaaaaagcaggtgttgcaatcctagtctctgataaaacagactttaaaccaacaaagatcaaaagagacaaagaaggccattacataatggtaaagggatcaattcaacaagaagagctaactatcctaaatatatatgcacccaatacaggagcacccagattcataaagcaagtcctgagtgacctacaaagagacttagactcccacacattaataatgggagagtttaacaccccactgtcaacattagacagatcaacgagacacaaagtcaacaagcatacccaggaattgaactcagctctgcaccaagcggacctaatagacatctacagaactctccaccccaaatcaacagaatatacattcttttcagcaccacaccacacctattacaaaattgaccacatagttggaagtaaagcactcctcagcaaatgtaaaagaacagaaattataacaaactgtttctcagaccacagtgcaatcaaactagaactcaggaataagaaactcactcaaaaccgctcaactacatggaaactgaacaacctgctcctgaatcactactgggtacat

SEQ ID NO: 503 - DNA, 1200 bp, Homo sapiens
  misc_feature (1)..(1200): DMR3:95592401
tgattgtcttggcatagtggacatggatgagggggcagcttgtttctcattggacaatcttttttaaagtgtcctagtaaatcacactgataacaagccctacagggtgattggcctactccattttctgtcctctctgaaccaccaaggtttgtttgtctgagggccatgactaaggctgctgactttctctgatctcacttttccttttgggcctgtttctcttggtccatattatagaataccaaggttgccaggtttaataatgcctccagattttgttcagggccaagagcttgcttttggagctttctcctgattatctgtggctgattgggtaataagcttatcttttagaatcaattgaccttcgagtgatttgggtgacaggggagtatattttcttaaggcctcccgtagctgctcaaggaaggcagaaggattttcttcctttccctgagttatggtggacatcattgaataattcatgggcttttttctaatcctctttagtccttctagaactcaggtcaacagatgtttatgactctagtccccatgatctgagtcgaggtcccagtggagatccatactggggatggcttgctgaccagtagggaatttgtccctttcttcagctgtcattctatcatttacttgactaagacaccaggtatctccaaactctcaggctgcagctaaagccacattcttttcattaaaggccagggtttgatctaacagtagcatgacatctctccaagcgagattgaaggtttgccctagatgctgtaggacatctatgtacctatcatgatcatctgaaaactttcacaggccttccttgatctgctttaaatcagagaaggagaaggggacatgtacccaggttgggccaaatttccctccccctacagcttgaaggggacataaccgatagccagggggaggggattgtggtcctttggagatttctttgtttatttccttctgggcaggggagattagaggaggattatcattaataggaaggggaaccatagggaggctaggatatgggggtaagctgagaggtcctcctgtgggatgtaaatttcaagctttgcatagttgtgtggtctccctcaatgaaaagaaagcttggacataaggtatttcactccatttgccttccctcttacagaaaagatcaagctgcag

SEQ ID NO: 504 - DNA, 100 bp, Homo sapiens
  misc_feature (1)..(100): DMR3:96477901
gattaagtgaatgcaccaaaagtcaatagcaggtgtcatttctgactggcaagattaaggtatttcttatattttgggaggtttttctgtatttccttta

SEQ ID NO: 505 - DNA, 700 bp, Homo sapiens
  misc_feature (1)..(700): DMR3:96703601
tatacctcttcagagtggggaatgataggggagggctcagggaattgctgggtagagaaagggatagtcccttgcgagggcttcacctccatggacctataaaaccccgagatcctagtgggcaaacacagaggcgcccagacatggagaggagcacatcagtggaagaagacacaagtggctagaggcgaggacgtagagggagcacgctggtgaaagagcacacttaccgctgatgcacagcggcagcccaacaaccagcggtacaaggcggagtttggccagggtagtcagagaagagccagagccaccaaggggcccaactccaggggaaaaccatctcccttcaggctcccccattgtcggagagcgacttccacttcacttcataaaactttgcactcattctcgaagcccatgtgtgatccaattcttccagtacaccaagccaagaacctgggatacataaagccctctgtccttgtgacaaggtagagggtctaattgacttggttaacacaagctacctataaacagcaaactaagagagcaccctgtgacacacccccactggggcttcaggggctgtcaacattcacccctagacactgcagtggggtcactgccccacagcctgcccgtctgtgtatgctcagcaacagggcactgaaaaagcgaggcacacccccatcacatgccc

SEQ ID NO: 506 - DNA, 2500 bp, Homo sapiens
  misc_feature (1)..(2500): DMR3:97425001
catatccaggttatactgatgcaagaggtgggctcccatggccttaggctgccctacccctgtggctttgcagggtacagccccctcctggctgctatcacaggctggcgttgagtgtgtgtgacttttccaggtgcatgatgcaagctgtccgtggatctgccgttcgggtctggaggacagcggccctcttctcacagctccactaggcagtaccccactggggactctgtgtgggggctccaaccccacattttgcttccacattgccctagcagaggttcttcatgaaggcttcatccctgcagcacagctctgcctggacatccaggtgtttccatataccctctgaaatataggcggaggctcccaaacctctgtgcacctgcaggctcaacactatgtgaaagcttctaaagtttggggcttgcacccccacaaagccacaacccgagcttgtacattggtcccttttagccatggctggagtggctgggatgcagggcaccaagtccctaggctgtgcacagcagaggggccctgggcccagccatgaaaacattcttttctcctaggcctctgggcctgtgatgagagggactgccgggaagatctctgacatggcctggagacattttccccattgtcttggtgattaacattgggctgttcattacttatgcaaatttctgcaggaggcttgacttccttcccagaaaattgttttttcttttctattgcattgtcaggctgcaaattttccaaactgttatgctctgcttcctcttgaacactttactgcttagaaatttcttctaccagatactctaaatcatctctctcaagttcagagctccacagatctctagggcaggggcaaaatgcctccagtttctttgtacagcaagagtgacttttactccagtttccaagaagttcctcatctccatctgagaccacttcagcctggactttattgtccacatcaccatacattttgatcaaagccattcaacaaacctctaggaagttccaaactttcccaaatcttcctgtcttctgagccctctaaactttccaacctctgcctgttacccagttccaaagttgcttccacattttcgagtatctttacaccatcaccccactaccccataccaatttactgtattagtctattcacatgctgctaataaacacatagccaagactgggtaacttataaaggaaacttattaactcacagttccatatagctggggaggcctcacaatcatggtggaaggcaaaggagaaccaaatgtatgtcttacacagcagcaggcaagagcaagcatgtgcaggggaactcccatttatgtaaccatcaaatctcacgaggctaattcactaccacaagaacagtatgggggaaccacccccataattcaattatttccacctggccctgtcattgacatgtggggactattactattcaaggtgaggtttgggtggggacacagccaaaccatgtcaccttctttataccatatacaaaaataaactcaagatgaattaaagacttaaatataaaaccaaaaactataacattcctagaagaaaacctaggaaataccactctggacatacaccctggcaaagattttatgaggaagcctccaatagcaattgcaacaaaaacattgtcaagtggaacatgattaaactaaagagctcctgccaaccaaaagaaactatcaacagagtaactagacaacctacagaatgggagaatatatttgcaaactgtgcatccaacaaaggtctaatatctagaatctataaggaacttacacaaattaacaggcgaaaggcagcctcattaaaaaatgagcaaaggacatgaacagatacttcttaaaagaagacatacacatggccaaaattatataaaataagtcatcatcactaatctttgggagaaatgcaaatcaaagccaaaatgagatactatctcacaccagtcagaatggttattattaaaaagacaaaaaatagcagatactagcgaggttgcagagaaaaaggaacacttatgcactgttggtgggagtataattaaattagttacacctgtggaaagcactgtggcgattcctcaaagagctaaaaacaactaccatttgacccaacaatcccattattgggtatatacccaaaggaatatatgtcattctactataaagacacatgcttgcttatgttcactgcagaaccattcacaacagcaaagtcatagaatcaatctaaatgaccattaatggtagagtcagtaaaaaattatcatacatatacaccatggaataccatgcagccataaaaaagaatgagatcatggcctttccaggaacatggttgcaactggaggccatcatcctttgcaaactaatgcaggaacagaaaaccaaatattgcatgttctcacttataagtgggagctaaatgatgagaacacatg

SEQ ID NO: 507 - DNA, 500 bp, Homo sapiens
  misc_feature (1)..(500): DMR3:98428801
ccactgagctcagcttcactccccctatgccacagcatgcaatctgggggcctggagatttcccggcccagtctaccaatgttgacactggagcactcttcctgggggcccatggtgggcctatcaccctgccactcatgtcacacacaggcctaattattatttcaccaaccacatcacaaccactgacaacacaactgcttaccactctggaaccagcagcttgtcttgccactgctattgccatcacccatgccacaccaactgttcaggggcccaaaaacttacccactaactggctcaccactatcactatccacatccaagctagctacctgaggacccaagtactgggccatctggacccactaacactggtgtcccatgtcaccctggggcccaaggacaggcacacttggcccactgctgtcaacactggggcttgaaaattagtccacctgttgtcccagtacccagcaaacctttatcacagcctctac

SEQ ID NO: 508 - DNA, 1600 bp, Homo sapiens
  misc_feature (1)..(1600): DMR3:98856801
attacagattctaacgaaaacataaggaatgttgaaaagaagaaaaaaaacagactaaaaagaatatttaaaaagtaaaaaggatcagtgagaatgtggctgaaatgaaaggggatataaatggcaaagaagattcaactgacatataagtgtgtccagaattggtgggttcttggtctcactgacttcaagaacgaagccgcagaccctcgcagtgagtgttacggttcttaaaggtggcatgtccggagtttgttctttctgatgttcggatgtgtttggagtttcttccttctggtgggttcgtggtctcactggctcaggagtgaagctgcagaccttcgtggtgagtgttacagctcttaaggcggcacgtctggagttgttcattcctcctggtgggttcgtggtctcgctggcttcaggagtgaagctgcagacctttgcggtgagtgttacagctcataaaggcagtgtggacccaaagagtgagcagtagcaagatttattgcaaagagcgaaagaacaaagcttccacagtgtgtaaggggacccaagctgggttgccactgctggctcgccactgctggctccggcagcctgcttttattctcttatctggcccaacccacattctgctgattagtccattttacagagagccgactggtccattttacagagagcttattggtccgttatgacagggtgctgattggtgcgtttacaatccctgagctagacacaaaagttctccacatccccacgagattagctagacacagagtgtcgattggtgcattcacaaaccctgagctagacgcagggtgctgattggtgtgtttacaaaccttgagctagatacacagtgccgattggtgtatttacaatcccttagctagacataaaggttctccacgtccccactagagtagctagatacagtcgattggtgcattcacaaaccctgagccacacacagggtgctgattggtgtctttacaaaccttgagctagatacagagtgccgactggtgtatttacaatcccttagctagacataaaggttctccaagtccccaccagactcaggagcccagctggctgcacccagtggatcccgcaccggggctgcaggtggagctgcctgccagtcccgcgccgtgcgcccgcactcctcagcccttgggtggtcaatgggactgggtgccatggagcagggggcggtgctcgtcggggaggcttgggccacgcagcagcccacggtggggggcaggctcaggcatggcgggctgcaggtcccgagccctgccccacggggaggcagctaaggcccagcgaaaagtcacagcagctgctggcccaggtgctaagcacctcactgcctggggctggcagggccagctggccactccgagtgtggggcctgccgagcccacacacacccagaactcgcactggcccgcaagcgccgtgtgcagccccagttcccgcctgcgcctctccctccacacctacccgcaagctgagggagccggctccggccttggccagcccaggaaggggctcccacagtgcagcagcaggctgaagggctcct

SEQ ID NO: 509 - DNA, 200 bp, Homo sapiens
  misc_feature (1)..(200): DMR3:99103301
tgttcttcctctctgaagcaatcttttttttttgtcagcaatgattgattctcaggtggaaaattgctgctccacttttttctgggttttgggtgacatagtaaataaaagggaggtgggaaaattctcaatttaaattggaactagatggcttacatttgaatctgagctctggtagttatgtgtgactttggacaatt

SEQ ID NO: 510 - DNA, 200 bp, Homo sapiens
  misc_feature (1)..(200): DMR3:99976201
acttagaaggtggaacatagtaagtccatatagtgtatgctgctattagtctacttgaggagagtaaaaagatactgtggcccatatgctacgcgttcctgcttataaccaaataattatatagaattcatacataaagaataaaattggatagggatgtctatttttattggatgttgtaagtaagttattaaactgtg

SEQ ID NO: 511 - DNA, 600 bp, Homo sapiens
  misc_feature (1)..(600): DMR3:101300301
ttcccccaccctgggagcttagtgtgttaggcagctatcagtcccagtgttggctgtagcccctcctgcaaaggagttcaaagggcttagacagcaggcagccacagcggtggtgctggttgcccctcccgcggggagctccgcaggcttaagcagattctagcttagtggctgttgaaaatctgcttggttctgtggttgggaccctaggccccggaggtatgggctcccaagtgagatcttctgatctgtgggttgcacagttccgtggaaaaagcacgttttcccaggctgggtagcaggctcactcactgcctcccttggctgggggctgcggcaccacactgctcttccttcctctccgtgggtcacgccagttgcctagtcagttctgatgacaaaacctggataccttggctgccagtgcaggattcacatgctgttatggttcttttagatggagccacagattgccactgcttctagttggccatcttggccccgccccccacttttaatttctttcaagaacttttcctttgcgttcacaacttagctaactatttggtgcaagagacctagcttaaggcctatctcagt

SEQ ID NO: 512 - DNA, 300 bp, Homo sapiens
  misc_feature (1)..(300): DMR3:101696501
gtttcaaaagttggtaggagatactaattggattcggagatattaattggatttggccaactctaggcattcctacttatgccatgtcaattttgttctctttcttaagaggggacttggaattaaatagtgaaagaatgttacctccagaggcaactaaagaaattaaattaattgaagaaaaaaattcggtcagcacaagtaaataggatcacttggccccactccaaattttgatttttggtactgcacattctctaacagccatcattgttcaaaacacagatcttgtggattggt

SEQ ID NO: 513 - DNA, 800 bp, Homo sapiens
  misc_feature (1)..(800): DMR3:106136701
gaacgtggatagaaacaaagatcattgagctaaggaagtatgttgaaactgaacctatggaagctaagaatagtgataaagcgatgcaagagcagacagacgaaatagccagtatagaaaagaatgtaacctgatagagctgaaaaacacactacaagaattttataatacaatcacaaatattaatagcagaagagaccaagcagaggaaagaatctcagagtttgaagactctcattctgaaataagacagccagacaagaaaaaggcacaaacaaatggaaaaacattccatgctcacgggtagaaagaattgttaaatagctatacagcccaaaataatttacagattcaatgctattcctattaaactaccaatgacattcatcacagaactagagaaaactagtttaaaattcgtatgaaaccaacagaaggcccaaatagccaagtcaatcctaagccaaacaaacaaacaaacaaaaaacacaaaaaacacagctggagacatcacactaaccaacttcacactatactacagagctacagtcaccaaaacagcatggtactgatacaaaacagacaaatagacccaaggaacagaatagaaaacccagaaataaggccacacacctacaactatctgattttctacaaagctgacaaaaacaagcaatggaaaaagaactccctgttcaataaatggtgctaggataaccagctagccatacgcagaagattgaaactggaccccatcctttgccatatacaaaaattaactcaagatcaattaaagactt

SEQ ID NO: 514 - DNA, 300 bp, Homo sapiens
  misc_feature (1)..(300): DMR3:106563501
aaaagtttatatatataagctttttaatatatgttctgtttctctagagaaccctgccttataatatagtacccaaggtagttatattttaatgaagcacaatatccaataaatatttaagaagtaatcatccctccaaaaatagtaaatagaagaaagcaagcaaaaaaacaaacaaacaaaaaaaaacaaaaaaaaggaaggcaggaaggaagggagggagggaagggggaaggagggaaagaaggagagagagactgattttaaaaaaataaaaaataaacaggatatacatgagaa

SEQ ID NO: 515 - DNA, 300 bp, Homo sapiens
  misc_feature (1)..(300): DMR3:107291101
atccaagactgtgtaattaatttataaagaaaaagggtttacttgacttatgattctggtggctggaaagttcaagattgcatctgcatctggtgagggtctcaggctgcttccactcatgatggaagacagaaggggagccagggtataccgagatcacatggtgagaggggaagccagagagacatgggggaggtgccaggctctttttaacaaacagctctcaggggaactaacacactgagaactcactcacctctgaagagagggcattaatctgtccatccacccgcgtgaccc

SEQ ID NO: 516 - DNA, 2400 bp, Homo sapiens
  misc_feature (1)..(2400): DMR3:108657201
ttgaaatgaaggaaaaaatgttaagggcagccagagagaaaggtcgggttacccacaaagggaagcccatcagactaacagctgatctcttggcagaaactctacaagccagaagagagtgggggccaatattcaacattcttaaagaaaagaattttcaacccagaatttcatatccagccaaactaagcttcataagtaaaggagaaataaaatcctttacagacaagcaaatgctgagagatttttgtcaccaccaggcctgccctaaaagagctcctgaaggaagcactaaacatggaaaggaacaaccagtaccagcaactgcaaaaacatgccaaattgtaaagaccatcgaggctaggaagaaactgcatcaactaacgagcaaaataaccagctaacatcataatgacaggatcaaattcacacataacaatattaaccttaaatgtaaatgggttaaatgctccaattaaaagacacagagtggcaaattggataaagagtcaagatccatcagtgtgctgtattcaggaaacccatctcacgtgcagagacacacataggctcaaaataaagagatggaggaagatctaccaagcaaatggaaaacaaaaaaaggcaggggttgcaatcctagtctctgataaaacagactttaaaccaacaaagatcaaaagagacaaagaaggtctttacataatggtaaagggatcaattaaacaagaagagctaactatcctaaatatatatgcacccaatataggagcactcagattcataaagcaagtcattaaagacctacaaagagacttagactcccacacaataatcatgggagactttaacaccccactgtcaacattagacagatcaatgagacagaaagttaacaaggatatccaggaattgaactcagctctgcaccaagcggacctaatagacatctacagaactctccaccccaaatcaacagaatatacatttttctcagcaccacaccacacctattccaaaattgaccacatagttagaagtaaagcactcctcagcaaatgtaaaagaacagaaattataacaaactgtctctcagaccacagtgcaatcaaagtagaactcaagattaagaaactcactcaaaaccgctcaactacatggaaactgaacaacctgctcctgaatgactactgggtacataacgaaatgaaggcagaaataaagatgttctttgaaaccaacgagaacaaagacacaacataccagaatctctgggacacattcaaagcagtgtgtagagggaaatttgtagcactaaatgcccacaagagaaagcaggaaagatctaaaattgacaccctaacatcacaattaaaagaactagagaagcaagagcaaacacattcaaaagctagcagaaggcaagaaataactaagatcagagcagaactgaaggggatagagacacaaaaaacccttcaaaaaatcaatgaatccaggagctggttttttgaaaagatcaacaaaattgatagaccgctagcaagactaataaagaagaaaagagagaagaatcaaatagacacaataaaaaatgataaaggggatatcaccaccaatcccacagaaatacaaactaccatcagagaatactataaacacctctacgcaaataaactagaaaatctagaagaaatggataaattcctcgacatatacaccctcccaagactaaaccaggaagaagttgaatctctgaatagaccaataacaggctctgaaattgaggcaataattaatagcttaccaaccaaaaaaaagtccaggaccagatggattcacagccgaattctaccagaggtacaaggaggagctggtaccattccttccgaaactattccaatcaatagaaaaagagggaatcctccctaacttgttttatgaggccagcatcatcctgatagcaaagccgggcagagacataacaaaaaaagagaattttagaccaatatccctgatgaacatcgatgcaaaaatcctcaataaaatactggcaaactgaatccagcagcacatcaaaaagcttatccaccatgatcaagtgggcttcatcactgggatgcaaggctggttcaacatacgcaaatcaataaatccagcatataaacagaaccaaagacaaaaaccacatgatatctcaatagatgcagaaaaggcctttgacaaaattcaacaacgccttcatgctaaaaactctcaataaattaggtattgatgggatgtatctcaaaatagtaagagctatctatgacaaacccacagccaatatcatactgaatgggcaaaaactggaagcattccctttgaaaactggcacaagacagggatgccctctctcac

SEQ ID NO: 517 - DNA, 3400 bp, Homo sapiens
  misc_feature (1)..(3400): DMR3:109976201
gcctgtaatcgcagcactttgggaggctgaagtgggcagatcatgaggtcaagagatcgagaccatcttggccaacatggtgaaacctcatctctactaaaaatacacaaattagctgggtgtggtggcgtgtgcctgtagtcccagctactctggagactgaggcaggagaatcgcttgaacctgggatgcagaggttgcagagagccaaggttgggccactgcactccagcctggcaacagagcgagactccgtcacagacaaaaataaacaaacaacaacacaacaaacaaaaaaaacccttaaatatctacctggtgttctattgtcttgccctaagtgagctggcactgaaaccacaagacacaatccttcacactcttccccctcctttccaaaggcagagaagcctcaccctgtggctgctgccatcccacgcggtaagaagtactgccagactactgcccatgttcccttaaggcccaaggtctcctaagtcagcctggcctgggattcacccttcagggcagttgactcctctctgtcccaggacaggtccagaaatgctgtctaagattcaagtcctggaaatgggtaccccaggagtttactaggtgctccactttcctgtggccatgctggtacctaaggtgcaaaacaaagtcccctttacttttttctttgcatttctcaagcagaagaagttttgctccatagccgccacagctaataatgcgctgagtctcacctgaagccagcaagtctcagaggctcatccaaagccctcattgtagtacttgggtatcactgctggttattcagggcccaagggctctttaattagcaggcaataaatgctgccaggactgagtcctttccttcaaggcagcaggttcccttctgattctgtgtgtgtctagaaatgtctgagagctagggcctggaatgggggcctcacaactctgactggtgccctatcctggtgtagctgagctggtatccccttagagttgctgtttttatggtgcagactgcctttcaagtttacttggagacacagaacactgtaatcctctgtgggaatgtttgtaggcactcatgttctgactgctaggattggtgatttccctctagctaggtctgggattttttttttccaacttcagaattcaatgttattatattaccccatctccctcaacaaacatttaggatcagcaatttagtgtggaatggtgcttgaagtcattccacttttcactttagagcataagctggttccacttacgatactgtgtattctaagccagcatcattgtaactgatagtctcttctcacccagctttgatggtggggcagctcccatgtctgcagctgtggtccaggggctgtctgtgctgaatacagcagttgctgtgacactaggcacatgccatctgcagcatctcttttttcttgcatccctgttttgagcacaggtatgtaaaaatcttctctttcttcttcccaggctgatagtcatattctctatcaatgtgatcgccaaccaccatatctggtacctgacaaagttctccccgttcttctgtctcctctcctcaagtggaatgaaggggtttcttttggagccatgagctgtgcagcctggggttaagggaggggttttgctagcacctgcttagctgccccagctggtgtctctgtaggcggcatgttcccccagcccgctatttctgggcctagttcagcaccaaaactcccctaagagttgctgtttttaaggccgagattgccttccaagtttacttggaaacacagaacactgtagccctctgtggggatgtttgtagggattcatgttctgactactgggattggtgatttccctctggctagggctgttttaaatcctccctttgtgggtggggtcagctgagtttgatctgcgtttcctttctgctctaaaaggacagcactgagttcattgcctcatgattgctgtgctctccctccccagccctcagagatgctctccacaccaggcctctgctgctaagggtgagggaggggtggcatgggcaattcaggactgttttttctatctcttcagtgtctctttcagcaatattaagttaaaaccaggtactaggagtgctcatctgatttttgtttttttatgaaggtgttttttctgtgtagatagttgttagcttaatgtccttgtgaggatggacagtcggtggagctttttattccactatttgttcccttttcagtgtcacccactggtcttaatacctatagatgtttcttggctgaattaattatttggaaaaagttttccaaacggtaattttctaaatgaattattgctttcgtattttgtcgctggcattctactgtgacagtttctgtactctcaattaattaattaattagtgtctatgtgggctcatggattcttattttcattgatgagttaatgttagaaacaattgctacttaactgtatgtttagatttaaaataaattttttcgaatataatttacttgcagtaaaacaaaactattcttggtgtattgttctgagttttgacaaatgtataaatcagtgtaactaccaagccagtcaacacatggaagatttctgttactttaaaatggtccctcctgttcctgagcagtaaaccttttctcccatgtctagtggttccaggcaaccacttatttttattcagctttgcctattgtaaatgtaaaataaacagaactctgctacatgtgccccttttgtgtctggattattctgctcattatagtggttttgatacttatgtatgcatttcagtgtatgtgtagttttattccatcatagtattctatttgtatatcaaaagttatttatcctttcactgattgatgaacattttggttatattcatgttgagaataaagctactatgaatatccatatacaagtcttttttggcattggaaatatttctatatgtgaacaaatactctgagaattgctgttgagtcttttgattaatatgtgattgccttcataataaactatccaactgtttttcaaagtggctgtaccatttaatatttccaccagtgacaagtgaaagtttcagatgctccacatcatcatcaatgcttggtattgtcggttttattaattgtgatcactctagttagtgtgtactggtgtctctttatggttttaatttgcatttccctgatagtaagcatttgtttatatatttactggatatttatatattttctgttgtgagatgtctgtccaaatagtttttctgttttttattgtgttttttttcttcttgctgagttgtaagaattcctttttattattgagatacaattcc

SEQ ID NO: 518 - DNA, 300 bp, Homo sapiens
  misc_feature (1)..(300): DMR3:111346301
ctgttttatcagcaaggactttgtgacctgtatcttgtgccaacctcctagctcatcctatgacttagaatgcctaaccttctgggaatgcagcccagtcggtctcagcctcattttacccagcccctattgaagatggagttgctctgattcaaatgcctctgatgtatctccccaccccattttataagaaaacccttaatcctgagagttatagagggacaaagacccatcttctgtaacttcttcagactgaataggagcaatgatattcctgcctaactgttagggtctcttgta

SEQ ID NO: 519 - DNA, 600 bp, Homo sapiens
  misc_feature (1)..(600): DMR3:112357601
tggagggacaaacaggaattgtagcagttaggacagctttgaggaagatttcaggttatctgaatctgtttggacacatgggcatgcgtatttggaagggagaagaactcatacagtaagtcttaatgtcatcaataggttcttggaaactgcgagtttaagcaaaacggcatgtaacagaaccaattttaccacaggctaaatgatagaaacaagacttaagttcctatggcatatttctagtcacaaaaacatcaccaaacttttaataaagaccaaaacatttctaatattaaacattgaaataaatgtgagttatgcatacatttaagaaacagtaacaaaaacaagtgagataattattcactcaatgatttcagttcaagggtatgggtggccagagcctatgcagctcaggatgcaaggcagacactgacaccagacaggacgtcatcccagagcagggggcattcacacacgcgcacacacacgcacacgcacacacacacagttactcagactgggaccatttggacatgccaatttacataacatgcagtacgtgtttgggatgtggggggaaccagagtatccagagaa

SEQ ID NO: 520 - DNA, 200 bp, Homo sapiens
  misc_feature (1)..(200): DMR3:113198301
ttcaactgtagtatacacacaaagtagtttcagaattgctaatcaatactcctgtgagacataagtttactaactagagtatagtagttgtttagcctcacagtatccagtcaaaatactgttttccgaagtaacttagttttttttcttctccgctccctaaattacagttatgttaataatttgtaatacagttggat

SEQ ID NO: 521 - DNA, 1900 bp, Homo sapiens
  misc_feature (1)..(1900): DMR3:113478901
aatgtaacgtaataaaactagaaaaacaaagaggctctggaaatttttttttaaatcttctattagacaattttttaaaaaattattattatactttaagttttagcgtacatgtgcacaatgtgcaagttagttacatatgtatacatgtgccatgctggtgtgctgcacccattaactcgtcatttagcattaggtgtatctcctaatgctatccctccccccaccccccaccccacaacagtcgccagtgtgtgatgttccccttcctgtggccatgtgttctcattgttcaattcccatctatgagtgagaacatgtggtgtttggttttttgtccttgcgatagtttactgagaatgatgatttccaatttcatccatgtccctacaaaggacatgaactcatcattttttatggctgcatagtattccatggtgtatatgtgccacattttcttaatccaggctatcattgttggacatttgggttggttccaagtctttgctattgtgaatagtgccgcaataaacatacgtgtgcatgtgtctttatagcagcatgatttatagtcctctgggtatatacccagtaatgggatggctgggtcaaatggtatttctagttctagatccctgaggaatcgccacactgacttccacaatggttgaactagtttacagtcccaccaacagtgtaaaaatgttcctatttctccacatcctctccagcacctgttgtttcctgactttttagacaattcttaagtaaacatgaaaatataaactgaaattacctcattcctaaagtaacaaaacactacataccagaatgtatggtacacatttatagtagtgatcagagtagaattcagagccctaaacatgtttatcaattaaaaataaaagaatgaaaatgaatgtattaaattctcaactagggttactagaaaaagtaaacaaaaaaatgcacaacgaaggaaataaagacaaaagcaaaaattgatgaggaagaaatcagaaaactagacctctaactaataaattaaaaatgttagttcttcaaaaattcataaaataggcaaaccactaaataacctaattttaaagaaagagaaccaaaataaatgattgaggagaacaagtaagcactgaaacaaaattttttaagaagtatagagattattggcacatctctatagaaatacattgattaacctagatgaaatggaaaatttcctaagaaaatataacttataaaaattggcttgagaagaaatagaagcttaaataaacaagcaaagttactatggcacttccccacagaaaaaaaaaaagcaccatgcgcaaatagtttcaaaggaggaaagctatcagcctcaaaaaacagatagtctcagtgctatataaattgttccaggacttaaaaaattagaaaaatcttccagatggttcttatgaaatcaagtaccgcattgttacttcaatctgataaaggctgcagacacaaaaaaactacagagaatatcatttatgaattttaacacaagaatactaaataaaatattaacaaacaacctccaatactccattaatgaaaataacacatcatggccaaatagaatttactgcagaaatgcaaggatagcgcaatattaggaaactcataacataatgtaccatattaagagacataagcagaaaactcatatgattatctctatagatattgaaaaagtctgataaaattaacacttattactgattaaaataaaacaatcaagaaaacaagaattgattggcatttccttagcattgtttaaaaaaaaatgtatctgggtatggtgtttgcatgcctgtagtcccggctactagaggctgagggaggctgaggtgagagg

SEQ ID NO: 522 - DNA, 1100 bp, Homo sapiens
  misc_feature (1)..(1100): DMR3:113917601
aatgagccactgcacccagccgcaatttagtttataatctaagtattttattaaccattagatattattcctttatttgaaacttttatgtaaacataatttttttttttgagacagggtctcgctctgtcacccaggctggagtgctatggtgcaatctcggctcactgcaacctccgcctcctgggctcaagcgattcttgcacctcagcctcccgagtagctgggattacaggcgtgcaccaccatgcttggctttttttttttttttttttttttttggtagagacagggtcttgctatgttgctccaggccagtctcaaactcctgagctcaggtgatccacctgccttggcctcccaaagagctgggattataggcgtgagccactgtgcctggcctagacataattatatattcatagatgatatcattgttatgaatactaggaaccaaaatcaattttgttcttattattgatgatagagtagcaaagagattgcagtcagtagctattctcctgtgattatattatgagttttgtaatttaaaaaaattatcttttctgttcttccagttttgaaaatgtgggatgcctgagatataaatcttcctctttactcagtagctaatatttaacttattatattttttcggaatctattttgtatttacttgttagtcatttctacttagagaacttgatatttcagaagaactggatacattatttccctgaattttttgagaggatacctgttaatgttacactgccatttttatggctgaaaagacccaggaggaattaggacgttgttgtatgctggtgataaatgaagtttgctttttgaaacacaactgcatttgttttctgatatatctggcttcaatatcaatgattatatcaactgtctgatgttataaatggctttgcaaagcaaaggcttccagctacttctaaacctaaacagttatgagtatgttgctggctagacctagaattagtcagaagctttactacaaaagagaatctgatcatgactgcaaagcatactgctatcttctgacttgttacctggtaatcaaagttgtatttctt

SEQ ID NO: 523 - DNA, 2900 bp, Homo sapiens
  misc_feature (1)..(2900): DMR3:115192201
ttcttttcaaagtcatccctctgctcactaagataaatgcatatcttactgtttcctttggaaaggctaatcagaaactcagaagaatgaaaccatttggtttttcttttatctacctatcacctggaagcacccttcccacttcaagttgtcctgcctttctggactaaaccaatgtacatcttacgtacattgattgatatctcatgtctccataaaatgtataaaaccaagctgtgcccccacccccttgggcacatgttgtcaggaccaggaccttgtgaggctgcatcatgggcacgtgtccctgactttggcaaaataaactttctgaattgactgagacccgtcttagatatttggggttcatacccgcttggtactgtgtagtgaatgagttctcacaagatctggttgtttaaaagtgtatggcaccacctacctgtctctcttcttcctgctctggcaatataagacatgcctgcttctccttggccttccaccatgactgtaagtttcctgaggcctctccagaagccaagcagatgccagaatcatgcttcctgcacagcctgtggaactgtgagccaattaaacttcttttatttataaattacccagcctcaggtattgctttatagcagtgcaagaatagactaatataagtgttacagatattgagtaggtaaaaatcaataggatttagcagttggacctagagacgcaggaactggggagatttttttaaagaggtgattagaagaataatattgtcatcatggaaattagaaagttaggtttattggtgaaaagttggtgaataatcttctagatattttgagtttaatgtactaatgaggaacaagtggagatctccatcatgcacttggaaatttaggactggagctgggagacaagtggggccagaaataaaggtatgctccttctgctctcaacccaccatggccgtttagtgggatcagtagaatccctgcaagtaagtgtctggatttagcaaaatagcatggaagaacaaactgatgccagaacctacgaactgacagcatttaaggggtgggagggaaaaagaaaaaagcagatgtgaaaagagatcaggaaacttaggcaagtcaaataagagaaaattatttcaagtgtgaacttccgtatataacgtctatgatttaggcccagtttatatcaagaacttaagaaagaaaattggaaaaataaatagggctttatgtatttttaggacttatgatgatgattatgatatagaatgaaataaagtgtgggtcaggagcagtggctcacgcctgtaatcccagcactttgggaggctgaggtggtggatcacaggtcaagagatctaaatcatcctggccagcatggtgaaacccatctctactaaaaatacaaaaattagctgggcatggtggcacaggcctgtagtcccagctactcgggaggctgaggcagaagaatcacttgaacccgggaggcagagcttgcagtgagctgagattgtgccactgcactccagcctggcgacagagcgagactccgtctcaaaaaaaaaaaaaaaaaagaaaagaaagtgtggacagcaagtattctaacaattgtaactaaagaaatgcattaataaataagcttttatattttcctacaaattcctaattttttcctttatcatataagttattttcttaatacttgtcaatattgtatgccataaagctttttttctaaaataacaaaaatagtgttttaaaagtatattttataatgccaagaggcaaatgtgatgtaagagactaagaacaggcttatccagcaaatataatttcatctgtaaaatggggataataatctttcttatcagcttgtctcagagaagtgttatgtgagttaactgaaggaataagacagcattttgtgaatataaaatctatagtaatgtataatataattgatatttaagtactttttgtgcttctggtcttatgctggaaaaattgttattactttaaataagtaataaatatctgaattttgctctatgttcaggaagcaaattttctcatcttttttacacttacaaattttctataatttttccttctgtgagatgtttgcatttatcttattttggtcaattcctgctctggcaagtacatgcaaaataaaatgttaagatcaacaaacaaacatttttgttgggtgtgtcctcactgtctaaatgtgtttaatttttttcggccagaattatttgtttcaaacgcttttatgaaacatgcgtttacttctggaccatcttaatagctcaaatattcctgtctacatttccttagatcaccttctattcagtgattctttcttaagagttcttctgttggccagagttttttctgaggtttcagtagttgcctggtaggaatgcttgtgaaaacattcatggatagcccaaacattttttaataacatttgcttggaaaaaaaatttttactggcagtcaggacacattatttaaacatatttcaaaatatttatgcatccttgcaatactttggcggcgtcttgtatggtaaggctgaattgatgattttctagttacctctttttgtttgtttgtttttggccattcataatagttgattgatgagtgtttgatagaatttccacactgttgataaactcaataataaggtgattataacaaccagaggtttttgaactttctatattctcagagacttgaaccgaaactaattagattaactttactgtaatcttgtcagatgcttgattttcagttgctattttgattcttttttttagtatttgctttttcaagaaattttcaacttttatcttacatacgggggatacatgt

SEQ ID NO: 524 - DNA, 500 bp, Homo sapiens
  misc_feature (1)..(500): DMR3:116586401
ctgcacattagtgaacacaaactcagccatacagtgacatctttctccttaaaaataatgatgcaggctgtctccattacttaagaaagcccgagctcacactgaaaggtgtcaaaaaacactattatcccactttgcctggaggtgccttgacagcacctttcctgccataagaatggattacaggcagggtggtaatcagccaagaagttagtaagaataagttcttttaagagcagagtgtgaatctgtgaacataataaaaggagtttaccaccacaccgaataagggaacacttagctccttgctgccttaaactaaccaggaagagcacgaccccttgctacaggttagtgaagggcagcagggacttaattgtcctatgataaaaaacccgatgagtgctctgcgaagcccactgagtaacaactatgtcgagctccaaggatctctggtgaaaggtgccataggaaggcatagagacaaactgatatgggga

SEQ ID NO: 525 - DNA, 200 bp, Homo sapiens
  misc_feature (1)..(200): DMR3:117831401
cgaaagcaattttatggattcttttaagaacccataatctaaagggaagacagaattatgaataatggaaatactatgatattaaattctattttagaaattgtaacatggtgttgagtgaacacagaggaaaaactaacttccttagaagccacttaatagttttgctgggagctaacatttgattcatacccagaagc

SEQ ID NO: 526 - DNA, 100 bp, Homo sapiens
  misc_feature (1)..(100): DMR3:118145101
tcccccaaggagctcaaacagcttagaccacaggcagccacagcaggtgctggttgcccctcctcccaggagtttggtaggcttaagcagtttccagcag

SEQ ID NO: 527 - DNA, 1400 bp, Homo sapiens
  misc_feature (1)..(1400): DMR3:118898901
actattatgtaccaataataacttaataaaagtttttaaaaccaccataagatacgatatcactacatacctatcaaaatggctacatgtaaatttttgataatatcaaatgctgtcaaggattcagggaaactgggtcactcagactgctgaaagaattgtaaaattatatggccaccccggaaaatagtatgtcattttctttcaaaactaaacatgtacttcccacatgcaacccagaaactgcactcctggacatttatcccagaaaaatgaaaacttatgttcacacacaaacctatgcacacatttatagcagatttattcctgatagccaaaaactagaaacaacgcaaatatccttcatatcatccaatgggtaaaataaaccgtgctacctcttctgtaccatgggaaactacgcggcaataaaatggaatggattattgatacatgctacaacttgaatggatctcaaagaaattattctgagcaaaaaaatttaaaaaagcaaaagccagtcctcatactgcattccacttatatagcattctcaaaataacaaaattacagagatgaagaacagacagtgattggtaggaattagggacttgggaaggagggtggtggctatgactatgaaagggtagcataaggaatcctatatcctgactgtggtgttggtcacatgaaatgtacatgacattattgaaagctgaaaccctaggaacagaaatcaggtcagtgattgctagagagtggttggggagagtggtttaattacaaggtaaggaggggatttttgagggtgatggaaatattctgtatcttgattgtagtggctgttacattcatcatacatcgcacacacatcactttaaaatggtgaattttactgtatgcaaaatatgcctcaataaacaacaaaaaaaatctgtttgtaaataaatgaatgtaaatactccaaaatgttaagagtggcattctgtaggtgggagtatattacttgttgatttttaaatcttttttcagtattctgtattactttttaaataaataaaaactaataaaagttttaaaaaaatctacacgtgtgataaacctgtatataaataaatgtatacacacgagtgcatgtacaagtgtggaaatctgaatatggctgataaattataaccatgtcaacttgtgatactgcacaataattatgcaagatgttaccattgggagaaataggtaaaaggtatatgacttctctattatttcttacaactgcatgtaaaagtataattatctcaaaataaaaagttaaaacaaaggaatgatccagtacacatcaagagctacaatcatgctcataactcgacttagcaatttcaattcagaaatcagcatttatc

SEQ ID NO: 528 - DNA, 1700 bp, Homo sapiens
  misc_feature (1)..(1700): DMR3:121366901
tattggtatattttatagctaattttatggttaccatttggcttacatttaatatcctaaagttataacactaagatttgaattgataccagcttaacttcaatagcatacagaaattctgatactttacagcttctttctcacttctttcagttgtttatgttctaaaattacatctttataccatatgtaccccacaacatgaactaataattcctttaaatatatttatctcttaaattatgtagaacccaaaaggtgtggttacaaaccattgttccaataacactagcttgtacaattgcccttgtatttgtctttattgagatctttattccttcatatggctttgagttactacctaatatccttttatttcaccctgcaggactcctttgcacatttcttacagggcggatctggtggtaacaatctcccttagctttgtttatctggtaatattttaatttattccttacttttgaaggacacttttgccagatataggactcttggttgaaattttttttcctcttagcattttaaatatattgattcctgccttctactttccatccaaagttttcataatcagcatcaaggatatgctgattatcttattaaggatgccttgtatatgatgagtcacttctctattgctgctttcaaggttctctctttgtcttcgactcttgtttttttttttttttttttttttttttaaacaggttctcactttgtcacccagaatagaatgtagtggcctgattgatcatggcttctagcagccttaacatcctggactcaaatagatcctcttgcctcagcttcctgattagctgggactgtaggcatttgccaccacacttggctaatttttttgcttttcctttttttttttttttgtagagaccaggtcttcctatgttgcccaggatggtctcaaactccggaactcaagcagtcttcctgccttggcctcccaaagtgctggagttataggcatgagccatctttgacttttgaaagctttgtaacaatgtctcaatgtgagtctttttgagtttatcttccttggaattcattgagcttcttggttgtttatattcatgtgtttcatcaaatttgagaagttttcagtcattatttattcaaatattttctctgcccctttctgtctctcttccttttttttctgaaatttccacaatattgactttttacttaatggggatgcatatgtcacttagcctctgttcaccattttgaatttttttctttctgtttttcagacttgataatattcactttttaatctacaagtttgctaattcttctgtctgctcaaatctgcctttgaattcttctagtgaatgtttcatttcggttattatacttttaagctccagagtttctttctggtttctttttaggttttctatctctttactgatatttatattttgttcatacatcctttacttgactttctccccatctttctttagttctttaagcatcattaagacagttgttttaaagtatttatctagtaggtctaccctcaggactttttcagggataatttctgttgctatttttttctttcaatgggccatccttccctgtctctttgtgtacattatgattttttttgtttaaaagggaactttttaatttaataatgtaataactctgga

SEQ ID NO: 529 - DNA, 700 bp, Homo sapiens
  misc_feature (1)..(700): DMR3:121458801
agcacttcgggaggccaagttggaagtatcacttgacgccaggagttgaagaccaccctgggcgacaaattgagacctcacctctccacacacacacacaaaaactacaactgtgaggaactagaaatgtaaatgcgaaacaaaaacagcaggatctcagagtacggtggtgtgcatttacctcagctagcaatcctactgtcttgcaaatggcatcagatttcccacgggtcatgtggtaagaaagtatcagtgttaacccaggccaaggaatggtataaatgtggcctctgacttactctttgcctaatagttatccagagtagaaactaacatggatccatttcaaagttacaaaggcagcatgaagtttcataggtagattactaaccaataacttcaacggctaaaaagctatcaggtactaactataatctacaggtcagcaatattttttcaacaaacatttagagaccaccttctgtacaaagcactatggcttgatgctataaaagatataaaaatgaaaatatggaactttacctcagaacacttacagactagaaagatttttttttttttttttttttttgtttttcgagatggagtcttgctctttcacccaggctggagtgcagtggcgctatctcggctcactgcaagctccgcctcctgggttcacgccattctcctgcctcag

SEQ ID NO: 530 - DNA, 400 bp, Homo sapiens
  misc_feature (1)..(400): DMR3:122491601
acaatttataatgcagtaaaaggttggaaaacatgcaagttatgcaactactcaagcgaaaacgtctcagcatgatggacaactgtgaaaatctttaaaatgacattaaatgaaataatcccaaaaaggtaatagaggtcatacagaataagagatgtaccacggtatctaaatagctataatcaatatcatttaatcgttagttataagaggtgagctaagcatgcaaagcaatgctttgaccatcacatttttttttttttttttttttttttttttgagacggagtttcgctctgtcgcccaggctggagtgcagtggcgcgatctcgactcactgcaagctccgcctcccgggttcacgccattctcctgcctcagcctcccgtgtagctgggact

SEQ ID NO: 531 - DNA, 200 bp, Homo sapiens
  misc_feature (1)..(200): DMR3:125708601
atatcacgtatctagagtagttaaacttatagagttgcaaaatagaatggtggcccccaggggtgggcgagagagagaggaatggagagtttggtttatgggtgcaatttccattttcaaggataaaactgttctggagatgatggcggtgatggttgctaaacaatgtgaatgtacctaatgtgattaaactgtaaact

SEQ ID NO: 532 - DNA, 400 bp, Homo sapiens
  misc_feature (1)..(400): DMR3:126932501
ttttcctctggtgaggaggccttcccccaccccgcttcttcccagagttagggcccagagaacgtcatcctgagccttgagtccagagagcctgtggtgggcgaccagcagccctgcagagagcctgagcccttcccgcaggaaggagggctgtccttgtggcttaagggttggcactggcactggctcctcaggctggcacatgccttcctgctgccttgctggcatggcagaatggcacatgtgcccagtgaccagatcgggctgacacagctgggcacactcagtgcacgggcgcaagaagggcccttggagcctccctgtccgtttgctgagcaggcccagggcaggcggggcttctctggatgttatttagcagcagccctggctgccgctgggc

SEQ ID NO: 533 - DNA, 600 bp, Homo sapiens
  misc_feature (1)..(600): DMR3:128465301
agcagaggagttgaagagcagaacttctccactggatgtagctacagatgaacctgattctttatctctgtggctggatttttgtcactatgtctcggttagcagttagcacctgctgtcccttgcaggcttgttcctggggcgggagaaagatgcttgccctgcacagttctccatgatggcggtggcagtgggagaggcactgctgttgactgtgttgctggtggggagaggcacggtgggtgtccatggagatggataaggtgtcattatatagtagaggtgaccatgggagcagtgttgatgtggaggtaatggtcatggtgggtgtgagggggagagtaattatgggtgatggtggagttgatcatgatgatggtgatgctggtggtgacagcagcaaggcttgtgcttgagagtaattgatgatggtagtggtggtggtgatggtcatgccagaggagatggtaacagcgagcctttgttgtggttggcagtgatggtgcaggtatgatgaggaggtgatgggaatggctcctagtgagccattggtgtggttggcagtggtgacagtaatggtgatgatgaaggtgaaggtgg

SEQ ID NO: 534 - DNA, 3400 bp, Homo sapiens
  misc_feature (1)..(3400): DMR3:128805501
ggcggtagtacctggtttaatctttactctggtgtgtgttctcattgtctttctcttgatctctttttgtcaagagtttttcatttgttttgttttttgaggtataatacaaatgaaatataacatgctaatcttttttgttgtttaggcaaacttttctcttttttttgagacagagtttcgctcttatcacccaggctggagggcaatggcacgatcttggctcaccgcaacctgcgcctcccaggttcaagcaattctcctgcctcagcctcccaagtagctaggattacaggcatgcaccaccatgcctggctaattttgtatttatagtagagacagggtttctccatgttggtcaggctggtctcaaactcctgacctccggtgatccactgtgcctggctaggcaaacttttcatacagtaaaatgcatagattgaactatatcactcgtgagtcatcacctcacttccctattgaactgtatcattcgtgagtcatcacctcacttccctatatttccattgctctcagaaagttcccagagtacctaagttttatttatagttcaaattttacacacttacctacatgtgaccactacttggatcaagatataagaaatttctagcaccctggagattggactcaatgtcactcgcttatagacagacacatacttaatcacaatatttgtgaggattgtttcagatactctggtgctgaaatttgcttcctgaagtctggtgtcatttgtctttgtgggtggccccacaatctagcctatttcttctggcaccccttgcatacatgctcctggtgctctgcctagcattctcccaaggaatgaatgttttgtctctcacagatatgggacacagcaggacaggaacggttccagtctctcggtgtggccttctacagaggtgcagactgctgcgttctggtatttgatgtgactgcccccaacacattcaaaaccctagatagctggagagatgagtttctcatccaggccagtccccgagatcctgaaaacttcccatttgttgtgttgggaaacaagattgacctcgaaaacagacaagtaagtaccaacgatgatagatattgtcacagacacctgctccccaggggccttgtgaatttggagggttctctgctaagctcacatggctctaggaggtgctggtgggagtcttcattaccatatgccagcccttcaggccaactgcctttaaggaccgggacccaggtgacctgggttaagtccccatcctgcccccagctggctgtgactttgggccattgtcttggctgtctcagcttcacttccctttctgcactttgaaggagggaattcggttttgtcattctcagtagtgccctcccagtacctccaggccatgcctggatctccatgtgtgcagaatattgctttgggctttgagtaaaattgctgtactgtagtttcaaataccatttctgttggaaacatagactctttgattaattacaactaggtttatttctgaccacagatcttttcttaagtgacttagtccttatctcttggctgaaaatgggctaggggttggggaaggaatgagaatgtgtgagtggcataggtgacatcacactagcagtaatggtgaagggactataaaccttaagaccaagctgctgggcatttcctgtcctgggatctctgaggtcccagtaaacactcttcatttcttcccggactggcttcttactccattcacaaatggcttttaagtataactgagggtcagaaggtatgagctgtagaccgagacaggctttgagctctctagctgaatcctagctatcctgagcatagctagcaggacaagtttggacgggtctgcaggtctcctccaacaccctctttccccatgtctgtgtcctcacctgtactacctgtagacgaggggccatgacacttcctggggaggatggagtcagtgctggctgcttctgtcatgagcctatgtgcaccctgcttcttctttcaggtggccacaaagcgggcacaggcctggtgctacagcaaaaacaacattccctactttgagaccagtgccaaggaggccatcaacgtggagcaggcgttccagacgattgcacggaatgcacttaagcaggtgggtctcccacagctgaccagcccactctggtgatgcctgaccactgacccagtccctgcctggcctcctgcccttaatcttcttccctaacccactcttttctgtatagccagaataccctatgtgttcatctgggaaggttatgacatgttctgcttaagcttccagaaatcccactttggggggaataatataaaagatgcagaggctgtgaagtctgaggctgcccttcttttactaggcttgttcttattttctttgctgtgattaggagatcaggtcactgggagaccccgaacagattgctgcttctatttaaggaggaaataaacttgaatatgaatcccagctctgctgcgtaccaatcgttatatctagtttgggcttaaaaaaaaattatggccgggcactgtggctcatgcctgtaatcctagcactttgggaggccaaggcgggctgatcacttgaggtcaggagttcgagaccagcctggccaacatggtgaaaccccctctccactaaaaaatacaaaaaaattagccagacctggtggtggtcgccagtaatcccagctactcgggaggctgaggcaggagaattgcttgaacccaggcggcagaggttgcagtgagccaagatcgtgccactgtactccatcctgggtgacagagtgggactctgtctaaaaaaaattaaaaattaaaataaaaaaaattatatctgaacttctaccccctcacctgaaaaatgggaatacctgcttttgcagggtgattatgaagattaaatgagacagactcttccagctctcacatactgactggtaacttttttccttaggaacagttaagtaaacaacacaaagaaggaagaagatgtaggaaaactattcaaggaatataatacctagaatttcttatttactgtttctgtgattagatacaaccactcatgcgagttgaaagtctgttttgatgtacagctctgttaggggcagtggtgattaaggcaggtcacgaggcctcatcagacagtgtctgggggtggtcagaggtgtggcaggtttgggaggatgcatagaacacttgaagcacatggtggctgtgaagggcaaggcagattctgctgactccaggaagccggctgaatgaaggtaatggctttcagcaggacaaagagttgtttgtaatggttgctccaaggaccagggaaattctggcatgggt

SEQ ID NO: 535 - DNA, 1000 bp, Homo sapiens
  misc_feature (1)..(1000): DMR3:129108301
gccctgactgtccatgtttggctggctgttgccacaatgtgtggaggtgaaagatgagtacttgtcaggccatgcagtccaactcttggttcagaagcctcagttaccacagccacagcattaatagcattgcatgctaattacctgtctacatatattttctccaccagaggtgagtccccagagactgcctcttacttacctttctctctctggtacctagaacagtgcctgggagagagcaggtacctaaggaatcaatgaacaaataaaccatgcacaagttgccatgctatgtaatttacatacagggtgtcagatgggtaattctcagccaacaaccataactaagctcgacagagtaccaccttccaggttccaagggttcttcccttttagccctatttcaactggtctggtgctccaaatggaaggccgtggctcttaagcgatcaagaaataagtccaaagaacaaagagaaatctttagaaatcaacagaaatggagaaagctggtaaacaccaccctaaccaggtgatcaaacaggccccattactagtatggaacgtggcaccgggggctgcctcctgtgctgcaggatgaagcccacaacatcccctaggacgcattcttgccagaatggtttaactttaggctcatcgagtccccacatttctagcttacaggaaatacaaggaataaagaaacaagtgaaaagacaacataaggaaaccatgagaaaaaactacaaggtgactcctacaaaaaaaaaaaaaaatcatggcttgtactgatctgtaaattaatttaaaaaatcagtgtcatttggctgggtgcggtggctcacacctgtaatcccaacactttgggaggccaaggcgggcggatcacgaggtcaggagatcgagaccatcctggctaacatggtgaaaccccatctctactaaaaatacaaaaaattagccgggcgtggtggcgggtgcctgtacttccagctac

SEQ ID NO: 536 - DNA, 1000 bp, Homo sapiens
  misc_feature (1)..(1000): DMR3:131535501
tttaatttcattattatatatttttatgcctgtctcaaactataaaactatttacatctgaagacgagtaaaagttggatgggagaatgaattgttctgcagttttatttctaattttcactcaattttagacacttatttatgttccaggtgccacactagggtttgagggtctatggttcttgcctcaggaaggctgtaatcacgaggggaactaggcatggccaatattaactatgaggtagaatatgacacatgctatagagcagcagtgtcacattacatgggagcttattagcaatgtagactcagacccaactcagagctactgaatcacaatctgccttttaacttgacgctctagtgattcatatgcatattaaaatttgagaagctcttctctagagaatcacaaacagtgaggccagggcataaaaaacatagagactaacttatcttggaggcttctaagaggaggtggcttttaagctgagcatattttaatacatagagaaggggtaggggaatggcatttgaccatcataggcatagtgagttacctgatggagctgaaggaagtgtgtatggcaggtgggggacgagggggtttaggggtagttgcaggattggttgggcatttggttggaaaattggcttgagaccaggtgatggagagtcttgaataccacactaattcatttagcctttattctatcagccttatggatctactgcatgattttggggtaggggcacaggaggaccatgtgatttatggtgatgattctgtagcagagaaaggttgaagctgatatcatacatggactctggagtcatgtagagctgggctttactcctggctctggcatttagtattaactgtacaacccctgggcaagcaatttcaatggcctgagcctcattattaactattattgaagagattgaaaacttgaggcagacttaacaagtgtttgagattccaaaagaaagagggctg

SEQ ID NO: 537 - DNA, 1000 bp, Homo sapiens
  misc_feature (1)..(1000): DMR3:135093801
gatttttaaaatgtgcataatctcatcactataagaaagtgaaatctttaagaacaatatttgttcccactatttgccaatatttttagatgtcactaaccacaggttttcaccatctttcttgatggggtcatgattttccatttatggatgcactataatttattgatctgaccccttattttagggcttttaagctgtaattaattttttcttgctataaacaatattgccatgagtgccctcatagttaaatctttgagctatgtgtgattatttcatttgtataaattccatcaaaagaggagcttgagcaccattaggccatttgcctctctgggtcctacttctccatcaagccctgggaaagagggcaggccagcacacagcgacatcagccttgctggtgtctggctgctgtgaacctgctctgtcccactcccctccatgctgatcatttcaaggttgtaagagccttggagagtgaaggaccaggccctgccccttcccagtctctgcccactggtcccttacttccctgttagctgcattattgcctccttccccagagtccccccatgtccagtgtgtaggctccagaatgtcgggtgtctgtgggggcagatcgacatgtttatgctgtttctcctggggctgggccgtggacaggaggggcctgtcggctgcctcctccacaactcctcccatgtccttcccttgccattctattctgaggcaggcagggccaaggaataagttcagctgagcccctgcttcctgggtgacctaagaaaggcaagcaccttctccagcctcagtttccccctgtgtaaggaagtacagttgttcccagctaaaccttctccctcctgctttccctcttctctgctctctctgtcttcctcagtgctgcagcatcgtacctttcctgacccctctgttggcttaaagctaaggaaccagcccatggggctctcagcagctactggctgtccagttg

SEQ ID NO: 538 - DNA, 400 bp, Homo sapiens
  misc_feature (1)..(400): DMR3:135252701
catgatttatagtcctttgggtatatacccagtaatgggatggctgggtcaaatggtatttccagttctagatccctgaggaatcgccacactgacttccacaatggttgaactagtttacagtcccaccaacagtgtaaaagtgttcctatttctccacatcctctccagcacctgttgtttcctgactttttaatgattgccattctaactggtgtgagatggtatgtcattgtggttttgatttgcatttctctgatggccagtgatggtgagcattttttcatgtgttttttggctgcataaatgtcttcttttgagaagtgtctgttcatgtcctttgcccactttttgatggggttgtttttttcttgtaaatttgtttgagttcattgtagat

SEQ ID NO: 539 - DNA, 200 bp, Homo sapiens
  misc_feature (1)..(200): DMR3:135502601
tgccagtagaagctcaatttagtagttccctaaattgtagtaggtcgaagctacaagggagagagacagtggtgggagggcgccctgggagagcgcactaaggaggaggtgcagtccagggatggtccccgtgacgcccagcagtgacagcaggcagagccctaggaccacagtagagtggctgcttgtggccctcacct

SEQ ID NO: 540 - DNA, 1400 bp, Homo sapiens
  misc_feature (1)..(1400): DMR3:137878401
aaatgtggggtgcaagcctccacacagaatccccactgaggtgctgcctagtggagctgtgagaagagggccaccatcctccagacaccagaatggtagatccactgacagcttgcactgtgagcctgaaaaagccacagacactcaacactagcccatgaaagcagccaggaaggaggctgtaccctacaaagccacaggggcagagctaccgaagaccatgggaacccacctctttcatcagtgtgacccagatccaaaacgaataaatgaattcagtaaagtttcaagacacagaatcaacctacaaaaatcagtagtagttctatatgccaatagcacactatctaaaaaagaatcaagaaagaagttctatttataatagctaccaaaaaaaaaacactaggaataagcttaaccaaggaagtgaaagatatctactataaaaactataaaacattgatgaaagaaattcaagatagcacaaataaattgaaagttatctgtgttcatggattggaagaatcaatattgttaaaatgtccatactacccatgatgttgtatagattcaacacacttcctatcaaaatattaatgacattcttcatagaaatataagaacaatcctaaaattcgtatggaaccactaaagacatcaaatagacaaagcaatcctgagcaaaaagcataaagctggagacaacacactgacttcaaaatacacaaaaaagccataataatgcaatcagcatggtactggcataaaaacagacacatagaccaatggagcagaaagaaatccagaaataaatccacacatttacagtcaattaattgtcaacaaaggtgtcaagaacacccatggggaataggacagtctcttcaataaatggtgctgggaaaactgaatattcacatgtggaaaaatgaaagacctctatctttcaccatattaaaaaaaactcaaaatggattaaagactgaaatgtaagacccaaaactataaactactagaagaaaacactggggaaacacttcatgaaattggtctgggcaagaattttttggacaggacctcagaagcacaggcaacaaaagcaaaatagacaaatgggacaaaccaaaaaccttctgcatagcaaaggaaacaatcaacagagtgaagagacaatcttaagaatgggaaaaaatattcacaaactttccatctgacaagggattaatatttagtatacacaaggaattcaaacaactcaatgccaaaaaaaccccacaaaaaatcagattttaaaataagcaaaagacctgaatagacatttctcaaaataagacatacaaatcaccaggtaaatgacaaaatgctcaacatcactaatcatcagggaaatgcaaatcaaa

SEQ ID NO: 541 - DNA, 1700 bp, Homo sapiens
  misc_feature (1)..(1700): DMR3:139742301
agttaccctgagggatagttcatttagaaaaagcaagatagatgcttgattatgccccctctcttaaccaatttttaagataattagttggttcatttgcatcttccaatgatgactaaatagtttatttttgatttttataaactgatgaatttagtcatatttgatgtcctttaatctattatagttatcattattgaagctcaagtggcttccctttggccagtgggagcatcttcaggttttctcctgagtcctttgacatgaccctaaaagtctttcatagttcctttgctttttaatgtcccagactcaacttgtggaattcctgccacagactagtcattaaacatttctccgaggattcttgctttcttttaggaaaagcggacattagcagcgctcgttgtcactggtttagcctttgtttctaggcttttaaaatgaacagagatggaaatgagtggatatatatttaagatgaaatatattctgagttaatactgttgctacaatttaggttaggattatggaattttacttcactttattgatcttatgtctatatgccttttctcccttactggaaatattatttctcaatgtcaccagataattactcatgtgcttcactaacaatacacatgcaatggtctaagaataacagtacaaacgccaccatggacattatgatttaagcattgcatatcaatttaaatattttttacagttatttttatccttaggatatatttcactagggatggatgtagagtcaaattactgtgtttttaaattgtttggaataattctgctctgtgtggttatactactcactgaatacagagttaggttcacttatttcattttgcttttgattttaatgaattacttttctaaaatttaatttgtcttttacttatgtagaacatttatggggttccaaaattaactttataaagcaaagtatatttaaagaagtctagctctgacctacagtacttttaatataagcaaatatattttatatatttataatcctttttgatagataattgatagcaaactatgtattttttctaccttgcgttttgcacttcatatatccctgaattctttcataatggtatatatgttcctccttcctttttatacctgatatcatttcttgtcagtatcactatgccgtctctagccatctattttctaacttgaagtgttgagtctttgtgtcttggagagtagatcttccagcttataaggactgttaacacaggttccgagtgaggacccaaagagctctacggtaaggagtgggtctggtcttcctggtgggtatcctgactgctgcatcttgttgctcaataaaaattagttgaatcaaactgcttcaatatgttttagacatcctcacaattattagaacggtcactgcaacaataggaaccactactttcacaccaaatatatctataacatttgatccctttggctgacaaagatagttgtgtctgaaaattactatgccgttggaatttcttctgggaaacctgtaatttctggggatcatgcaggcttaagaataaaaacattattggcaggattcatcttaatggaaagttgttctgtaagccaggaaggggcttatcatttctctcccatagcattattttactggctgatcaattcatttattcatg

SEQ ID NO: 542 - DNA, 300 bp, Homo sapiens
  misc_feature (1)..(300): DMR3:141658901
tggactgaaatcaaggagttggcagggctgtgtttccttacggaggctttggggagaattctttctccacttttccagcttctagaggctgcccaccttccttggcttgagtctccttacctccccattaaaggcttcaacaggtcgcaaaatcctgctcatttcatctctctctctctctctctctctctctctctctctctctctctctctctcctctctctctctctctctctctctctatcttccttatctctctctgacctaacctaaaaggttctcaatgtcacgttctcagac

SEQ ID NO: 543 - DNA, 2400 bp, Homo sapiens
  misc_feature (1)..(2400): DMR3:142042801
ttgatctcggctcaccacaacctctgcctcccgggttcaagcaattctcctgccgcagcctcccaagtggctcggattacaagcatgggccaccatgcccgactaatttttttgtatttttagtagagacggtttttctccttgttggtaagtctggtctcgaactcccgacctcaggtgatctgcccgcctcggcctcccaaagtgctgggattacaggcgtgagccaccgtgcccggcgatgcttattttattattttttttgagacggagtctcgctctgtcgcccaggctggagtgcagtggcacgatctcggctcactgcaagctccgcctcccgggttcacgccattctcctgcctcagcctcccaagtagctgggactacaggctcctgccaccacgcccggctaatttttttgtatttttagtagagacggggtttcactgtgttagccaggatggtctcgatctcctaacctcgtgatccacccacctcggcctcccaaagtgctgggattacaggcgtgagccaccgcgcccggccgcttatttttactcttatttatttatttatttttggagactgagtctcactctatcacccaggctggagtgcagtggtgcgatcttggctcactgcaacctccacctcctgggttcaagcgattctcctgcctcagcctcccaagtagctgggattacaggcgcatgccaccacactcggctaatttatttttacaagcagataaaggtttcttttattttaatggctgatctatgtaatcacggaggccagtatgtacagacaaagggggagcttttatttcttggtctcttcctccttagacaaagtcttgatgatctcctccttcttggcctgcaggcgttcttcaccgtgcttgcgtgcttccttggtcttagacctgggggcctcagcctggtcagccaggagcttcttgcgggccttgtctgccttcagcttgtggatgtgctccatgagaatccgcttgtttttgaacacatttcccttcaccttcaggtacaggctgtgatacatatggcgatcaatcttcttagattcacagtatcttctaagcagccggcgcagaatccacatgaccttctctggcattcgcgcattggctgtacccttccgcttacctatgccactgtgcctgccttccggcgggccaaggtctttttccggcatcaagcccaggaatggactgtcaacaggcttgctgatgatcagctcatctttgatcagcttccgcatctgctgacgggagttggcattggcaatttcactggtctcattcgggtccaaccagaccttcttcttgccacagcagaggacagaagaggcgagcctcttctgaagcctgagcatactcatggctgcggcggcggcagcagcaaaagggttttttttttttttttttttttttttgagccggagtctcgctctgtcgccaggctggagtgcagtggcgcgatcttggctcactgcaacctctgcctcccccggattcaagtgaatctcctgcctcagcctcccaagtagctgggactacaggcgtgcaccaccacgcccagataatttctgtatttttactagagatggggtttcatcatgttggccaggatggtctcgatctgttgacctcatgatctgcccatctcggcttcccaaagtgctgggattacaggtgtgagctgccacacccggcctaatttttgtattttttagtagagacagagtttcaccacgttggccaggctggtctcgaactcttgacctcaaatgatctgcccacctcggcttcccaaagtgctgggattacaggcgtgagccaccgtgcccggccctaaataatttcttttaaaattccaacacagaagagtacaaaggatgatccaagatcctgtgaaatcatccttatttcttctctctctaggtccctgaagtcaaagtgtatttgggatcaaatctgagacctccttcttattagttatacaatcttagggaagtaatttaacctctttacctccgtgttcttgggaataaccatttacttagatttaattagctaattcatgaaggctttaatatagaatctggtactcaatatatatttagttattattattataattgctgacatctcagttggtttccttctatggcaatctgctatcttctacatatttttcagattcattaaacaaaccccatgagaataaagaaaataccatctaatattgtttcctttctcaactttttcaaagtataatttttttctgtttcttaaatatcagatgtccttcttttattttgcagaatctctttccttttttttttttttttgagacggagtttcactcttgttgcccaggc

SEQ ID NO: 544 - DNA, 100 bp, Homo sapiens
  misc_feature (1)..(100): DMR3:142269101
taatttttgtagacaaaatacattttatccttgtttatatatattgtgtccacttatttgacacttcaaagatgttttttggagtactttggcccacttt

SEQ ID NO: 545 - DNA, 300 bp, Homo sapiens
  misc_feature (1)..(300): DMR3:144093001
tttttggatgtgattaacatttaagtcattagaatataattaaagcagattactttccataatgtgggtgggcctcatccagttagctgaaggcctgaatagaaagattgacctcccctgaagaaggggcaattctgccaacagaattccatcagacttacactgcaactttaactcttccctgggtctcaggcccactgattatcctgaagattttgaccttgccagcctttacgtctgtgtaagcaaattctatatatacagatagatagataaatgatagatagatagataaatctc

SEQ ID NO: 546 - DNA, 2000 bp, Homo sapiens
  misc_feature (1)..(2000): DMR3:145893501
caattgtgaaggttaaacaaatatgggaaatccacaagttagaattatgcacagctgttaaaataaggctcattatgagtttctattactatgaaaaattattgttctgtaaatgtttattgaacagaacaggattcctttgaatgcacaaattatgatcacgagtaccacatatcctcatccaatatatcttttcattcatgtaaattcaaagttttcagtgtttttctgttttgttttctgaaaatgtactattaaattaatgctacatcttataatcaatgggattttatactcaagagaaaccagttttaaaaatttataaaaaagccttctgaaataaaagtcaaaaaatgttaaaagttatctgaagtagtggaattgcggatgatttctttcttttacttttctgcataacttaacaaacagtattaacaacacaaactctttcagagaagtctgcctattgtccattctgtcacataattgaacacctttttgtatcatctattttcattccaatcagcaatattttattttttagttaattcttctaatatcccacatttttcctcccctttttcagtttaaattctggtctttgtttgtttgcctgcttgttcgttttcttcctatttgtttcccaagactgcagtaactcattaaagtttactcttgatcctccctttgttctcctcatggaagcctttctctgatctattctcacaggtctctagactggtaatttctcacatgatctcaaaaagtgacatcttggccaggcgtggtggctcatgcctgtaatcccagcactttgagaggccgaggcaggtggttcacctgaggtcaggagtccaagaccagcctggccaacatggtgaaaccctgtctctaccaaaatataaaatattagttgggtgtagtggcacttgcctgtaatcccagctaccggggaggctaaggcaggagaattgcttggacccgggaggtggaggttgcagtgagtcgagctcatgccaatgcactccagcgtggatgacagagtgagactccttctcgaaaaaaaaaacaaaaagtaacatctcaaactgaaaaaattctttagtgccatagctctgttcctgacatcctgtaagacaaaaccaccaggagtctgttttcatgaagaaatgaggagtttattgggaggaagtttatattaagtggacagaatatcctgcttatgtctatgaataataggaaagcttaagtttatgaaaggcatgtgtttgtcactcaaacatgtcttagaagactagtactcatcagtaaaaatgccagtacataagattactttttcactattgaactttcatagttgtgcacaatgcctctccaagcagaacaaaacatgtttcatagaatgtaaattttatgtaaggagtgaaggagagttgtcatcaaggatgttaacatacagtatgataaccagctgagcctctgaactagcttaattatatgaagctagagcacaatttcccttgactatgagattgctggaaaaatggtaacaagtaacaagtgttgatggctcatcaaatagcaccaaaccccaaacagataaagtaaataagatatgagagtcacagtggtaaaatgaggagaatattctgtccagcactgaaccgacactatactgtatgttatgtcaatttaataattaagaaagtattttaaaatttcttcctaaaatggatgaataaaaattactattttctcaaactccacagaaatgcagttttttaagaaattagagtgtacttgaacccacaaaggactgcgaggcatagtagtaagtacaagagcttaagtgtgggactgtctggattctatattggctctgctaacttgggcaagttgcttaacctctctatacctcaatctcttcattggtgaaaagggaataataataaaacctaatgcaaagcataattatattaattaaataattcgttagttat

SEQ ID NO: 547 - DNA, 100 bp, Homo sapiens
  misc_feature (1)..(100): DMR3:147251601
gctaagctatgagggcgcaaaggcataagaatgatacaatggactttagggactcagaggaaaggttgggagaggggtgagagataaaagtacatattgg

SEQ ID NO: 548 - DNA, 5600 bp, Homo sapiens
  misc_feature (1)..(5600): DMR3:151613001
acaaaatcaatgtacaaaaatcacaagtattcttatacaccaataacagacaaacagagagccaaatcatgagtgaactcccattcataattgcttcaaagagaataaaatacctaagaatccaacttacaagggatgtgaaggacctcttcaaggagaactataaaccactgctcaatgaacaaatggaagaacattccatgctcatgggtaggaagaatcaatatcgtgaaaatggccatactgccaaaggtaatttatagattcaatgccatccccatcaagctaccaatgactttcttcacagaattggaaaaaactactttaaagttcatatggaaccaaaaaaagagcccgcatcgccaagtcaatcctaagccaaaagaacaaagctggaggcatcacgctacctgacttcaaactatactacaaggctacagtaaccaaaacagcatggtactggtaccaaaacagagatatagaccaatggaacagaacagagccctgagaaataatgacacatatctacaactatctgatctttgacaaacctgacaaaaacaagcaatggggaaaggattccctatttaataaatggtgctgggaaaactggctagccatatgtagaaagctgaaactggatcccttccttacaccttatacaaaaattaattcaagatggattaaagacttaagtgttagacctacaaccataaaaaccctagaagaaaacttaggcaataccattcaggacataggcatgggcaaggacttcatgtctaaaacaccaaaagcaatggcaacaaaagccaaaattgacaaatgggatctaattaaactaaagagcttctgcacagcaaaagaaactaccatcagaatgaacaggcaacctacagaatgggagaaaatttttgcaacctactcatctgacaaagggctaatatccagaatctacaatgaactcaaacaaatttacaagaaaaaacaaccccatcaaaaagtgggcaaaggatatgaatagacacttctcaaaagaagacatttatgcaggcaaaaaacacatgaaaaaatgctcatcatcactggccatcagataaatgcaaatcaaaaccacaatgagataccatctcacaccagttagaatggcgatcactaaaaagtcaggaaacaacaggtgctggaggggatgtggagaaataggaacacttttacactgttggtgggactgtaacctagttcaatcactgtggaagtcagtgtggcgattcctcagggatctagaactagaaataccatttgacccagccatcccattactgggtatatacccaaaggactataaatcatgctgctataaagacacatgcacacgtatgtttatagcggcactattcacactagcaaagacttggaaccaacctaaatgtccaacaacgatagactggattaagaaaatgtggcacatatataccatgggatactatgcagccataaaatatgatgagttcatgtcctttgtagggacatggatgaaactggaaaccatcattctcagcaaactatcgcaaggacaaaaaaccaaacaccgcatgctgtcactcataggtgggaattgaacaatgagaacacatggacacaggaaggggaacatcacacaccggggactgttgtggggtggggagaggggggagggatagcattaggcgacatacctaatgctaaatgacaagttaatgggtgcagcacaccaacatggcacatgtatatatatgtaacaaacctgcacgttgtgcacatgtaccctaaaacttaaagtgtaataataataaaataaaaaaataagaaaaggtaaagtgaagtataggaattggaagtgaggtaacagaaacagtaaaaaaaaaaaaaaagaagcctgtaatgtaataattatggtgatatcaatgaaaattgaaacttttactaaaagcaatgacagctattcttgtaatgatagatgactttggaaagcctatgaacttctaaaatatgtttaaaagcatttgctaaggtcagaaaaattttaatgccacattttttggtaagttttgtttacatatttacatttgaaaaaatatgcatgaaacctctattttgggtcagacaatgttctaccctctaatgttacatttgattaaaatgcatatgttaactgaaagctacttcatttataagattgaatgtcaaggtttttttgtgagttatagctatgaaaagtaatttacccaaaatgatggtgtgttttttcacctttaatgtctatatcactatttttaatttataattttcttaaacaatttttatatttatttcaccatataaatacagacttaattttcattttaaatttctcttattacatattaaaagctagtacctaaaaagaactacttttctcctatattgttccatgtatgctgtgtcttaattactttactcttcttttacttaaaataaattagagaactctgaatatgtgaagaaatttgcagtaatgggaaataagacattcaaattatgctgggcatatgaaataagcttaatgagaacctaacagtgcggaagtaggaaaaattttaagtacgctctttatggatcaaataaactacaaagggaaggaaatatgaagcgctgaaaggaaactataaaaagcaagggcagataaaaattatgagctttaagggagtgattaaatagagctttaagggagtgattaaaatagcatacaaaggtcgagaagaatcctttttaggataaagatagaaaaatattaacagtaattcttaaaatggcaaaatattcagttaagcatttaactatcaactgtgacaacttggagttatgttaatttatagggattcgtttatttatccacttaccaaatatttattttgtttttgtttgtttggttggttttgttttttgaggtttttttttttttttttgagattaagtttcactcttgttgcccaggctggagtgcaatggcgtgatctcggctcaccacaacctccgcctcctgggttcaagtgattctcctgcctcagcctcccaagtagctgggattacaggcatgcgccaccacacccagctaattttgtatttttagtagagacagggtttctccatgttggtcaggctggtctcgaactcccgacctcaggaagtgatcctcccgcctcagcctcccaaaggcctgggattacaggcatgagccaccgtgcctggcactaaatatttattttgttattactcttttattttctattttgtttcattcatccaacatatatttcagtcttcaaaaataatgccaattaagtgtaacttaatgtatagaattaactaaaatctaacatataaaaacatagaatggtgttattatatccttttcttttttatggacattcattaagtaaaaacatctcttaaaggagagagtggttttgtatcttggagaattctttcatagaaaacacacacttccaaaataaatacttaggcccctttaaaggatattttaaacatagaaaaggcagaatatcaatgcaaaagactaatatatttgggcacataaaagttaaacaaaaaccttttctacattaaaatatttaaattcattattgacaagctgagtaaaaatgctttccacaaataagttaactgattgattaatattctaatttataaagagcatctatccattcatgcatctatgtatcatctatagaaacctctacgaaatgcgtcttattctgttttctgttgctataactgaatatctgagactgggtaagttataaagaaaaaaaatattttttacaattctggagactgggaagttcaaggttgaggggtggcatctggtaagggcctttttacaggtaaggaccctctgtagagtttcagggtggcacaggacatcacatagtgagaaggcaaggctgcctgaagcctttagggcccaatgcctgcactggtgagcccaggatgctggaaatggagtcaaaggagattattctccagctgtaagatttaaagtagttttccctgttggggtttagacttacttgggacttgatactactttcttcttctcctcttcttcttctccccctccccctcccctctcttcctcctcctctgcctcctcctccttctttcctcctcctcctcctcttcttccccctcttcttcttcttcctcctcctcttcttctccttctcttcttcttcttcttcttcttcttcttcttcttcttcttcttcttcttcttcttcttcccctcctcctcctccccctcctcctcctcctcctcctccttctccttcttctcccttttcttctctttcttcatcttcttttttttttgttggggggatggctatttctccctgaaggaatgggaatgcttgttctattcctgtctcacaattgtatttttggaagtagataacttgtttaatttcaaaggttcataaccgaaggagaatttacttcaagatgaattgtcacttgagtatcacccatatctgatgcagatgaaactctggactttgaacttttgagttggtgctgaagtgaattaagactttggggatgtgagggtagaatgaatctacttgtatgggagaagaatatgagttttggggggccaggagcaaagtgttatagtgtgaatatttgtctcctttgaaacttatgttgaaacttaatccccagtgtaacagtattaagaggtgggccttttaaaagtgattgggtcatgagggttctgccctcatgaatggataaataggttaatgaattaataggttatcatgggagagggttagttatcacaagagtgattatgttataaaagccagattagcatgctctagccccctcatcatgaagcatcctgcatcgaataaatggtcaagaacaagtataaacaattcagaaaataaatagacatgtctgttatagactgaatgttcatgttccctcacattcaaagatttaaacctaatccccagtgtgatgaggaggtggggcctttgggagttaattaggttaactaggtaatgaaacccttattaatgggatcagtgaccttgtaagaagagacacaagagagatgatctctctctctcactgtgggaggatacagcaagatgttggccatcagcaaaccaggaagagagtcgtcaccagtaactgaagcgctggcaccttgctcttggacatctgtctccagaatgttaggaaatacatttctattgttttaaccacccagtctatgttatatttgttacagccacccaaactgattaagatgctaaaatgttttaaaatttctttgaaacaactttcccatgaaactatttagtaatggacataaagaagttttaaaatgtctatactgtttgccgggcgcggtggctcacgcctgtaatcccaacactttgggaggccgaggcgggtggatcatgaggtcaggagatcaagaccatcctggctaacacagtgaaaccccgtctctactaaaaatacaaaaaattagccgggcgtggtggtgg

SEQ ID NO: 549 - DNA, 1100 bp, Homo sapiens
  misc_feature (1)..(1100): DMR3:151651201
gactgagagtgaaggagaaataagtatcccggtgaaatttgggatgccattctcagaagagagaaggaaaggatcgatcgttatgggaagataacacacacacatacacgcacacacacgtataaatataataacttactaaatggtgttctctgggtatttccaactttctgatgaagataatcatatttttgaaggtataacgctttcatttttcttttatatttcttgtaacatttagcatatgttaaccttaccctagactctcaatatatagaacacttttctatagtttttaatacatagatttagtatctcaaataattatttattgtgaaatgtttaatagtctaatccaaactgcagcttatggaaagaagtaaatgctgatcacattgctgtgaacgtttgtgactaaaatattccttagtttgttatctatatgattctgtccatctacccattaaacaaagtgaaagggtatctatctagtgtagaatttttcgacttcaacgtgcttatgacttacctgaattatctgggatcttgtttaaatgtagaatctgattcagcagatctgggatgctctgtaatctggatttctactaggcaatgcctatcctactagtttgaggaccacactttgagtagcaaagtcaaggtgccatatgcctcaaacttttattgtgcaattaaaatggtcactcatggctgggcgcgatggctcacgcctgtaatcccagcactttgggaggctgaggcaggcagaaaacctgaggtcaggagttcaagaccagcctggccaacatggtgaatggaccctgtaatatctattgttcttccaggtacgagactagataattaagagagtcttagaaagattttcaatatcaatgttgatcagagaacttcagtgtctgaaagtcttctgtgtccactctgattgaagagtacaacagccttggacccaggcatcctaggttaaaatctagtgctgtgtctgtaagttttgcatgtatcattaagttttatatgcaattctaaggataatctaacagtgtgagagaagacggctttcatcatccttgtgttcatagtgg

SEQ ID NO: 550 - DNA, 700 bp, Homo sapiens
  misc_feature (1)..(700): DMR3:151871201
ccaattcttggactcaagtgatccgcctgccttggtctcccaaagtactgaaattacaggtgtgagtcaccatgcccggccagtactgcaaactttcactgcctttcaaacttccattgattctcaagcagtgcatctcaacatgttatatgtaaaaaaaaaaaaaagacaaaacaaaaaaactttgccccctcaaaatttgatgtgctatactgaatagaaatagtttctgaggaggtttctactctcacaggcagaactggctacatatttagtagagcccagtgcaaaagaaatatatggggtcccttgttaagaagttatgaaacattttaattaagaatgtgacagtagagcattaactcaactgtgtgatcttttttgagtgtgaagcactgtgagactacacagtagcataccatgaaacccaccctgctcacagggtcataattctgaatccagccttgttcccgtgcagctatcattttgcagacctgcataaagctttgtagcagaaatactcgtgaccttttagtaagtctttcccagtaacactctagtatctcaactgagagcattcggaggaaacaggaagtaggacttgggagggaaacaaggctaccaggctacagtctagatgacgtgttctatgaaaaaggagaagcatagaccaatttttgtcttagcagccagagtgaga

SEQ ID NO: 551 - DNA, 600 bp, Homo sapiens
  misc_feature (1)..(600): DMR3:152296701
ttttcaaatgtatgtttcagtgtgttcatgtgttgtattcatatatgtgttcatgtgtgtgtgtttgtatattttgtaccctagaagtaatccaaatcctgatgcagcagttgataatttagtttaccaatatttttggaactccatctattttgcatcattatggctaagccatggggttactgagatgaataatatattttttctgtccttaaaaacatatggtctagtgggtcagatatataaggaaataaaacactgtatagggcataggtgcagagataattcagagaaggcagtattacgatatggatggatagagatggggataatgacatcttggtagctttttggaggaagtaacatcttagctggctttagaggaagaaaatagttacatgtgaggcacttgaagattctgaagagaaggagtaaagacattgttgaccatgcaggtggtccattctcaaggcatgaaatcattgagtaattcttaatgcagaacaaagtttcaggaagatagacacagcttacagtttatgactggacctttgttttttttttttttttttttatagaaactggcattaagacctagga

SEQ ID NO: 552 - DNA, 1200 bp, Homo sapiens
  misc_feature (1)..(1200): DMR3:153449201
atacctgtgttctttggtcacgtttattttttacttattcattggtaagaacgctttatatacctgaatattaattctttactattcatcttctaaatactttttagaaaacttattttctgctttaaaaattatgtatggtatgtttattttctatatagaatgtttccatttttatgcagtaattttttatgttgttctagtttctggcttaattttcatgttgagaaagagcattccaaacccaaaataattaaagtgattttctgtattctcttctattgattttatggctttgttactaaaattaaatatttaataaatctataatttggtgtccagtgagaagtattgatctttttttaaatggttttacatttttcaatatttctattaaagaacaaaatttatattacacctttttcatttactaaattgacatgtacacttgagtctttttatttttattttattactatttttttgagatggagtttcactcttgtcacccaggctggagtacggtggcgtggatcttggctcactgcaacgtccacctcccaggttcaagcgattctcctgcctcagcctcccaagtagctagaattacaggcgcgggccaccacacccagctaatttttttgtatttttcgtaaggatggggttttgccatgttggccaggctgatctcgacctcctgacctcaggtgacctgcccgcctcgtcctcccaaagtgctggaattacaggcctgagccaccatgcctggcccttgagtctttttatgaactgttagtccatttctcgatctttttgtcaagcatattattttaatatctactagggaaaatcttttatttccagaatttttctagctgttttacgtttattcttctaaatgggttttttttaaaaaatcactttttaaacataattatatgactacattcttattgtaaacatttaaaacgatatatagaatgacatacgataatctcctcttcttacttccctattctacttttcttcccagaagtaataatggctaatactcttcagtgtatgtttctagaacattttctattcatttacttaaacgtatatgcatatgtacattttaacataaatggagccacacaataattattgctttgggctttttaaattttgtatttctcttagatctatgtcagtatatgg

SEQ ID NO: 553 - DNA, 2300 bp, Homo sapiens
  misc_feature (1)..(2300): DMR3:153998101
tccaggtttagtcttgggagagtgtacgtgtcgaggaatttatccatttcttctagattttctagtttatttgcgtagaggtgtttgtagtattctctgatggtagtttgtatttctgtgggatcagtggtgatatcccctttatcattttttattgcatctatttgattcttctctctttttttctttattagtcttgctagcagtctattaagtttgttgatcctttcaaaaaaccagctcctggattcattaattttttgaagagttttttgtgtctctatttccttcagttctgctctgattttagttaattcttggcttctgctagcttttgaatgtgtttgctcttgcttttctagttcttttaattgtgaagttagggtgtcaattttggatctttcctgctttctcttgtgggcatgtagacagaaaaggcctttgacaaaattcaacaacccttcatgctaaaaactctcaataaattaggtattgacgagacgtagctcaaaataataagagctatctatgacaaacccacagccaatatcatactgaatgggcaaaaactggaagcattccctttgaaaactggcacaagacagggatgccctccctcaccactcctattcaacatagtgttggaagttctggccagggcaattaggcaggagaaggaaataaagggtattcaattaggaaaagaggaagtgaaattgtccctgtttgcagacgacatgattgtatatctagaaaaccccattgtctcagcccaaaatctccttcagctgataagcaacttcagcaaagtctcaggatacaaaatcaatgtacaaaaatcacaagcattcttatacaccaataacagacaaacagagagccaaatcatgagtgaactcccattcacaattgcttcaaagagaataaaatacctaggaatccaacttacaagggacatgaaggacctcttcaaggagaactacaaaccactgctcaatgaaataaaagaggatacaaacaaatggaagaacattccatgctcatgggtaggaagaatcaatatcatgaaaatggccatactgcccaaggtaatttatagattcaatgccatccccatcaagctaccaatgactttcttcacagaattggaaaaaactactttaaagttcatatggaaccaaaaaagagcccacatcgccaagtcaatcctaagccaaaagaacaaagctggaggcatcacgctacctgacttcaaactatactacaaggctacagtaaccaaaacagcatggtactggtaccaaaacagagatatagatcaatggaacagaacagagccctcagaaataacgccacatatctacaactatctgatctttgacaaacctgagagaaacaagcaatggggaaaggattccctatttaataaatggtgctgggaaaactggctagccatatgtagaaagctgaaactggatcccttccttacaccttatacaaaaattaattcaagatggattaaagacttaaacgttagacctaaaaccataaaaaccctagaagaaaacctaggcattaccattcagaacacaggcatgggcaaggacttcatgtctaaaacaccaaaagcaatggcaacaaaagccaaaattgacaaatgggatctaattaaactaaagagcttctgcacagcaaaagaaactaccatcagagtgaacaggcaacctacacaatgggagaaaattttcacaacctactcatctgacaaagggctaatatccagaatctacaatgaactcaaacaaatttacaagaaaaaaacaaacaaccccatcaaaaagtgggcgaaggacatgaacagatacttctcaaaagaagacatttatgcagccaaaaaacacatgaaaaagtgctcaccatcactggacatcagagaaatgcaaatcaaaaccacaatgagataccatctcacaccagttagaatggcaatcattaaaaagtcaggaaacaacaggtgctcgagaggatgtggaggaataggaacacttctacactattggtgggactgtaaactagttcaaccattgtggaagtcagtgtggcgattcctcagggatctagaactacaaataccatttgacccagccatcccattactgggtatatacccaaaggactataaatcatgctgctataaagacacatgcacacgtatgtttattgaggctctattcacaatagcaaagacttggaaccaatccaaatgtccaacaacgatagactggattaagaaaatgtgg

SEQ ID NO: 554 - DNA, 300 bp, Homo sapiens
  misc_feature (1)..(300): DMR3:154628401
atcctatcattcagggcaatctggatggaactggaggatattatttggatgaaaaaaggttgaacactgcagttctcactcatatattgaggctgaagaaagttgatttcatagaagtaaaaactagaaaaaagggcactagagattaggaagggtaggggaaagagggagatagggatagatttgttaaagaacacaaaattacagctagataagaggaatgagttctagtgttctatatcactgtaaaatgactactgttaacattaatataatttcaaatagctacaaggaggatat

SEQ ID NO: 555 - DNA, 800 bp, Homo sapiens
  misc_feature (1)..(800): DMR3:155510501
tcctttccatgtttagcgcttccttcaggagctcttttagggcaggcctggtggtgacaaaatctctcagcatttgcttgtctataaagtattttatttctccttcacttatgaagcttagtttggctggatatgaaattctgggttgaaaattcttttctttaagaatgttgaatattggcccccactctcttctggcttgtagggtttctgccgagagatccgctgttagtctgatgggctttcgtttgagggtaacccgacctttccctctggctgcccttaacattttttccttcatttcaactttggtgaatctgacaattatgtgtcttggagttgctcttctcgaggagtatctttgtggcgttctctgtatttcctgaatctgaacattggcctgccttgctagattggggaagttctcctggataatatcctgcagagtgttttccaacttggttccattctccacatcactttcaggtacaccaatcatacgtagatttggtcttttcacatagtcccatatttcttggaggctttgctcatttctttttattcttttttctctaaacttcccttctcgcttcatttcattcatttcatcttccattgctgataccctttcttccagttgatcgcatcggctcctgaggcttctgcattcttcacgtagttctcgagccttgcttttcagctccatcagctcctttaagcacttctctgtattggttattctagttatacattcttctaaattttttcaaagttttcaacttctttgcctttggtttgaa

SEQ ID NO: 556 - DNA, 200 bp, Homo sapiens
  misc_feature (1)..(200): DMR3:157495901
acatctcctagacccacttccttgaaccctttcttccagaacctggacacagaaaccagtgcttacctcttggttgggctgccttgctacgctagcagtagaagttccctgctctgtcagtcaaaaaggtgacctcagtacttaccctactcctacgtactctataatcaagtagcaataaaataaagatgctgcttagg

SEQ ID NO: 557 - DNA, 800 bp, Homo sapiens
  misc_feature (1)..(800): DMR3:159746701
tctttccctatatcctgcaatattcactctctttccagctattctataccaaactgccttcacttgcgggagatggaccatggtttcttacatctccaagcttttgaccatactgttcccccaaattggaatatccttctgtctttcagcctttggggaacttcagcaacttttgattatacctcaagacccaattcaagtatgattcctttgggaaggcttctttgagctgtccacattgagttaaacacctctccaataccttttccatagcactcttttactatgcccaccctaatactttgaaacccaactgttaactgtgagtactttttgtttcctttatgggccatgaactctttgacctctttcagctctctctccccagatatccaacccagtacctggcacatagtagatatttggatgaaacagtaactgcatgaatagagaaatggataaatgaatactatgtcatctccttaaagtagcacctccctaccaagggacttctctagaagtctgggccaacagtcttggatctgagaagctcctccagtcttttcctctaaactcctctccttaacccacctgatgcatctggctccagctacataacccaatcttccttgtctctgtgagtccttcctatttaatgctttatctagacaaatgtttcccagagtgtaggagagggtaatttttaagtgatactcagataaatgtcttttggcagacttgtatttacattcatttatatttgggcgaaaacttagcacataagacctgtgatttcatgc

SEQ ID NO: 558 - DNA, 1900 bp, Homo sapiens
  misc_feature (1)..(1900): DMR3:159965301
tcatttgattaataacttggtaggtcgaaaactaaaggttggaaattattctgttcctatattttggagacatttcttcattttcttttagtttccagttttgctgttggacaatccagaactgttctgattcatgatccttttctacataagttgttttcttttctccctagacatttgtaggatcttatctatgtcccctgtgttgtggaattttgtgagaatatgtatgaatctattttcttttcttttcttttcttttcttttctttttttttttttgagtcagagtctcgctctgtcacacaggctggagcgcagtggcgccatcttggctcactgcaacctccacctcctgagttcaagagattctcctgcctcagcctcccaagtagctgagactacagccgcccgccaccacacctggctaatttttgtatttttagtagagatggggtttcaccaccttggccaagatggtctccatctcttgacctcatgatccacctgcttcggcctcccaaagtgctaggattacaggcatgagccaccgtgcccggcagagtctattttcatctatgttgatggccactcagtagactctttcaatttcctttagttctgggaaattttgtcaaatgatttcattgattatttcgtctccattttttttttagttccacattataaatcttctttaaattaccaatttaatgagcaaaaaataaaaatgtttaaagtttcaattttcgtttctctttggtaattaatgatgttgagtagatttccatgtctttactatttttatttcctatgttagttatcaatttgtactctattacattttcttcttgtctagtaggactatacttaaaccaacattgctacaaacagcctacttttaagtaaaaattcttcagccattattaaaagtaaaacaagtagaaacaaataaagaaaacagtttgtgtaatcccactacccaacgatatccagctacagtagatattttggtgttttcttctatcctttttttctatgcatatgattttggatggtgttatctgacaatgttgtgatcatcttattggtacaattacatgcctcacaattctatttatctatttatttatttaattaaatttatttattttgagacggagtctccctctgtcacccaggctggagtgcagtggggtgatctcggctcactgcaacctccgcctcctgggttcaagcgattctcctgcctcagcctccctagtagctgggattacaggagcctgctaccatacccagctaattttttaaaatatttttagtagaggcagggtttctccatgttggccaggctagtctcgagcttctgacctcaagtgattcacccgcttcggcctcccaaaatcctggaattacaggtgtgagccaccgtgcctggcctctatctttgtttttaaacctctaaagaaggcatattttaatgtgcaagtcactcaattctttttatacattttttaccaaaaagccctctcctgtgaaatttgaattttcagtatgcccacttagcagttgttctgaactcatagcaggaagaggggtgcaccactgcagactgtgtcaccggaacatttaacagtagttctgtgagcaaagggagtagatttaagatgagagttgtaaagttctgtgactccaggctcaggagttccccactttggctgatgacctcctgactgctctctttccctaatgaattgtacctaccccatctctgttttctccatctaaggcaggtccttgccttacctttctttctgcactgcctattctagatcctagtggtccagatgctctcactccttgaccttctcccccaacatatcttcatgactcactccctc

SEQ ID NO: 559 - DNA, 400 bp, Homo sapiens
  misc_feature (1)..(400): DMR3:161075701
attaagaaaaggaggtgttatagtttattacatcatgaattatgctttctgtacttacgctcttagtgaaggagataacattgaagtgagaaaatgaacattctcagttatttgcgaagttagtaaaattgcagtccctattccatttttttctgatgaaaatggatacatgagatctcatttattgctctcctcaacacctttactgtcccagattccattcacgttccaaatcgtggacagtaaaactgaagtcagataaacacagtcacaggtacaactgggagcgagttttaacatagtggtaattttgcaaatgccaacatgaatactagtgagtactcaatttacgacagacaatttcacaaaaaccaaccacagagtgatttgatattcttgc

SEQ ID NO: 560 - DNA, 600 bp, Homo sapiens
  misc_feature (1)..(600): DMR3:165586001
ctgaatctgaacgttggcctgccttgctagattggggaagttctcctggataatatcctgcagcgtgttttccaacttggttccattctccccatcactttcaggtagaccaatcagacgtagatttggtcttttcacacagtcccatatttcttggaggctttgctcatttctttttattcttttttctctaaacttcccttctcacttcatttcattcatttcatcttccatcgctgataccctttcttccagttgatcgcatcggctcctgaggcttctgcattcttcacgtagttctcgagccttggttttcagctccatcagctcctttaagcacttctctgtattggttattctagttatacattcttctaaatttttttcaaagttttcaacttctttgcctttggtttgaatgtcctcccgtagctcagagtaatttgatcatctgaagccttcttctctcagctcgtcaaagtcattgtccgtccagctttgttccgttgctggtgaggaactgcgttcctttggaggagagaggcgctctgctttttagagtttccagtttttctgttctgttttttccccatctttgtg

SEQ ID NO: 561 - DNA, 4600 bp, Homo sapiens
  misc_feature (1)..(4600): DMR3:170859001
attcatccctttgttaccccagaacatcctgaactatggaaattagctgcagccttgacaggaataaggatatggaacactacctatcaactccttcgtactaataccaaaacacccacattcaacatcaccttcatatctgaacgggtgatacccatcagcagctgtgtcaaacccccttacatgctgttggttggaaatataattattattcctaatacacaaactatacaatgtgataactgtaagctgttcacgtgcattgatactacttttaatcccactacaagtattctcttagttagggctggagagggggtatggataccagtttctttacatcgtccatgggagtcttccccctctattcacacagtcaatgaagttcttaaaggtatcctcaaaagaacaaagagatttatttttactcttaatgcagtccttgcaggactaattgcggttactgcaacagcggcaactgctggagttgccatccacaattctgttcaaactgctcactatgttgaagcatggcaaaaaaactcctccagactttggaattctcaggctcaatttgttcaaaaattagctaatcaaattaatgatctccgccaaagtgtaacctggctgggagataaagttatgaacttggaacactgtatgcaattatagtgtgattggaatacttctgattattgcataacgccttatgcttataatcaagatcaacatagctgggaaaaggtctcaagacatttaaaaacctgtgatgataacataacgttggatatttcacaacttaaagagcaattctttgagacttcacaagcccatttatccactgttcctggctcagatatttttcaaggcataactaaacaattatctgattttaatcccttcaaatggctcaaacccttcggaggatcattgttgttactggcattattaatattggtatgcttatgtagtctccttttagtctgcagatgcctccaaggagtccgaaaccaagtccgaagtcaacgacaagcaatgatggcgatggcgatcctagttaataaaaaggggggagatgtgggctgcaagccacccaggtgccgaggcaagagaccgaggacatgagctgttccagtataataaaatataaaacaagaatagttataccagatatagatcttagatatgattatatatgaatataattaatcattagtttgtggcaattactctttattccaatattataataatcctcgctctataatcataacctaggaaaaaccaggccatacagagataggagctgaggggacatagtgaggagtgaccagaagacaagagtgcgagccttctgttatgcccagacagggccaccagaagggctccttggtctagcggtgacgccagtgtctgggaagatgcccgttgccaggcggaccgaggtctagcggtagcgtaagtgtcaagggaaaacacctgctacttagcagaccgggaaagggagtctccctttccccgggggagtttagaaaagactctgctcctccacctcttgtggagggcctgacatcagtcaggctcgcccacagttatccagaggcctaaccgtctccctgtgatgctgtgcttcagtggtcacgctcctagtccgccttcatgttccatcctgttcacctggctctgccttctagatagcagtagcaaattagtgaaagtactaaaagtctctgatatgcataaataacggcgtaagctgtctttctctttgtctcctctctctctctgcctcagctgccaggcagggaagggccccctgtccagtggacacgtgacccacgtgaccttacctatcgttggagatcactcacactctttaccctgccccttttgctttgtatccaataaatagcgcagcctggcattcggggccactaccggtctctgcgcattggtggtagtggtctcccgggcccagctgtcttttcttttatctctttgtcttgtgtctttatttctacactctgtcatctccgcacacacggacagacccaccgaccctgtggggctggtccctgcaagtaagagtaactacaatggattagaatataacatatctttttcatcataggttcaatatgatactaaaacaaagaaactgaaacaaaaccaaataacaaaaataaaaccctcactgatcacctttagagaatatctgattgggaattaacttgaaaaattataatatagaggaaaagaagcatcatttatcctatctttcttatgtgaactgtacctcagggttgacgagaagtacctctttataggggtattctagttactaagtgaaaaaggaatgatagagtattaacattgggcaacatttagggaaacaatgatctaggcaatggtcatcaatggctgctaacacgacagaagaggaaactagacattacatacttcttaagagatatacacaatggcacttttaagtattcaggtaaaaaaatatcacttgaatctgatattgatcaaacttctagatccgaccatcaatttttaggaaatacagtggacagaggaccacattaaatgacactatggggaggggaattatgaaaatctgaattgagaaaattctacaggacaaatgacctagtgtgataaacaaagaaattgggatgggggagtagagagaaatagagtgagggcaaacttttttttttttttttttttttttgagacagtcttgcgctgtcgcccaggctgcagggggcaaacttttaaaggaggtttaagagacatttaattgcaactgtggaccttattacaactgtactttgtacaaagctaaaaattgccagatatttggggaaatttaagcactgagtgggcattgggtaatacaggaaattattgttaatttgtttgttataggtgtgataatggtatggcagttatgtttaaagagtccttatcttttagacactacatttagagatataagcataagtttatagaagaaatgataaaatgttgggaacttgcttcaaaataatctggggatgtgggagtagaaggaatatagattaaacacattttttctacttacatatgtaattgaaatgtttcataataaaaagttaaaaataaataaaaaccataaaaagttaaaaagaaaacaaaaatttgcccagctcttgcagagactgcaaggcaagaaaatctaagaatctcttagcccttcagaataaagtcagcttcacgactgtgaagtcacattctcaaaatggatagtctgattgagattaagagattctctgcattctcattccttcttgtcatagactaacgaaatacttcactgtaatctaaaatatatcagatcatgacatttctctgctcaagtctatctgtagctccccagtactttatatgtacccagaaaaacagctgatgcccttgtaatagcctacagaactctccctacttgatatcccctcagtggtagccagcccccaagatggccccccaaaatgatccccacctcctggtatttgttattctcttccaagactggtctatgtgatcagtaaaataaagaaaaggtgatgacatgttacttctgagattcggttatagacactgtggcttccatcttggtttctttcttcctcctcggatcacttgctctgggggaaaccagctgtcatgttatcagcagtgtcatacagaggccacatagcaagaattccggcgaactgaattctcctgccaaccgctctgtcagtgtgcatggaggctgatcttccagcttcagtcaagccactttttttaaagggttggatggtaaatagttcgagctttgcaggccatgtggtttatattgcaactactcaacttttccatcatacacaacatgaaaattaacgtgttcccagaaaatcttatttacaaaaacaggcagtagtttggtaactctcccatgacttcagtgcaggctcacagcttgattgccacctcatgaaaccctgaaccagagctatgcagataagctgctccaattcctgagcctcaggaaatgtgagatatatttctttcaagttgctacactttagtgtaatcgataactcatataccatcatcccactctccacaccccatgtatacctctttttacttctctaatctctactctccaccattcattcagctcaggtcatagaggcctccttgttgttccttgattataccaggggtgctcgtgccttcgggcctttgcacttgctattttttatgcctgaagtacttctccccaagacatctacttggttagattcagtatctcctttaggtctttactcaaatgagcctttctcagtaaagtgaggaggggaatagtgaggatgttccctcatcctacttataaatgtaacacaccttccttcctacattccctatttcctttatttttcttcatagcatttaccaccatgtaacatacactttatttattttattgtctgtcttcctccgctggattgtaatcttcatgaaggcaggagtttccattttgtttacttcagtatccaaaacagta

SEQ ID NO: 562 - DNA, 600 bp, Homo sapiens
  misc_feature (1)..(600): DMR3:172098401
catgcttttctagttgaggagttaaaataattttttggctttgcagttaaacacagtggtcggtatttaaggtatttaaggaatcggtatttaaggaatcagtggagttatgaagtaatatttgaagttttgattttttaaaaattgcacattcaatgttaacacctttcagttggctttgaaaaagcagtagattcttgggagtactttccagaatatttgagaaaaacaattatggcttagtattttttttttaaagaaaaacaaagcaataccctgagagattatctagaaaaatgaaatggaattgttgagtttccccttcaccttgggaagaactcgggggaatggttgtgaacaacactggctttgttgaccctgaagtgtaggcagttagggcctgtgaacatggcatttatagtggtccaccatccttgctgccttggaaaattctttctggaatggcagaggtgctctttgcaaggcgtgcttcctgtgtgagtacctattgtggagtcctcggttgaatgggaggtttgtgagaagtggtttcccaccagcacacaatgctgcctctcggcaatgtaaatacacattcca

SEQ ID NO: 563 - DNA, 1600 bp, Homo sapiens
  misc_feature (1)..(1600): DMR3:173404201
gcaataactctttcttcagtataaaggatccaaaaccacaatgtaaaggaaacataaactaggaaaagaatggggttgatatctctctctgtttcaaagcaacttttgtgatggatgttggtgatcttcttggcttaccttcagtatgttagaatgtgccttctgagcatctcatcattccattgacaatgctctattttcaggctccatgcctagagctgtttacaccacagcaaccacctctgaactgggctcctcgcctccaggagaattgatttttgaatcaagcttaaaatggtaattagtaactccatctgtgtttagggtcaggaacagatgcttttcctttttgctttaatggaagatatatttgaaggtggaaatatagtgaaatagagtttaaatagatctatattgtggtgggcactcctgtgtcaggtgatgaccatcatggaagtatgtttttgagtatctacctgaaccctcttatctggacacagtacagatgattagaaggtttatttcacaaatccattgtgaattcattatggttcatagcaatgagcctaagctactgcaagttcctgaaacctctgctagggagttaaatgtttaattatatttaatagaccgtattttatcaaaaccaaggagcactgattctagaacactgcattttattcacactgtggaaagaacaccccagtattaattccacaatcgttctctactacttagaatttttactttatatttttataaaggaggatttttagacaaatagatatagatttttaacatatatccatcttttacatgaataaaacatatattagcaagatgcattagcttaagaatttaaaaaaatttatcctattcagaacctcttctgaatcattttttgactcattcatagccatgtttttccacagaaaatagtatgcatgtgttgatgatgcactgtttttgaagggctccgcgattgtctccagaatttaattccaagcagctgataccttctgaatgatttgatcctggtgtgttgttgattttactagaatgtgacaatggaatgttttcagacaacaaccagaactcatttgccttccttaaattgtcctgaactgtcaggagtggtggttgtctggtcatgctaagaagaataagaagaataccaacaattttcacatatatagtctatggctactatgcctccactactgcttggccataagaaattataaaatgcaccttgatttcagatatgttaaaggtgtcagagtcaatgaaatatggcaactttaattatacatgatcctcgttttttaaacaaactaataccatagcgataactaattaaccaaactaataatctccaaatagataagagaaactattgcataattcttagaaagtatgattaaaatataatcctatctctttttttctctatttgccctccaattatgtaatatataaaatatagctagtcttaagaaaagaaataatagtaggatgaaaacaaatgaagagaactagaccaggaacgaagagaccgatgtctggggagcagactcttctagtaactctctgtgtcatt

SEQ ID NO: 564 - DNA, 1000 bp, Homo sapiens
  misc_feature (1)..(1000): DMR3:173413601
aaaataaaattaaaattaaataaataaaaacttcttagtctagaaagagggaccattactgaggaagagatctacagcaattttgttaacttccaaaactctggaagacattggttatcacttccttcaggagccttgaccccagatgtctagagaagttcagggccagagcagcaggtcaaatgggaagccctggagctaaacataccaggtgattctggctaccctatgggcaaaaggtttcaagaaccttcttctccctggaaaaagaacaagaaaggaagcagcagtggttgtggtacaacaggtgactagtgaaggtagaagagatgatgtgagctttgtatgtacagagaaggtgtccccagcacgcggttccacactgtagtgaatatcatgagtccactgtgcacacagaagatcctgggttcgggaaggtaccccaaagtgcctccaaagcatcttcatacttacattgtattaggatgtgaacatatgggaacaggagtgggggcctggaagggagaggggcatgtctggtaccgaaaaagatcatcctcacatcttgttatttcaagctatgtctgcaagcaaactggtagctgtgttgctgacttaacagaaacagagaggatgcttgaatactgatttgagtgtgataaaggagatatgttatatagtactcttcttggtagtatacaaaaagatgggaaagggcagggagcagagtgagtagagggcatgtctcctgcttaggaatgattaaatggctatctttgaattggactggagaagaaggaatcctcaggacgctaggaaaccaatggacttaagtaaggggtcagtgtggtcctttctttgtaatctgagaattaccgctatgctttgtttagcaaaaggtacatagaggcttcagtttgccacctcagaaccttagttaagagactagaactacattatatgatatgcaacatctccatgtgaaaaaaaaaaaagcacc

SEQ ID NO: 565 - DNA, 100 bp, Homo sapiens
  misc_feature (1)..(100): DMR3:175795101
aggctccacttcctaatatcatcccacctgcagggcctaaggcttcagtgtgtgcatttggagcaggaacacaaacattcagtctataacaatggttgac

SEQ ID NO: 566 - DNA, 1300 bp, Homo sapiens
  misc_feature (1)..(1300): DMR3:176080201
tgttgagttatacagaaatgcatgtagacatgtatgcatgggatgtgcttaacctcacatggtccccatgccacagaaagaaccacagtgtgaccattaggaccagggtcaaattacaaaataacaagtttgcctttaacctatttcctccccatctaaattccagaggtcaaggctgtggataaatctgaagacctgggctcccttctctggggccttatgtcgtttgttcactgtctgaactttggaaggggggataggtcaccctgaagcattaggtgggagaaaatgttctacctgtggacacttcctgcttgcatctcccttctctttctctctctgcccactgtctctcccacccttggacctgaggatagatattggctggaagagggtgttcccttctttcctctggcagaaaagggaaattatgcccttcatgtccctgaagtcagaagagtcagagcccccagagctgcacttcagtgtggcaaccgctggctacatggggctactgagcacctgcaatgtggctggtctgcatttgtgaagtggtagaagcttcaaatacagagtgacgttgaaagatttagtaccaaaaaaccctttattaataatattacatcaattccatatttacataacatttcggatacattgggttaaagtattagaattttttaaaaaagaaatgagaaacaaaagagtgagtactggttttacatagaggtatgatccttcatatattgagctgggttttgtagcataactgatggcaaactgataaagccacactgcgttattcctgtagatgccctgagtaatgaaggatttaaatcatcaacacttagacggcacttacaactccttgaaagatagcttgtccatatataatttcattggttggcaatgtcttaactttttaaaaaatgctgctcaactgtgacctggcttcatgtgctcaattatatttagaagcaaaatcaagttgaaatcatggtaaccaaaccccacttgctctgaaattttcgccaaaagtcgttatctactgtcgtcatgatcccctgcctaatctgaccttcatagtttactctttcagggttcttaatatcacttggttgtataaacttataagcttatttaaagatacactgatgccttatgaaaatgtggttttctgaaagtacttcatctattttaatgataagaatataatctagggccaaagataattaaagattaacgagactcttcctccatgtctttgcttcaactcctttcatcatgcgagttgtttcca

SEQ ID NO: 567 - DNA, 3000 bp, Homo sapiens
  misc_feature (1)..(3000): DMR3:177269701
tatcacattaaccatcccactgtctttttgttctcgtaacagttagaagcgtccagcttaatcttccacatgccttcttattcttgtctcttgtataactatgattatttggtccctgaaacgcttgtctttgataggctcctcattccacacggccaagtgatcatttaggtaactcactctcccttgctgccgtggtctggatcctcgctgccttttagcctgaccacatcacataagcatttcttgaaaggtctgttgcccatcaccacatctgctattaactactatattgctcaaggctcttgttttcttttttttttttttttttttttttgagacggagtcttgctctgtcgcccaggctggagtgcagtggcgcgatctcggctcactgcaagctccgcctcccgggttcacgccattctcctgcctcaccctccccagtagctgggactacaggcgcccgccaccacgcctggctaattttttgtatttttggtggagatggggtttcactgtgttagccagaatgatcttgatttcctgacctcgtgatctgcccgcctcggcctcccaaggtgctgggattacaggcgtgagccaccgcgcctcatacctcgttttcaaataacagagttcaccctggctaattgtagctgaaataaattgaataaaagatgttaggtagttgaagggatcattgagaaggctggagtaaatggctaagtctcaataaagtcgagagccataccaaagcactaccctaatgagagagttgccaccattgctgccagttccagaccatgcagcagaactggcctgatgagaaaattcctgggtgccagtcccaagggcagaggtctgaaagtgcattgcttatgacatgtatatatagaaggatggaacagcaacagtgcatctgtttttattctagtttgaaggaattgccatcctcaagtgttgaatatctaacttcaaaacagtggtgacagtgtgtccgaaattggtgggttcttggtctcactgacttcaagaatgaagctgcggactctcgcggtgagtgttaccgctcttaaggtggcgtgtttggagtttgttccttctgatgttcggatgtgttcggagttttttccttctggtgttcccgcccggtttgtggtctctctggctcaggagtgaagctgcagaccttcgcagtgagtgttacaactcttaaggcggcgcgtctggagttgttcgttcctcccggtgggcttgtggtctcggtggcttcagaagtgaagctgcagacctttacggtgggcgttacagctcataaaagcagcgtggacccaaaaagtgagcagtagcaagatttattacaaggagcgaaagaacaaagcttccacaatgtggaaggggacctgagcaagttgctacttctggctcgggcagcctgcttttattctcttatctggccccacccatgtcctgctgattggtagagcccagtggtctgttttgacagggcgctgattggtgcctttacaatcactgagctagagacaaaggttctccacctccccatcagatcagttagatacagagtatggacacaaaggttctccaaggccccaccagagcagctagatacagtgtcgattggtgcattcacaaaccctgagctagacacagggtgctgattggtgtgtttacaaaccttgagctagatacagagtgctgattggtgtatttacaatccctgagctagacataaaggttctccaagaccccaccagagtagttagatatggagtgtcgattagtgcattcacaaaccctgagctagacacagggtgccgattggtgtgttcacaaaccttgagctagatacagagtgccgattggtgcattcacaatccctgagcaagacataaaggttctccacgtccccaccagactcaggagcccagctggcttcacccagtggatcctgcaccggggctgcaggtggagctgcctgccagtcccggtgccgtgggcccacactcctcagcccttgtgtggtcgatgggactgggcgctgtggagcagggggtggcgctcgtcggggaggctcgggccgcacaggagcccatagagggggtgggaggctcaggcatggcggactgcaggtcccgagccctgccccgcgggaaggcagctaaggcccggtgagaaatcaagcacagtgccggtgggctggcgctgctgggggacccagtacaccctccgcagccgctggcccggatgctaagcccctcactgcccgggccggcagggccggccggctgctctgagtgcgggcccgccaagcccccgcccacccggaactccagctggcccgcaagcgccgcgcgcagccccggttcaggctcgcgcctctccctccatacctccctgcaagctgagggagcaggctccggccttggccagcccagaaaggggatcccacaatgcagcggtgggctgaagtgttcctcaagtgccgccaaagtgggagcccaggcagaggaggcgccgagagcgagcgagggctgtgaggactgccagcacgctgtcacctctcaacactgcggtgctgataatgacacttcctgataattaggtaagaatctggccattgccaccctcttcagggctgtgaatttaacataatcatgataatttcaagcaacaaaatgctctaggttgttggggtaggaaggattttgagatggtctctaggattctgtcccctgatacacgtgccctgtaaaaccccattctctggagtgtgagtgcgaacagtgactatgatggaatcatcgttggtgattccacagacctccacgatgaggttactaattggttcacctttactttatcacaagggagatggtcctgggaggacctggcttaatcaaatgagctctttaaaagaaggcaggctgggcgtggtggctcatgcctgtaatcccagcactttgggaggccaag

SEQ ID NO: 568 - DNA, 200 bp, Homo sapiens
  misc_feature (1)..(200): DMR3:177742701
caacaatttatttatatatggccttattccacacaggatttaaggtagcttataagaatgcatgcaataaaatagcaagatgtggtccataaataaaaaatcaaggctggaaaaagcataaaatatagataagaagacttcagatgtggcttgccagtggtcttcaaataactgaagcgttgtcttgtggaagagcattt

SEQ ID NO: 569 - DNA, 800 bp, Homo sapiens
  misc_feature (1)..(800): DMR3:177801901
acatttgagcagtgggtcttgaaataataatatgatgcatacctgagtcatttcttagtctaaatggcgaggctcacaattttttaaagaaattatttgactctaattatcctttttaaactttcctcccattagtctaccctaggatatcaggataagtaattttgcactctccttggtgttcacatcttttaagtgtttatagattgtttcatgctttatcatcagtttgccaagcccacctagcttagtgcctttcaattcttctcctgtgccagctgcctttcttccattcatgagtgcagcctgttcctgactttccagcccacatgacgctgctatatattctgaaaacagatgttcagaagcagcccttttctaaatctgaatataaacaattccctggtatagggtttcctacctttccaatgattcctgccagcttagttcatttgcacatttcattcccaatctatttatcccaatgtaatagcttagtcaccaagctctcatgctaaataagagctcttcaaatgccaacctgaactcctcccagtatgacttgctatccatttattttcattcgtttacagtctattcaacctttcagctggcttttcaaccatgagatagtgtccatatagatgtcaatttttattaagctcctaactaattttaaagcactacacaagctgtttttctgaagttctgtacatctgctactctgcactcccacgttccttaatggtgtaattctctagaaatgacctatcaaatatgatgaagctcattgctcatga

SEQ ID NO: 570 - DNA, 2500 bp, Homo sapiens
  misc_feature (1)..(2500): DMR3:178789201
aaacagatgtcaatgcgtcatgattatatgagcagcagttgttttacataacacatgacagaggtcacaagtgaccaccacaccattgccagtcagaggagtccatacatggttgccccagcaactgaaaagcaggctgcaagacaacctaatagaaccctccagcaatcaccaccacttccaagcaataggaacactacatggaaagacaatccacacaagaaaacaccttcataagaagcaaaaatcaggtgagcagtcacagtacccggttttaaaatcataacaaggaaagcgcattgaaaagggtaggaaaaacagtcttgaattgcccacactgccacttccatcccctggcagaagctgcatggcacagaaaaagaatctgtgtgcttggagaagagcacagtgattgtgggactttgcattgaaattcacagctgccctgtcacagtggaaaacaacatgggggcagaacccagctggcaccatcagacagaatatttagacaagccctagccagagaagaatcacccttctcagtggtcagaacctgagttccagctagctccatcactgtgggaaaaagtcctctaaggtcctaaataaacttgaaaggcagcctaggccacaaggactgcaattcctgagcaagtcctgatgctgtgctgggcttatagcctgtggacttggtgggtgcacaacccagggagacaccatccggggcaactaagggagtacttgtgtcacccctcccccaaacccaggcagtgcagcttgcagctccaggagagactcctttcttctgcttgaggagaggtaaggggaaagtaaagagaactttgtcttggaacttggataccagcccaaccacagtggaatatggcaccaggcagagtcctaaggactctattccaggcccttgcttatggatgacatttctagatacactgtgggccagaagggaacctactgccttgaagggaagaaactagtccaggtaggatttatcacctgctgactaaagggtccttgggccttaaataaacatcagtggttgccaggcagtacttatcacggggcttcagtgagacccagggtcatgctggctttaagtgtgacccagcacattcccagctgtggtgcccatagagagagacttcttctgttgaggaaaggagagggaagactaaagggcactttgtcttgcagcttgggtaccaacttggccacagtagggtagggcaccaagcaggcttctgggatccccaattccatatcttggttcctgaatggcatttctggactcatcctgggctggaggggtgatcactgccttaaaaagagaaactcaggcctagctgggttcactatctgctgcctgaagggacttttgtccttgagtgaatatcagcagtagccaggcagtggtcactgtgcaccttgggtaagaaatagtgctgtgctggctttggatccagtccagtgcagtcccagtggtggtggccacagaggtgcttgtgtcacccctccaacagctccaggcaactcggcacaaagagagacacttcatttcttcagggaaaagttaaggaagaggagaagagtctctgcctggtaatccagggacttctactgcatcttaccaagacaattaaggtagtatctctacaagtctgcaagagccacagtgttactgggcttgaggtatcccataatgcagatacagctgcagtgaccaaagttttagatcacaacacttcattcctcttgaatacctggaaagccttcccaagaaggacagatacaaactactccagactgcaaaaactataataaatacctaactgttcaatgcccagacattgctgaacatccacaagcaccgataccatccaggaaaacatgacctcaccaaatgaagtaaataaggcacaagtggccaataccggaatgacagacatatgtgacctttcagacagaaaattcagcatagctgttttaaggaagctcaatggaattcaagacaacacagagaaggaattcaaaatcctaccagttaaatttaacaaagagattgaaatagtttttaaaaattaagcaaaaattctggagttgaaaaatttaactgacatactgaagaatgtatcagagtcttccaacagctgaactaatgaagcagaataaataattagtgagcttgaaaacaggctgttttaaaacacagtcagaggagacaaaagaaaaaagaacaaaaaacaatgaatcacaccgacaggatctgtaaaatagccccaaaagggcaaatctaagagttattggccttaaggaggaggcagaaaaacagatagagtagaaagtgtattcaaagggataataacagagaaaatcccaaacctagagaaagatatcaatattcaagtacaggaaggttataaaacaccaaacagatttaactcaaagaagattacctcaaagcatttaacaatcaaacttccaa

SEQ ID NO: 571 - DNA, 2800 bp, Homo sapiens
  misc_feature (1)..(2800): DMR3:180323601
aagaagaaaaagaaaaaccaattcaggagccagaggtgcctcagattgatgttccaaatctcaaacccatttttggaattcctttggctgatgcagtagagaggaccatgatgtatgatggcattcggctgccggccattttctgtgaatgtatagatcacttagagaagtatggcatgatgcgaaggcatctacagagtatcaggaattgaatcaaaggtggatgagctaaaagcagcctatgaccggaaggagtctaccaacttggaagaatatgagcttaacactgtagccagtttgctgaagcagtatttgtgagaccttccagagaatttggttaccaaagagcttatgccgagatttgaagaagcttgtgggaggaccacggagactgagaaagtgcaggaattccagcgtttactcaaagaactgccagaatgtaactatcttctgatttcttggctcattgtgcacatggaccatgtcattgcaaatgaactggaaacaaaaatgaataaacagaacatttctatagtgctcaacccaactgtgcagatcagcaattgagtcctgtatgtgtttttcacacatgcgcaagaactctttggaaatgttgtactaaagcaagcgacgaaacctctgcgatggtctaacatggccacgatgcccacgctgccagagacccaggcaggtatcaaggaggagatcaggagacagggttttcttttgaattgtttacatcgatatctgcagtgtgggataaaggatttatctaaagaagaaagattatggaaagtccaaagaattttgacagccctcaaaagaaaactgagagacgcttaaagacaggagtgtgaaaccaagattacacaaaagatagccagtcttttaaaagaggatgtttccaaagaagagatgaatgaaaatgaagaagttataaatattctccttgcttgggagaatgagatcctgactgaataggaggagctcctgaccatggagcagtttctatgccggcagacttcctcagaaaaagaagagatgggatgcctcagagccgagattgctgaaattcagagtcaccagcagcacggccgaagtgagactgaggagtactcctccgagagcgagagtgaggatgaggaggagctgcagattattctggaatatttacagagacagaacgaagagctggaaataaagagcaatcatttgaatcaagcagttcaagaggagcgcgaggtcatcatcgagctgcgcgtacagttccggctgctccagatggagggaaccaaggctgagcagcaggtgcaggaggaccaggagcctgagtggcgcggtggtgccgtccagtcgcccagagactgtgtcctcaggccaaaagaagctaaagagcagccaaaggcaggcaaagagccggtgaagccatcacccagcagggacaggaaggagacgtccatctgagcagcccgcgcggccgtctggagtccgcgagactgaaaggacctgtgcatcttactgtaaccagggggccaggccggctttcttgctgtacattctgtaaaggtgtcttctcttctcagactcttcctctgtcacccgtctgactcctttgcgtcaggctcaggttccattaagagaacgaagcagtggatgcattgtgggctttagggacagatgagttttccagatagtgtcaccttatttaaagattaattttctttgttaacttaaaataactattttaaccctcgagtggcttctttttaaaccataaatcgtcttgctttgcttttttatcacagcagaatcaggatctctttctcattcaaggggggaaccacaccaggtcagcgctgcacctgctgtggccgctgtgagctgcaccctctgggatctctggtaccttcacacttgcttgtgccttccacaccttcttggtgcagatccctgtgggggagctgcctcatgttctctggccagagtggcgcctggtgtgtgttccctggcccaccctcctaactctctccttctgcagttctaaaccacagttgataagccctagtcaccaggatggcctagtctggccacagacagaggctgcctgtggagcctgtccacccaccccgggcagtgcaggccggcagggaggaggccgcctcttcccaccagttcctcaccgcggggaccagcaaaggccttctcactgggttggcagaggtagtcaccttggcctggtgcatccacagaggatgttgctcaaactagaaatcttttaaacaactggccttccttaaaaacagaatgactccgattgcttgcttgggctagaatgtacacgtgtccttgcctgaataagccatatatatgcttttaaacaaaagtatgaaattacccatattgtctcagtgaatctgctggtggactcccaattgacaagactgagcaataaaaaaaattttctttcgtttgagtgatagctgtgactcaccccaccccactttcttgtttctggtccatctgatgagatggatgctttgaggcttctgagaagccagaccctggaggcaacatgctgcagtcacaccctgttgagtgaagagcactgcaagacaggccaggctcatggcttggaagacaaaccccacacgcacttaagaggacgaaaacaaaccccataggaaggccctctcctcctcctcttaggtagtatttattttcagcacctgtttgatgtagtttttaaacctctacctattgtactgttgtgactcactggccattgtttgatttttttacg

SEQ ID NO: 572 - DNA, 1000 bp, Homo sapiens
  misc_feature (1)..(1000): DMR3:181299801
ctcaaactatatactcaacatatcttattcgttctctgaagagtcagaacatacttctcagtgtcataggccttggagtcatccagaatattatttgttagcaacagcatagaagaaagaaaagaaagaggagagagaggggaaggcggagaaggagaagaaggagaaggaggaggaggaggggaaggaggagaagaaggagaatgagaaggaggaggagaaggggaaggaggagaagaaggaggaggagaagggtaaggaggagaagaaggagaatgagaaggaggaagagaaggggaaggaggagtaggggaaggagaaggggagggaggagaagaaggggaaggaggaggaggaggaggggaaggggagggagaaggagattatttgcactttataaatattgacgttttggattaaaagatattttctatgtgttgacggccttactgatattatatttgcactgttcttccagataaaccatgtgaatatctgtgattgtacagaattcactattttttaagtaaaatgactagtcattggacaatattttaatttcaattttttgagcaaggcacttgattttttaatgccttagtttcttcaatcttcaaatgggatagatttttattttgttttgtttttatggtaatgagaagtaaatgctttattttttaaaaagctaagtctctaattataatgaaaagtgcttcaaagctacaacaatatcctgactagatcataagtggcaaaacaacaatgtaatacagaagatgcaaagcattctttgaaaatggcgacttcgttttaaaagaatttctattgcgttagagtagtgcctatgaaaataaataagtagtgaaaaaccattcctgagtactcagaaagtatttatgaataccaagatacgaatgtagtttagctttgcaattccgaattaatagcctgcctagggaacatctcttatttaaaaagggctgcctgaattaaggttaag

SEQ ID NO: 573 - DNA, 1400 bp, Homo sapiens
  misc_feature (1)..(1400): DMR3:181768701
aagtgctacaggacttgacagcaaagctcccacacatttctatgggtgttactctctactagattctatttgaccattgctacagaaaatcctcaacatattctcagaatcaaatcttctctgttgacaaatggttttggaacaatatttccaagttaaaaaaaaaaaaaaggagcagcagctccttagcaggtgttatacaagaaagagaattgggctagaacttatacctcctaggttctaggcttcctgacccaagaaaggggctggctgtccttccagtggtgtggactacatgatctgtccatgtgactccaatgtttacaggatcttttctttagatcattttcacatcgtattcaataccattattattaattctaattttattacaaacatatgttcattgtagaaagttcagaaaaggcaaaaaagaatcaacaagaatgtgaacatcacctgtaaatctcaccacccagagataactaaagttaacattttggtcaatgtcactcttattaagataacatttgaaagaccaggaaagtttgcctcagaaaagcaggcattgaatcctattgaggaataattgccatattcagaatttggatatagcagtggtgactccttaaaaacaaatctttacagaaatggtcactaactttgagtaagtctttcccttgttgctctctcttctttctatttgcctagtttacgatatcaggatcgtgctgtttcattattgcatgttcttacttatatgtgggagcctaaaaacaattgaactcatggagagagtagaatggtggttaccacaggctgggaaggatagcagggaggcaggaatacagcggagatggttagtgggtacaaaaattcaggtagaaagaaggaatagggtcaggcatagtggcttacacctgtaatgtcagcattttgggagcctaaggtgggaggattgcttgaggccagaagttcaaaaccagcatggacaacatagtgaaattccatctctacaaaaaactttaaaaattagctgggggtgatgggcacgtctgtagtcacagctactcaggaggttgaggcaggaggatcacttgagcccaggagtttgaggtttgaggttttgagattgtagtgggctatgatcacgccactgcactccagcctgggggaaagatcaagaccctgtctctggaaaaaaaaaaaaaaaaaaaaaaaaaaaaaaagaagatacaaggaataagatctagtatttggtagcacagtaaaatgattatagctaacaataatttattacatattttaagaaattgatcatttattttaaaatgaggaaatgatcaatgctaaatgttatggatagcctaattaccctgatttgatcattacaaattgta

SEQ ID NO: 574 - DNA, 1100 bp, Homo sapiens
  misc_feature (1)..(1100): DMR3:181800901
tcacacctgtaatcccagcactttggaaggctgaggtgggtggatcacctgaggtcaagggttcgagaccaggctggccaacatggtgaaaccccagtaatattaactacttgagaggctgaggcaggagaatcacttaatcctgggagggggaggtcgcaatgagccgagattgtgccactgcactccagcctgggtgacagagcaagactctgtttaaaaaaaaaaaaaaaaaaatcattctaccatgaagatacatgcacacaaatattcattatagcactattcacaatagcaaagacatggaatctacctaaatgcccatcaatggcagattggaaaaagaaaatgtggtacatatacaccatggaaaactatgcagccattaaaaaaatgagatcatatcttttgtgggaacgtggttggagctggaggctattagcctcaggaaactaacacaggaacagaaaaccaaacagctcatgttctcacttataagtgggagctaaatgaaagaacttatgaacacagaggtgggtggatcacttgaggtcaaaagttcaagaccctcctggccaacatggtgaaacccatctctattaaaaatacaaaaactagctgggcgaggtagcaggcacctgtaatcccagctacctgggaggctgagggaggagaaccgtttgaacctgggaggtggaggttgcagtgagccgagattgtgccattgcacgccagcctgggcaacagagcgagactcggtctcaaaaaaagagaacttaagacactggagtctacttgagtggggagggagggaggaaggagaggagcagaaaggataactattggatacggatttaatacctggatgatgaaataatatgtacaacaaaccccgggacgtgtgtttaccgatgtaacaaacctccatatgtacccccaaaccaaaaatagaagttaaaaagatgaaaaaaagttactaaataatatgcataatatggatcttttttcataaacatatgtgtgcatgtataaatttttgtttagtggtgagtcagtatagctggctgagaacataaacttttgagtcagactgatctggg

SEQ ID NO: 575 - DNA, 300 bp, Homo sapiens
  misc_feature (1)..(300): DMR3:182202701
ggatctaggtgatgctctggcctaatacccccctcttataaacaaggagactggaattcagggtggctgtggtggacccaacatcatgcaagtcgttaagtgttaagtagagagtatgggttagagcctgggtttagcccatgggtttttccgtttcacctctctggactttttattcataccagaaaaataggagtgctcgttcaaggaatataaagtgcttctttttccttcttctgcctcttcatccacggacaggtcacaggagtccttctcatgccacactgtggtttgtgagtt

SEQ ID NO: 576 - DNA, 300 bp, Homo sapiens
  misc_feature (1)..(300): DMR3:182355701
ttcatccacccattcattcaaaatatattgagtaaccaccaaggatttgaaaaggaacaaaaacctttgggtttacacaaatctgtaggaaaaattgactgtattaatacaaaatagaaaaaataaaggcacaattcttttcaataaaggtatcctcctcttctccattcaggtcacaataaaagcattatattttatcagagccaagataaactcctttcgcattgccattcgccctctactcatctaaaaaaatatattcttggatgagtctctaggaggtgaacttcactctatccc

SEQ ID NO: 577 - DNA, 1400 bp, Homo sapiens
  misc_feature (1)..(1400): DMR3:182691601
agagtatctcaaaggggctcaggaccaaaaagctcccaatggccaaagctagaaggatttaagcaatgaaataaatagtttgggattagagcccagagtataaaacgcatatccatgagctcagatctgatataaatatatgattaagtaagttaataaacacaggaaaagaaacaaatattcagtacaaaaaaagaattccaaataaattataccgatatggtgactagctcggccaggcttggtgactacactggcccggctacaccgttccacacctcccactgtcggactgggctgctacctctgtgcctgccagtcatgttattaatactactgccactgctgtcactgctgctgctgctgctgggatctggccctgggtcccgccaggcctccaagaggtcacacgtgcaccgacgtgggatcctggaactggcaggaactgtgggttgtattgactcctgaaccccacttacctatatgaaatacagttgctactgtggcctgggaggccatggccagcaccgggatgccattgactggaccagcagagaacaaatgccaaaagctcttgtgcaagtgtgaccaggagattgctaactgcttagcccgaactgagtacaactgaaagtacctcttctacccccagtttctgtgaaagcaggactcgcccaagtgcgactggctagcttgacttgaagtgctcctttgcacaaagaaataaagctccttctcgctaatgaaaaagtattatattgatacttcaccctaatggagggggagcaaaacttgccactccttaagggctatgtataaggaacttccatccaaggagtacagttagaagagggaaatttaagtgagtatttttaagatagggacactcaagaaacagtaacccaaccaagtgatcaaggtcaatatcaaccatcataaatcacattgataatcttgatattatgtgtgatgaaaatggcacttctcttctataataaacccataaccccagtctaattgtgagaaaaacatctgtgaacctaaataacagagagggagactctctaaaagaaaatgatgtttatttgggaataagcattgccatggcaataagcagcccatagtaaaccatatgagtattcagggaagtaacagaagaaaaaggcttttagaggaaaaatgaggattatacaattgttatgacactattatccttggctacaggatcagtaagaagagtggcactagtctgaggttgaacaggaagttgctgggcagatgtcctcacaggggtacttctttgtgtatagttgcaatggcctttgtgcaaggttgtggtttctgcagtcttctgtgatagttcttgttaccaggcatttgggcttgagaaacttcccttc

SEQ ID NO: 578 - DNA, 700 bp, Homo sapiens
  misc_feature (1)..(700): DMR3:182707901
tataaaagattgcttgaaaaattatatatgtgtatatatagtcatacatacagttctttaactggagcatttaatccatttataattaatgtaattactgttgtcttagagctatatttatcatcttactgtatgctctctgtttgtataacagctctgtgttccttttcctttctctcttctcttgcattcttgcatagtgattgcttgggggtttatttattttgttttgtttttattgtgctattttccctgttagtttgaaagacatatactctttttagattttttcctttagcgattaccctagaacttaagaaatagatccttaatttctgatgcctaatgaattgaaaaattatttgtagaactaattgaatggcaacagtagcattataatgttccaggtgttatttttatctgctccattcaggcacctagaggcactagcagtcagcatcaccttgcttgggattttccaggccacccatatgatcagaaaggtgtaaaccatacacgctctgctttactgccggtgtaattttattgctatgttcccagtcgaaaaggtaggagcggggtgttatctatcaggacatgtgcactttgcacaccctggattcaaatctagcacccctagctcagggagacctcaggtctgcctcacagctgccttttccgaatcaacagcaaaagtgat

SEQ ID NO: 579 - DNA, 2700 bp, Homo sapiens
  misc_feature (1)..(2700): DMR3:186492201
cttcttttgtaaattcgagctcttgctctgaggagggatccttgacattctgagaactgttaaatacgtatacatgcctcgtttctaaacctgaaatcatttaacagatttggttattgtctgctccattaattgtgctattctcccattgcagaccagtaagccagggctgaggggatctaaagctcctcccagcatcacacaactgagagctctcccagacacatcccctgggagctagtagatagactggaataaaaattttgagccttcacagtctcccaagccaatcttttcatcctactatagtgtaagcttccatgcaaagccaccctcccctccactgttctctggagcagagcaggtctacagggtcaggctgcctggctaggcccctctgtgaatgccccttgattagagaaccactattattctcctcctcatagtccatggaaaataaatacaggaaagtcagcaaactttcaagaatgatgatgctggctgttttcaggtcccagtcatccctgcagcctggccgtgccttctgtaagcctgtttcttcataagctctctgccagcaaaactcctgcaatagaaaaccatctggagaagagccaggcaaaggccttgatatcggtgttctgggcgctgggattgatcatgcagagaccagtgcagcacctaaacagggaccatttcctccagcctgcccacagctgctgccctcggggcttgctctgacacccaatttttaaaagcaggctcttagaataataaaaccagagaatctttgaatacagaaccattgactgttagaatcataaactattgagagaagaaccatgaaattctagaatcttggcgttggaagttacctcccaggtaaatgggttctgtctccccacctaagcaacaggtatttcttctgaggaaactgggtgcagcaatgatgtggccacaacaccttgtagatgtgggaagatgtccacggtggccacagtaagaagcctttttgtggtctctaccttctgaaatagtacatgacgcaagaaaatgtccatgcttgtcacgacaaaaactactattccctggaagtctgtggtacttttgaactctcttaaaactttaccctccttgaagaaggtttcaggagaaagaggaggccctggaaactcttgataatgccctcagcactgcttccaaggagcgccagtcatatagaccatccctgagagaaacaagagaaaacgggaaattctgacttctctctacttcagaactatgagctattttagttggcatttttgcccccatccaactttttttggcttcgctatctaaaacaaataaataaaacagctgatgctgtgaactgtaaagaatctgagctaatttggtcctcccctttctcccatccattgcagacttcggccatagcgcgtgagcattagaaaacaacttgtcgcccactcaactctctttctcattcctaaaggaaaatatttatattacgccacagaacgggtttccatgacagtgacgactgtaacactgttgccttagcaaccacttgagtccatcttgaatgatctgaatccccttcacagacaaataaggaaaatctgtcaaaagtgccattccgctggtgggaagtcctggaagacggttttctcgcgccctcgttctccctccaggtccgtccccccggtcccccagtacatctcccctaacgctcactcgggaactttccatatttgctactctttcaagagcttgccctcgcccttctcctagtgattagaccctaatccaccatggagacgctgcccagagctctgcaaagggttaaggactggcaggcagagccgtgccaaagacaacaagagacagaataaatacacagatcatcctttttatagggccttgctcttgcccctggagactgggtgcacgtttttctctatcagtccagagcaactctgaggggagagttttataggaaagaccagtcctccttgaggttcagctctcagtcacaacaagtgggcaggttgcctctcgggcctcagtttcctcatctgtacgataaaggggttgagtggagggtccttctggctcttacactctaggaatttgggggaatcaagaatgtatcatctggccgggcgcggtggctcacgcctgtaattccagccctttgggaggccgaggtggatggatcacttgagatcaggaattccagactagcctggccaacatggtgaaaccccgactctactaaaaatacaaaaattagcaaggcatggtggtggatgcctgtaatcccagctatgtgggcagctgaggcaggaggatcgcttgaacccgggaggcagaagttgagaggttgcagtgagctgagattgagccactgcactccagcctgggcaacaaagcaagattctgtctcaaaaaaaaaaaaaaaaaagaatgtatcatcttctttctcccaaagtcatcagatttcttgtagcatgcctacagagaactcagataggacatcaggacaagtgacatcctggagtgacatggagcacgccagcattcacagggaggtgcatcttcccccatcacacgtgtgggcacaggtgaaaagcaccgtcggcatcagcggcagtggtgctatcagcaccgtaagcacacactgcagaccaggccact

SEQ ID NO: 580 - DNA, 200 bp, Homo sapiens
  misc_feature (1)..(200): DMR3:187329601
caaacaaacaaacaaacagaaggaccaagagatagaatatatggggaaagttaagacattcggaggatagtgtaaaaattccggtatctataataataagagtaaaagatggagagaacagacaaaatgaatgagaaaaaaatcaaagacacaatataagataatatcctagtgccagaattttttttttttttttgaga

SEQ ID NO: 581 - DNA, 200 bp, Homo sapiens
  misc_feature (1)..(200): DMR3:189591501
agaaatactaggaaaaaaacagaaaaaagtcacaaatatgtagaaattgggcatcctattcttgaacaaccaatggggaaaagggaaatcaaaatatatcttgagacaaatgaaagaaaaaaatataccaaaattcactggctacagcaaaaatatttctaagtaagaagtttatagcaataaatgcctacttgaagaaa

SEQ ID NO: 582 - DNA, 2600 bp, Homo sapiens
  misc_feature (1)..(2600): DMR3:190242601
atggccaacaagcatatgaaaaaattctcaacatcactaatgatcagggaaatggaaatcaaaaccacaatgccataccaccttgctcctgcaaacatggccgtaattaaaaaattaaaaataatagatgttggtgtggatgtgatgaaaagggaacacatttaagctgctgttgggaaggtaaactagtacaatcactatggaaaacagtatggaggcaccttaaagaactaaaagtacatctaccattagatccagcaatcccactactgtatatctacccagaagaaaagaattcattatatgaaaaagatacttgcacacacatgtttatagcagcacaattcacaattgcaaaaataaagaaccagcctaaatgttcatcaaccaatgagtgggttttaaaaaaatgtgatatatgcatattccacaaaatattacttaaccataaaaaggaataaaataatggcatttgccacaacctggatgtagttggagatgattattttaagtgaagcaactcaggaatgaaaaaccaaacattgtgtattctcacttgtaagtggtagctaagctttgaggatgcaaaagcataagaatgatgtaatgcagtctagggaattgcggggaagggcaggagggaggtgagggataaaagactacagattggatacagtgtactctgtttggctgatgggtgtaccaaaatctcagaaatcaccactaaaaaaattatttatgtaaataaacactacttgttttcccaaaactattgaaacaataataaaaaaaaaccagacactatacatataaaaattacatactggaagctggataatttattttaaaatatggtttaattggtttacagttctgcaggctgtacaaagatggccctggcatctgctctgcttctggtgaggcctcaggaatcttttactcatggtggaaggtgaagggggaataggcacatagcatgacaagagagggggcaagagagaaagaatgaggaggtcccaggctgttttaaataactagatatgtgaactcactaaaagagaactcagttttcacgaagtgggtggtgctaaaccattcatgagggatccatccccatgatccaatcacctcccactaggccgcacctccaacattgggaatcacatttctacatgagatttggaagggacaaatatgcaaaccatatcagcaccagtgtcaatatgtcttttaaatgtgagtccacattaattttctcatttaaaaaaattcttatctggctgagcatggtggctcacgcctgtaatccccagcactttgggaggccaaggtgggtggatcacgagatcaggagatcgagaccatcctggctaacacggtgaaaccccacctctactaaaaatataaaaaattagctgggtgtggtggcaggcacctgtagtcccagctactcgggaggctgaggtaggacaatggtgtgaacctggcaggcggagctggcagtgagccgagatcacgccactgcactccagcctgggtgatagagagagactccatctcaaaaaaaaaaaaattcttatctaattttgactgctgataaaactatgcatgaacctgttgcaagagtcctatagtgagacaaggcctcttatgaaaaatgtggcctctcaattccttcctattttatactcctgaaaggggactatcaggacctttttttagctgattctatcatttttcctctgagtctccctacaagtttcttatattgcctctgtgatctgacagatggaaatagatgcccctaaataaactaaaatgaacactaaagttaaggaaacaaaagttacctatgggttgagggttcaaggcttggctggcctggaagctttctaaatttgtatgcccgcaagaaaaaaatacacttttgctaaactctaacaatagcagctttcaggcaaatttctaactttggtttatttaatactatccagaatactacaactctgactgtgtagaggactgactttaccatcactcttttctgagaagcaactgcaaaccttaagccagttttagccagcttagagagagtgtacagaaactgtccttgtgttttatagttcacctttttacgtaaaaagccaattttgcttcattttaatgctaaatctccaccccaaactgaacatggaatgtatgtttgtctattgcacatgtgcttgtcttcctcttaaatatgtatggtttttccccaagcctgctgcataaaaatgactcttaactgtgtgatgcagacactgtgaggcataaaacccaatctgccctttctctcttcaaagagagcacctttagcctataccagagactctctctttaaggtttgcaaactgatattgccaataaaattctccttttactacttagccatcctggtcttttggaaagcactactgtattagtctgttttcacactactgataaagacatacccgagactggacaatttacaaaagaacaaagttcattggacttacagttccacatggctggggaggcctcacaatcatggcagaaggcaaggaggagcaagtcacatc

SEQ ID NO: 583 - DNA, 1100 bp, Homo sapiens
  misc_feature (1)..(1100): DMR3:191958201
ccagcagtaaaacattttctgaagttgtgcaattcctttgaatcttctggatgctgtgtttgctctcttattctgtagaattttcccttaaggtatatgttgatttttttaatgtttttcttccattttaataaaaaattaattaaatttaattgagtttattttttcttactcatcttcataaaaagacaaagtcttgtcattggataacccttggaatttccctgggtccacctggggggtggtgtaaccctcctgagatctgtagctgaggagaagatggacataggtgcacagctctgcatgtaacactgaactggcttttatccaattaactattgcaggtagcatcttcctctgtctccttctggcgggttcctcattaatttaaattgatgtaatacataaaaagcacaattgctagcaaacatagacacttgtggctgcccacttttgttgacttctatggtacttttcttgtgaggattatccctctcaattgccacatgtcactgccagatcccaattcttatgagagactgaatatacaaatacaccataggcagtccatatataaacatagaattctaaccacaaactgcagcaaccaacccagtaggccagcctactacctacaaaagcagcccaggaagcctacctacgatttacagtgaccagttcaggaagacggtaccagtccaggaagccaaacactaacccctgtagcaatagatcccaaatagccgaggcttgataactaacagccttctctatttttgctcctgcttccaacgtaggatcaaccagagaaagccaaatatacatcctaaaccaatctcacaggatgctctgcttctagttagcctgccttcaacattcccatgtcaacagcctctactcagggcgtacataaaaccttctttttcttcctctataaagcttcctcattcctctgtctgctcttgagtctctgtaaagcacacaggttagtagctaacttccttgctgtagcaagctctgaatagcctttgtttgttctcatttgagtgatcttcatttatttccttactaactgccatgttgaattctggctacagagc

SEQ ID NO: 584 - DNA, 1400 bp, Homo sapiens
  misc_feature (1)..(1400): DMR3:192780601
atcccttgggaaggctgggttaggatagagatacgattgaaaaatgctgctttagaagttatgacggggactcaaatagaaagctaatcaataattcatctgaagattatagcactcatcctaccagaattagtttaagtagtgataatatcaaatgaaagatttgtcgaaagaacttaaactcaggttattctgccagtttaatcattatttaacattggaatatttgctagtttaatccattaaaataaattcctgagaagctgaggagcaaagaatatgtcttacctcagtgtccccaacactgcgcagtgttgacacatgatgtttattaaacaactgaattaagtagatggttttgtctctcttatgacctaaaaaatactattaaaaactctttttaaaaatgcaaatgcaagcctcccacaacatggcatcagtcctagttggttttaatagaaattcgtttaaataattaagacacagataattcttaacatttaaatccttaaaattaatttttgatggccatcttttcagttaaattcacaaagccagccttaccttgatactaatttttttctttgagacagggtctcgctgtgtcactcaggctggagtgcagtagcacaatcacagattgctgcagcctcgacctcctgggttcaagtgatcctgccacctcaggctccccagtagctgcgactacaggcgcacaccaccatgcccagctaatttttgtatttttttgtagagtcggggtttcaccatgatgcccaggctgatctcagacttctgggctcaagagagccacactcagcctcccaaagtgccgggattacaggcatgagccaccattcccagcctatactaaattttttctatagccgtttaactattcagaaaatatacaatggaataagagtggaaatcacatttgcagtaatgggaatcatgaagaaaactagaacatctactgatatattgacatgaaatgaattcatgtttctgaaagggacctcaatggtataaaaatatcaattaatcaatttaacaaaataactcaaaaatatctggaatagctaaaataaatttaggaaaaatataaaagagatgagataaacttattatttcatacaataaaacatatattcaagacacaataattaaaccactatggatttgaagcagaaacagaatgacagatgattacagatgctacagaaagtctatattagaattcagtacattctgtaacattgcataccagtggagagaggacagatataaacaaatggttggggggaaaactggctaatcatttctaaaaataggtaaattagacatctaagttaaaccttacacaaaaacaaactccagcaggattaaggaattaagta

SEQ ID NO: 585 - DNA, 1700 bp, Homo sapiens
  misc_feature (1)..(1700): DMR3:193574601
agctacttgcgaggctgagtcaggagaatcacttgaacctggggcagggaggttgcagtgagccaagattacaccactgcattccagcctgggtgacagagtgagactccatcaaaaaacaaacaaaacaaaaaacctagatctcaagcctgagtctgattctgtaatgggacaaaacgtgtgtgttgaaaaggagtgtgtgtggggagaggggtggttggtgagtatgaagcaagagggtaatttgcatgcaggagtaatgtgattaatttgtagccagtgggcagactatggtaaaataaagatgaccacacatccccttgaatctggaagcctctgtgactactctgaccagtagaatatggcaccagtgacatttaaggctcagatcttaagacactggcagcttccacttcctgtcacttggaatactttctctaggagtccactttgtcaaaagtgaactagtctgagaatggtctgctgtgaggaagcccaagctagccatgtggatataccatttgaagagagatataataaaatggttgttgttctaagccactaagttttgggttgttagtcatgcagcaatagataattggaagtttccttcctgtaaaaggggttagtactatccttgtggctatataagaggagctatagtgagaactgcagccatattaaactttaactatcatcatagaagtttctagaattactatggaggaggaggcttttctgtataggaaaatactttgaaaagcccattaggagtagaaggtgagaccctaggggatgagttgacaaagagaaataaaagatataatcaaaccactttgaatttgaattgcacaggaatttggaggtaggaaagagcagagaatacagaagcaagtagaaataagggaagagcaatggaggagaagtgagaaacgtggccagggaacagagatcaagtttcaaaaataactgaaagactttttaaaaacacgggcatctaacaaatttgatgctgattgtatatccatcaggaaaatctctattagattagcagtccctggtgcagtttttctaattaattactacaatacctgaaaaatctctatttctccaaaatttccacaaagtttgctaccagtatagataacttttgtgacatttttgttttgtttttaaatttaggtggaagtttttttaagtatctgagttccactcataggttgacttggtagagaagaaggataacagatgccatttcctaaactgaattaatttagacatagtgattttcaaccagaagtgattttgtcccccaaggaatacctggtaatttcctaaggcacttttgattgtcttgactgggacggggactgggatggggcagggaagaaggacagcaactggcaccaagtgggcagaagccagggatgctgtcaagaatcctgcagtgcacaggctagccatccgcaaggaagaattttccagcctaaaatgtcaatagtgccaagattgaggaatcctgatttagaggaagccaaagatctgaatcaaaggtgtccatgagagcctaagccccctgcagaatgtacaggaatcttgaagaagacattagactttccacgatccatggaatgtggcttgaatcaatctttttttttttttttttttttttttttttttttgagacggagtctcgctct

SEQ ID NO: 586 - DNA, 1900 bp, Homo sapiens
  misc_feature (1)..(1900): DMR3:195060401
agtgtcacagatgtcaacttgtgccccctcctgaaagcctatattcttttcatggagttcttctgactgaccctgcccatgataagcagtggcctcaccccgatggaggctcaccactttggcatcacccctggcacgggcagatgctgcctctgggtctgcagggctcttcacctttggagagctcctcacctgtctcgaaggtggctgaggtcctgcctcctcctgccgagccacagccctacagcctgtcggtgtgcccagggctgctcacagatcccctgtgggccactgggccctgtcgggatccacacgtggagggaaaggacagaagaataaggtcttgttccctgctaaaagcagatggccctccctggtgttgccattgggaccagctagcaccactggggcacgctgggctgggacagtctgggcagtgtcaccatggagaggtggctgacctgcacaggcagcctggcctgtgctctcgcccagggaaggatgccagggaacctgcaagaggagagagcggaggcaggacatgcccagagctgaaagcctttgaggagaaagaaccaagagtagactagagggcagccaaggtgggagctgcaggagggggtgctgtgggccgccgggcctgcaggggcagcgctccgggagggacgctgctgtgccaccagcccctgcttcaggatggaggccttgttctcccgcaagtgttgggcgctgatggcagggagcagagtccccaggagtgaccctggctgaagagagctgccttgcccaaggctatgccctcacccggggccgcccatgcccagtgccaggacaggtgagggttgaaggccccacttctgggcatcaacccagggcttatgtgcaaggccaccctggctctggggctctctgtgggactggctgaggcctttgtcatgactgtctcggagctcaacatctccctgcctaatcctgttccctcccctcccacagagcagtttccaggaagcctcctgctcgtgaatctccatctctcgatctgtgtcctaggaacagcagaaacccagtagggagaggcagcagtggtgtgggattgtagtacaaggggtctgggtgccagggagacggggggagccccagctggggagtttcaaggcctgtgcggcaggaggatcctggggtccctgggaaaggaggctgagctggggaaagaggctggaaggaaagagactgccgtggcttcttggtttggagagaagatgaaatttcctaaaaggatggacaggatgagatggatctaagcttaccctgaagccgcctgcccatgaccataaccaggcactttgagttttccgtgcgtgtgctcacctggccttggaagattacagccagtcgtgtcactctctattgctggaaagaagaggattacctgcttccctgacaccgtgccttgcgagcacggaaattcacaaacacccagcgggcactctcagccctcgggcttgtgcctgcgtcaagccattctgggccttgggaagtgccaggaccgggctgggtaggcggaagagcttcctggttttgcctgaggtaagggagaggggcttttcctgagagaaggtggaggtgcccagtgacgggataagtgggggttgaaggtcgcactcctgggcttcaccccacggcttctgtgcaaggccaccctggctctggggctctctgtgggatcggccgaggcttaatggacgaacgccaggctccatccatgagacggctcgagtgtggggtcggatggccatggcactcccctggcaggacttcagcacaccacagagctccgaggaagctcagccatggcctgtgtctgccctggcgtctccatgcggcactgggttgggctggg

SEQ ID NO: 587 - DNA, 2100 bp, Homo sapiens
  misc_feature (1)..(2100): DMR3:195099001
acagaccattccacaatcacaatgtatttactttccaaagctgtggataccaaaggaaaaactgtggtagcagagtacggtgtaattaacgtggaatgtaccaggggaaccgaggacatggcagacagacaccgcgttctcaaacaaccgcttgctgttgaagagggtctattttctcctctccctctcccttcccaagagattaaaataataaactctaagaaataaataaacgtgctcagcttcacacatacgaggttgaccctggcgcaggtgcgtggactcacgtgtggggtagcagctggacagccatgatctgtgtccatcaccacccaggcatcatgaccacagagagacatatttagcacacacattacagtgcctcccaaaccagcaccaccatctggggcctgtgctgtcagcctggacgcagtcaagtcagctgaaagtaaaatccattctccataataaaggtgttcacaagcccctttccctgtgcaagttagcaaagacagaaccatctgacgaagaattaaatgcagtaactgggctgggcgcggtggctcatgcctataattccagcactttgggaggccgaggcgggtggattacgaggtcagaagatcaagaccatcctggttaacacgttgaaaccccgtctctactaaaaatacaaaaaaattagccgggcgtggtggtgggcacctgcagtcccagctactggggaggctgaggctgcagaatggcgtgaacctgggaggcggagcttgcagtgagctgagatcgcgccactgcactccagcctgggcgacacagcgagactctgtctcaaaaaaaaaaaaaaaaaaaaatgcagtaactatatttgaatcttgttcagtgtaaaagttcttaagaaaaagttgtttctaaagtgtagcttcagtcaataattgggatctgtttctcactgggcacaaaatggagggagaagagaaaaattctccctgtcttacttaaaaaagaagacagactaaataaagtacaataaatatctatagaataaagtagtggaaatttggaacttccaaatttgcaaatctggaacttccagtccctgcataaagctgtctgagatcctgcacctgaaaccaatctccccgccaccaccgttccccctgcttcatgcgacaggcaaggagtggcccagccatgtctgtccctcctttattcatcctctgtggatgtctgacggccagatggacagggctggtttcctactggtctccgaatctcctgcctccacacctagcatggggtcctatctgggaaagtgtggcctatatggcatggaagccaggtacagcaggagttttacccaccagagcaccggacagtgtgctttggccaggacaaggagggacacatttagcacacacatcacagcgcctcccccagaaggcaggcatctgcagagtcttctgccctggcatcaggctaatgtcatgctcctcagtgcctatagaattaacgtcaccttagcccaacacataaggctcccggtgatgtggcctctacccctgccagcctcctcctcctctctccctggcactctccccggcactctcccctgtactccacccagacccaagttcctgggcctacacacgctaccctcactgaggctgtggtgcccttctccctcctcgtccaccagaaaacttcttgtcacgaaaacccagctcacaggccatgtcctttgttcagctccctcctcgcccccaagccttggactatgtctatggttgtggggtttatactgatcctacatccctttctgtcctattaaactgtgagttctttggggacagagactgtgtctttttatatcggatatccctgctgcctaaccctgtgcctggcacaaagcagggactcagtccaaatttactgaagcgaactagtctagacaggtatactttcactgtccaactgcaaggatataactagccttttccaagacagctataggttccacagagcggcccacagccaaggcctctgccagtctctgtgaagggcttctggcgcaatcccagcagctccccagcctcactgctg

SEQ ID NO: 588 - DNA, 2200 bp, Homo sapiens
  misc_feature (1)..(2200): DMR3:195621601
attttaaaatatgacactatattcaaacataccattataatatgtcaaatgggaatgtggacacaatatatgagacaacctgttcacaactgtttaatgaggaggttatccaacattaggaatgatttgatccttcaataaaaaatcaatgtgtgaaggttcctaggcatgaaagaaagttcagaaggatatgtacgaaatattgttgtctctctggggattgggattacagggattttttcctcttttctttttgttaagtttgtgtttcctaaagtttctgcaataaacgtacgatgcttgtataataaaaattataggttttccttaattgcatagtcagggcttgcctccctgcgcctcctaccccaactccccaacatacagtagttctgagggatttcaccccctgctccgggagagagcgggcttagcctggattctgggagaagctcttgcttggtcccagacccaagtaaaacagcagttcctgttgtgtttggggtgtggccactgccctgccctatacagaaaataggatgcgttgcgttattcctttgtttctctgacaagcttgccaacttattcctgttccgggagaaccgggggctgtcagcactgaaagggggctcagaaatcccatctcattttcagatgggggtgctgaggcctggcctggggaaggtgcttggagggtgttgaggcctggcctggggaaggtgcttgggggtgttgaggcctggcctggggaaggtgcttggagggtgttgaggcctggcctggggaaggtgctggggggtgttgaggcctggcctggggaaggtgcttggagggtgttgaggcctggcctggggaaggtgcttgggggtgttgaggcctggcctggggaaggtgcttggagggtgttgaggcctggcctggcctggggaaggtgcttgggggcgttgaggcctggcctggactggggaaggtgcttgggggcgttgaggcctggcctggcctggggaaggtgcttgggggtgttgaggcctggcctggcctggggaaggtgctggggggtgttgaggcctggcctggcctggggaaggtgcttgcacagggtgacatcatttcagggagtagttgcctctgtccctggccagtctccagtctccagcttcatatcctcccactggagagcagagacgatgggggtgtccctgtgtatgcttaagtgcaatggcattttaagaaaactattagcaattttatgaaactaaattgctgctgttttattagcagccacagtcagcaaggccctggctgggtgcttgctccgtgaagctgtatacgtgtgactgcctcagcagcgctggctgctcctgctcttgaatctaaaaagcagctggacaaaatgttcacgttttcgctcaaaaccaaacaaacagaaaaactcaattagcttgtttgtgtgggctgaagcacctctgtttgcccgccccccgcagtgacccccatagtgtccccggaatggacggactcacgggctgtcacatcgcgcacgtcttccccggagaagggatgtgaatcttggtggggtggggggcactacctggcccagcacagggtgcaggtgggtgacccgggagactctccccgctccagacctgtcatcatgttgccatctgaggcggcactcacaggtttgcggggctgcacatctttgggggcctccactcagcctggcacagtgtgtgcccagcaagtagacgaccgcatcctcgccagcatacatgtgctagaaacttctgtcaggaaacgccgctcttcacagccaagggtggaaactactggatgcattgcagagctgacgccctccctccggcctggctccgagccatgcctggtgtggtggaggggtggaggccaccctcaccgggccctgtgtgctgctctgatgccgctgagggggccggggcctgggtgtgccctcagcgcatccactgcagaggggagcctgcgcccacgttttggctctgtgggtaaaggtggccaccccctgagcttgtagaggtgtgggacacttcccgatgctgcctgccatgattttacatgaaaagccaggaaaaggcactgaggagccacctgaccccacggaatgccatttcctggggttgcttggccagaagtcattgacacagccctgccagccagaagctgg

SEQ ID NO: 589 - DNA, 1100 bp, Homo sapiens
  misc_feature (1)..(1100): DMR3:197873401
ccagtgacggacaagcatggggctgagccctcctacctcaaggagggagtgtcgtgtggttcacacttgtgagctccctgtgggatcaagctgaagctgagaaggagacaagcaggaggatcacctgtggctgggagtttaagaccagcctgggcaatatagtgagatcccatctctacaaaaatacttaaaaaaattaggcgtgcacctgctactcaggaagctgtggcgggaggatcacttgggcccaggagtttgaggctgcagtgagccacgatcatgccactgcacaacaacctgggcaacagagcgagaccctgaccctaaaaaagaaagaaagggccaggcacagtggctcttgcctgtaatcccagcactttgggaggcccaggtgggcagatcacgaggtcaggagttcgagaccatcctggccaacatgatgaaaccccatctctactaaaaatacaaaaattagctgtgcatggtggtgcacacctgtagtcccagctacttgggaggcagaagcaggagaatcacttgagtccaagagacggaggttgcagtgagccaagatagcaccaccacactccagcctggcgacagagtgagactctgtctcaaaagaaaaaaaaaaaaaaaaaagactgaaaggaaatgaatcaagtgttgtagttacatttaaatgatgaactatgggtaattaatttttttggctgttcctccaagttttctttagtgcaggggtccccaacccctgggccacaaatgggtaccagtctgtggcctgttaggaactgggctgcacagcaggaggtgaacaggccagtgagcaaagcttcatctgtatttacagccactccccattactcacatcaccacccgagctctgcctcctgtcagatcagcaacagtattagatcctcagaggagcatgaacgctggtgtgaactgcgcatgcgaggaagggatctaggccacgggctccttatgagaatctaatgcctgatgatctgtcagtgtctcccatcatccccagatgggactgtctagttgcaggtaaacaagctcagggctcccactgactctacattacggtagat

SEQ ID NO: 590 - DNA, 10900 bp, Homo sapiens
  misc_feature (1)..(10900): DMR3:198096901
aagtatcaggatcaggatgtcaagaacatgggaagatactgagagcactaaagcatcaacgcagagttttgcacaagtagatgaaaagaccaaaagacaatgataataaaacagtgaagaagaatttaagtaaaaggaagaaaatgctaattctgatttgatggctaacttaatacaactgttaagtttaacctaacgctgcctccttacatattttaaattcggcttaatgatttctttgtacatagtgaactatatctaactgaatgtgtaaacagactgtaatctactgttgtgccaatcaccgagtttcagccaatcaaagatggccaactgttacaactgttaaagtaaggcaaaagccaaattgtctgttttggtacttcacttccgttttctctatgtcactttcctttttctatccatgaatcttctttgaccaagagacagcactggatcatctctgaacgtattttggttcagcggctgcccaatttgtgaatcgttctttgcttgattaaattctgttaaatttaagatttttcttttaacacaactctacataggctaaagcgtgggtattcttttcattcagtaacaaagaaccatcagtcttgataagaaaatggttcagaaagaggcatataaagaaatgggtacagttcagaaacaacaataggatggtgggttttgtactgttctaaggaacaatgacattctgtagaggttttgcaggatcagtcaagttatatgagaaggaaactggggaagtgtctttcaagttgcctcttctgtgttcatcagaaaaactccattttttatttgttttacatattagatatatatatataatgtttgtaggaaaaaggctataatacttaaatacatatttgaaataatagacaaaaggacacataaattataggatagctttataagtctgcctgacttcatcatttttcatttttatttttatttatttatttatttatctatttatctatttatttatttttgagatggagtcgcgctctgtcgcccaggctggagtgcagcggcccgatctcggctcactgcaagctctgcctcccgggttcacgccattctcctgcctcagcctcccgagtagctgggactacaggtgcccgccaccacgccccgctaattttttttgcattttcagtagagacagggtttcaccgtgttagccgggatggtctcgatctgctgacctcgtgatccgcccgcgttggcctcccaaagtgctgggatttacaggcatgagccaccgctcccggcccaacattttttaattttaatgatttaattttaattttaatgaaagtcttacagatactgcatttaattaatctagccaaaactgattattaattccacataaagtaaaattctgctttgtttctagatcgtcaatctttttaaaaaatgaatttgcagaagagataataactttaagtagtagcaaattaaacaatatggtgaaaattcagtgtctcaatgatgacagccattgagtttgaaaacacacgtatttgcatgtgtctcccctcccactgtccacatcgtgtagcagaatctaaatttgctagattctgacacaagaaaaactagttagaataactcttatgtattaaagaaatactatcaataattaataacttcctaaatataaagtaccagtcccagatgggtccactggtagaatctaccaaacatttatgaaaaatattataacaactccttacaatctttttcagaagacagaatcagagggaatatttcctaactcattcaatgaggctaatattaaaacagcacaatgatattacagtaaaagaaaactgcataccaatgtttcacatgagtgtgtatgaaaaatccccaacaagacaagactagtcattgtagtttcactgattggaacaaatttagattcccctgcaggatgtggacagtgggaggggagacgcgtgcaaatttagattccgctgcaggatgtggacagtgggaggggagacgcgtgcaaatttagattctgctatgcgatgtggacagtgggaggggagacgcgtgcaaatttagattctgctacaggatgtggacagtgggaggggagacgcatgcaaatttagattctgctacaggatgtggacagtgggaggggagacgcatgcaaatttagattctgctacaggatgtggacagtgggaggggagacgcctgcaaatttaggttctgctacaagatgtggacagtgggaggggagacgcgtgcaaatttagattctgctacaggatgtggacagtgggaggggagacgcgtgcaaatttagattctgctacgggatgtggacagtgggagggtagacgcttgcaaatttaggttctgctacgcgatgtggacagtgggaggggagacgcgtgcaaatttaggttctgctacgcgatgtggacagtgggaggggagacgcgtgcaaatttagattctgctacgcgatgtggacagtgggaggagagacgcatgcaaatttagattctgctacaggatgtggacagtgggaggggagacgcgtgcaaatttagattctgctatgcgatgtggacagtgggaggagagacgcgtgcaaatttagattctgctacaggttgtggacagtgggaggggagacgcgtgcaaatttagattctgctatgcgatgtggacagtgggaggagagacgcgtgcaaatttagattctgctacaggatgtggacagtggggagagagacgcatgcaaatttagattctgctacagatgtgacagtgggaggggagacgcatgcaaatttagattccgctgcaggatgtggacagtgggaggggagacgcgtgcaaatttagattcccctgcaggatgtggacagtgggaggggagacgcgtgcaaatttagattccgctgcaggatgtggacagtgggaggggagacgcatgcaaatttagattctgctacaggatgtggacagtgggaggggagacgcgtgcaaatttagattccgctgcaggatgtggacagtgggaggggagacgcgtgcaaatttagatttagctgcaggatgtggacagtgggaggggagacgcgtgcaaatttagattctgctacaggatgtggacagtgggaggggagacgcgtgcaaatttagattctgctacgcgatgtggacagtgggaggggagacgcgtgcaaatttagattctgctacaggatgtggacagtgggaggggagacgcatgcaaatttagattctgctacaggatgtggacagtgggaggggagacgcgtgcaaatttagattctgctacaggatgtggacagtgggaggggagacgcctgcaaatttaggttctgctacaggatgtggacagtgggaggggagacgcgtgcaaatttagattctgctacaggatgtggacagtgggaggggagacgcgtgcaaatttagattctgctacgggatgtggacagtgggaggggagacgcgtgcaaatttaggttctgctacgcgatgtggacagtgggaggggagacgcgtgcaaatttaggttctgctacgcgatgtggacagtgggaggggagacgcgtgcaaatttagattctgctacaggatgtggacagtgggaggggagacgcgtgcaaatttagattctgctatgcgatgtggacagtgggaggagagacgcgtgcaaatttagattctgctacaggttgtggacagtgggaggggagacgcgtgcaaatttagattctgctatgcgatgtggacagtgggaggagagacgcgtgcaaatttagattctgctacaggatgtggacagtgggagaggagacgcatgcaaatttagattctgctacaggatgtggacagtgggaggggagacgcgtgcaaatttagattctgctatgcgatgtggacagtgggaggagagacgcgtgcaaatttagattctgctacaggatgtggacagtgggaggagagacgcgtgcaaatttagattcccctgcaggatgtggacagtgggaggggagacgcgtgcaaatttagattccgctgcaggatgtggacagtgggaggggagacgcatgcaaatttagattctgctacaggatgtggacagtgggaggggagacgcatgcaaatttagattccgctgcaggatgtggacagtgggaggggagacgcgtgcaaatttagatttagctgcaggatgtggacagtgggaggggagacgcgtgcaaatttagattccgctgcaggatgtggacagtgggaggggagacgcgtgcaaatttagatttagctgcaggatgtggacagtgggaggggagacgcgtgcaaatttagattctgctacaggatgtggacagtgggaggggagacgcgtgcaaatttagattctgctacaggatgtggacagtgggaggggagacgcatgcaaatttagattccgctgcaggatgtggacagtgggaggggagacgcgtgcaaatttagatttagctgcaggatgtggacagtgggaggggagacgcgtgcaaatttagattctgctacaggatgtggacagtgggaggggagacgcgtgcaaatttagattctgctacgcgatgtggacagtgggaggggagacgcgtgcaaatttagattctgctacaggatgtggacagtgggaggggagacgcatgcaaatttagattctgctacaggatgtggacagtgggaggggagacgcgtgcaaatttagattctgctacaggatgtggacagtgggaggggagacgcctgcaaatttaggttctgctacaggatgtggacagtgggaggggagacgcgtgcaaatttagattctgctacaggatgtggacagtgggaggggagacgcgtgcaaatttagattctgctacgggatgtggacagtgggagggtagacgcttgcaaatttaggttctgctacgcgatgtggacagtgggaggggagacgcatgcaaatttagattccgctgcaggatgtggacagtgggaggggagacgcgtgcaaatttagattccgctgcaggatgtggacagtgggaggggagacgcatgcaaatttagattccgctgcaggatgtggacagtgggaggggagacgcgtgcaaatttagattccgctgcaggatgtggacagtgggaggggagacgcgtgcaaatttagattctgctacaggatgtggacagtgggaggggagacgcatgcaaatttagattccgctgcaggatgtggacagtgggaggggagacgcgtgcaaatttagattccgctgcaggatgtggacagtgggaggggagacgcatgcaaatttagattccgctgcaggatgtggacagtgggaggggagacgcgtgcaaatttagatttagctgcaggatgtggacagtgggaggggagacgcgtgcaaatttagattctgctacaggatgtggacagtgggaggggagacgcgtgcaaatttagattctgctacgcgatgtggacagtgggaggggagacgcgtgcaaatttagattctgctacaggatgtggacagtgggaggggagacgcgtgcaaatttagattctgctacaggatgtggacagtgggaggggagacgcgtgcaaatttagattctgctacaggatgtggacagtgggaggggagacgcctgcaaatttaggttctgctacaggatgtggacagtgggaggggagacgcgtgcaaatttagattctgctacaggatgtggacagtgggaggggagacgcgtgcaaatttagattctgctacgggatgtggacagtgggagggtagacgcttgcaaatttcggttctgctacgcgatgtggacagtgggaggggagacgcgtgcaaatttagattctgctacgcgatgtggacagtgggaggagagacgcatgcaaatttagattctgctacaggatgtggacagtgggaggggagacgcgtgcaaatttagattctgctatgcgatgtggacagtgggaggagagacgcgtgcaaatttagattctgctacaggatgtggacagtgggaggggagacgcgtgcaaatttagattctgctacaggatgtggacagtgggaggagagacgcgtgcaaatttagattctgctacaggatgtggacagtgggagaggagacgcatgcaaatttagattctgctacaggatgtggacagtgggaggggagacctgtgcaaatttagattctgctacaggatgtggacagtgggagaggagacgcatgcaaatttagattctgctgcaggatgtggacagtgggaggggagacctgtgcaaatttagattctgctacaggatgtggacagtgggaggagagacgcgtgcaaatttagattctgctacaggatgtggacagtgggagaggagacgcatgcaaatttagattttgctacaggatgtggacagtgggaggggagacgcgtgcaaatttagattctgctatgcgatgtggacagtgggaggagagacgcgtgcaaatttagattctgctacaggatgtggacagtgggaggggagacgcgtgcaaatttagattctgctacgggatgtggacagtgggagggtagacgcgtgcaaatttagattctgctacgcgatgtggacagtgggagaggagacgcatgcaaatttaggttctgctacgcgatgtggacagtgggaggggagacgcgtgcaaatttagattctgctacgggatgtggacagtgggaggggagacgcgtgcaaatttaggttctgctacgcgatgtggacagtgggaggggagacgcgtgcaaatttaggttctgctacgcgatgtggacagtgggaggggagacgcgtgcaaatttagattctgctacgcgatgtggacagtgggaggagagacgcatgcaaatttagattctgctacaggatgtggacagtgggaggggagacgcgtgcaaatttagattctgctatgcgatgtggacagtgggaggagagacgcgtgcaaatttagattctgctacaggatgtggacagtgggaggggagacgcgtgcaaatttagattccgctgcaggatgtggacagtgggaggggagacgcgtgcaaatttagattgcgctgcaggatgtggaccgtgggagaggagacgcatgcaaatttagattccgctgcaggatgtggacagtgggaggggagacgcatgcaaatttagattctgctacaggatgtggacagtgggaggggagacgcttgcaaatttagattctgctatgcgatgtggacagtgggaggagagacgcgtgcaaatttagattctgctacaggatgtggacagtgggaggggagacgcgtgcaaatttagattctgctacgggatgtggacagtgggagggtagacgcttgcaaatttcggttctgctacgcgatgtggacagtgggaggggagacgcgtgcaaatttagattctgctacgcgatgtggacagtgggaggagagacgcgtgcaaatttagattctgctacaggatgtggacagtgggaggggagacgcgtgcaaatttagattctgctatgcgatgtggacagtgggaggagagacgcgtgcaaatttagattctgctacaggatgtggacagtgggaggggagacgcgtgcaaatttagattccgctgcaggatgtggacagtgggagggcagacgcgtgcaaatttagattcgctgcaggatgtggaccgtgggagaggagacgcatgcaaatttagattccgctgcaggatgtggacagtgggaggggagacgcatgcaaatttagattctgctacaggatgtggacagtgggaggggagacgcttgcaaatttagattctgctatgcgatgtggacagtgggaggagagacgcgtgcaaatttagattctgctacaggatgtggacagtgggaggggagacgcgtgcaaatttagattctgctacgggatgtggacagtgggagggtagacgcttgcaaatttcggttctgctacgcgatgtggacagtgggaggggagacgcgtgcaaatttagattctgctacgcgatgtggacagtgggaggagagacgcgtgcaaatttagattctgctacaggatgtggacagtgggaggggagacgcgtgcaaatttagattctgctatgcgatgtggacagtgggaggagagacgcgtgcaaatttagattccgctgcaggatgtggacagtgggaggggagacgcgtgcaaatttagattctgctacgcgatgtggacagtgggaggggagacgcgtgcaaatttagattctgctacgcgatgtggacagtgggaggagagacgcgtgcaaatttagattctgctacaggatgtggacagtgggaggggagacgcgtgcaaatttagattctgctatgcgatgtggacagtgggaggagagacgcgtgcaaatttagattccgctgcaggatgtggacagtgggaggggagacgcgtgcaaatttagattctgctacaggatgtggacagtgggaggggagacgcgtgcaaatttagattctgctacaggatgtggaccgtgggaggggagacgcgtgcaaatttagattccgctgcaggatgtggacagtgggaggggagacgcgtgcaaatttagattgcgctgcaggatgtggaccgtgggagaggagacgcatgcaaatttagattccgctgcaggatgtggacagtgggaggggagacgcgtgcaaatttagattccgctgcaggatgtggaccgtgggagaggagacgcgtgcaaatttagattccgctgcaggatgtggacagtgggaggggagacgcgtgcaaatttagattctgctacaggatgtggacagtcggaggggagacgcgtgcaaatttagattctgctacgcgatgtggaccgtgggaggggagatgcatggacgtggatggggatttgtggaaactctctggattttgtgttcaattttactgtgaacctaaaactgctctaaaaaataaagtttatttaaaatatcttgaagactatttttattcatttcaaagttttataacgagtgtgttcaaaattactggtgtaattaaaataaatctgtatctccatgttttaatcttacattgtcattccctttgacggatcctccagatactctaatatcccatcttacctgcttacagccactgtctccctctccctgcctccatctttctccctcttccttttattttttctccttccttctctacccctcagttttccttcttttggattcttatgctgtgaacagtagacattttttaaattaccgtaagtattgagggcatatgacacaaacttatggtggaattagggcagccgagcacagtgtctctgcattcacagaactgggtcttagttcgggcctcaggcaggactgggtctgagttcaggaaactatcgtcagataaaaccaagtgtctggctctgtgattgccagtctggtgactcaactttctgtctctatctgctcttataatcacaagacccactacttctctttgcttgcctgacatttagactagttttaataaagtccatttgaccctactaattaccaggaaaataaaacatgcctttgggcacacacacctcacatgagcccctgtactagccaattaatgtgtaaaagctctaccaaatggtgtcttttcttggtctattaaccaattatacaaatatccctcctctaacagtcttgatagagattcaatctagatccaaattctatgaagttcacgtgtattagtttaccagtccacttcagttatctgctaaagcctttgcgttgtccagttttctagttttaaacgatcagaggagaccgtccggtagatgagacactttggtaatatgtggtagtagcaccaaaggccatctgtagagaaaaatcatgaaattctttaattactttgaattctgtataaaaaatagaaatataaaaatagtttctgtgatttaaaattgctattaaataaagacttgtcatatgctttttaaaaaattgtcctttttaggcagagaagtagtgcatgagttggcaattatttaacttattggtatagatacatctatatttatacttatatgtatttgtgtagtgtgtgtacttgtatgtgtatacataaaagaacactaatgactaaatattgaacttgatgacttacattggaaaccccgagaaagaaggatgtcttatttgcgtcacgtactacgccatagcacacacttagtactcagaaagttaaataataataataaccattgtgtaataaaaatggtcacggggacaaactggtagagggagaatgaagtccagtaataataactgatacaatactagtctccagaagaacatgtaatttttcatctcttttacccccaagatactcttagaattattcaggtgaagtctgactcacagaactcccagcatatacaaatgcaagaatttatagtccaagtttgttgtaagtaatggatcagtgcacatctgggagaaaagcataaaagaacagtcagattgaggtgttttatttttcattcaatctcatttatttgaacatttattaaatctgcagtgggtggttaactcatactgtggatgtctccaagccctcaggagagtgttcatccaagagacagagagagcccctgagggtctatttggcagagactgacaaagagacgaaaatatttgaaaacatgctatcttctccagacatttgtctgtacatttgtat

SEQ ID NO: 591 - DNA, 1300 bp, Homo sapiens
  misc_feature (1)..(1300): DMR4:266401
gcccacatactttatggagttaaaaaaaaagaatgagaaacaagaaaattatacctctagcatgagcaccacattaaaacagagactttttacagggagattctcaaaaatgatccattagattttacagtaattacataaaaataagaaaacatagattttaattcaaaatgttttaggtttctagatttccagtaaattatccacagtattaatagaaacttctttgttccaatattgctattttcttcggaaaataggtacaaactctcatgcaaacacaattgcttgcttcataattttcttacacccaaggtttatctttagagcacaacatttatatatttaactccatgtaaattaaaactaagtctgtatgtttacaggagaacatgatgcatgtccaaagataaatatgaaacatttttgaaaatcattcaggactcaggaatgtatgaattataattatactctgatatacttattacaatcataaaatgacctgtagtagaaaaaattgtacatttaaaaataattgaagtgtataattagattgtgggtaatataaaagataaatgctggagaaaccccaactctactaaaaatacaaaattagccaggttgccaggcgcagtggctcacacctgtaatcccagcactttgggaggctgaggcaggcagatcacgaggtcaggagatcgagaccatcctggctaacacggtgaaaccccgtctctactaaaaatacaaaaaattagccaggcgaggtggcaggcgcctgtagtcccagctacttgggaggctgaggcaggagaatggtgtgaaccctggggggcggagtctgcagtgagccaagatcacgccactgcactccagcctgggtgacagcgagactccgtctggggggggggggggggaattagccaggcatggtggcacatgcctgtgatcccagctactcaggagactgatttaggagaattgcttgaacctgggaggtggaggttgcagtgagccaagatcgcaccattgcactctggcctgggcaacaagaacgaaactctgtcccaagaaaaagaaaaagaaaaaaaaaagataaatgcttaagataatgaataactcatttactctgtcatttatatattgtatgcctgtatcaaaataacccatatataccataaatatatacatagttatgtacccacaaaaactttttaaaaatttaaataagaataaaaatgcaacatgggaacaatattcagtttacttgctgtttaaagccattggaaaaatagactag

SEQ ID NO: 592 - DNA, 500 bp, Homo sapiens
  misc_feature (1)..(500): DMR4:602401
ctcccctgccctataaaaacccacccatgtccccgtcaagggcagcaggcaccccaggctgctaagacgtgcactctgagcgccttcccagcccagggactgtccccaaggtccagctgcccaggggccctgagcagccactcccacttcttgtcatcacaaccgcttaaggacctgcagatgagggcatcctatcccaccccagccctgggggccatgttcaggccaggagaagccaccaaacactgccaccatcttcctggctccagaggctctgtgccaacaccaggcccccttgggcccacctagcccacagaccttggaggcaggtgcacgagcaggtgcatccatcccatggactctgatgggctgtcaggaaggacgcaggtagagcccaggtcctgcccagcaggtgcagttccaaggctgcctctgggtggcgtgcttggaccagtcaggtgccctgtgttcacctaacaccgcagaaccggcttccagct

SEQ ID NO: 593 - DNA, 1200 bp, Homo sapiens
  misc_feature (1)..(1200): DMR4:866901
agcctcatcactcatctactgtgaagccactcgccttcagaacagaaacacgtaccagcggcagggggccctcctcttggggtgctctgcacgctcaggggaggggccgggcttgccaggagcagcgggtcctcgctgagcagatcctccgggggcccctgggaggcggcctcagggggcccaaggaggcagctgagcaggtcggtgttgctggagggggccttgcaggcctgcgggggtacagctggccctgcgcccacctcggagtgcaggcccaggaggtcgaccccgtcttcctgtggcacaggctctggcagcacagccggtgtctccacctcaaaaaccaagtcctgctgcaccagccctgctgccaggccggggggctctgggtcggccctgggttcctggccctcgctggagatcggggatcccccttcatctgacacctcactctcgtctctgtcctccatcagggcagactcgctctccttggaagaggcattttctgcaccagtctctgcctccttctcttctgcgaaaaggaaacaaaaccacaggctagtgagaccacacggccagcaccagggtccccacggcgcgtcccttcagggcctcctcggcccagggccttggtgaacacacgtggccagcaccagggtccccacggcgcgtcccttcagggcctcctcggcccagggccttggtgaacacacgtggccagcaccagggtccccatggcatggcccctcggcacctcctcggcccagggccttggcaagtgctgcaggaacaccagggtccccacggcgcgtcccctcagcccagggccttggcgaacccacatggccagcaccaatgtccccatggcacggcccctcagcgcctccttggcccagggccctggcgagtgctgcagaagcttctgggcgggcggtggggtgttgttcctgaggcgtctccagcacacccacctccagcctctgcctcaagggtctgcctgtggctctctccgcctgggcctctgcggtgcctcaggctgagtcaagtgggggccacatggcagcactagggggtaggaacaccaatcaagggtgctctgggaacaggcggcagaagggacgagcccgatgggaaggccaggggtgctgggacaggaagtggcaggtgcatcccttggggtgtgtctggggtgaggtccag

SEQ ID NO: 594 - DNA, 800 bp, Homo sapiens
  misc_feature (1)..(800): DMR4:971301
tgtatcctctcatccagagagcagtccctccccttcgcacgtaggcccagcactcctcctgcctctgcagttgggcctctcaaggggcagccctgggctcaccaggttcgccaggtggcaggggcttctcggccttcggcagattggctttaccaaggacatctgtgtctcactcccccgaaactacgcatacccctaattgtccctgctacgtgctgtgcaccgtgcctgagaccgagagccacccaaggcaggtgagggctctgggaggcaggagccgctggggagtggacagccccaagcctcccaaggagctctggctgtgtgcataggacccagggagcacctgagccggcggggtgctcaggagggcataagaggagcaagcgccacaccccagcagtaaaacagacaggagggtggggccggggcagaagggagggcaggaaccctgggctggggcaaaggctgcgggggctgggagtgggcagggcacccagtgacacaactgccaagacagccccgggtgaaggttgtgccacggagccccaggcagtccagctgggacagggagctcttccagaaggccccgctggtgccgcccttcacctgctgcagccctagccaccccagtctccagatgggaccgggagaagcttctcctggcagcttaagagaaaagctctggaagcaggccagggtccaccgagagaaggggggacaggcagcacccaggtccctcctctgccatggagacagggcctgctcaccccacgccccacgcttgggtctcctggcgg

SEQ ID NO: 595 - DNA, 1100 bp, Homo sapiens
  misc_feature (1)..(1100): DMR4:1003701
gtcactcgggccacttgccgtggcccatcggctccctccctcgccgccctgcgtccctgcccttcaccccacacactgtgggccacgcgccaggccctgccagtggggtgtgggttctcctaggggacatgagatggacattcgggctccagccctctcctgcctgggcaggaagagtgcccaggggctggggaggtgccgccgaggggcttgagggaatgaggctgtgggtccacgcggccgtgccctgcctgctcccacctttgaggactgtcttgaccccagccttgttcttggcctgacctccccaggtgcctgtggacatacgagatccagttctctcaggacggtaaggcgtacaccccggtcagcaggaagccatcgaccttcaacctctttgtgttcagcccaggtgcgcccaccacccgctgccctggactcggccaccccattcttgggcctcagggcagtactgggtgggggcctcgagaagcctggggtcagggggctttcgggtgggggcaggttccggttggcacacatgtccccttgtctccagacacaggtgctgtctctggctcctaccgagttcgagccctggactactgggcccgaccaggccccttctcggaccctgtgccgtacctggaggtccctgtgccaagagggcccccatccccgggcaatccatgagcctgtgctgagccccagtgggttgcacctccaccggcagtcagcgagctggggctgcactgtgcccatgctgccctcccatcaccccctttgcaatatatttttatattttattattttcttttatatcttggtaccaacgccccctttaaagcggctttgcacaggtcagtctcgggttgaggctctgtggcttggccctgggcacattccagggcagcctccaagggtaaaccccggtggctgatgaggacccagctggagcgaggcctctttccccctcgctcccactcagaccacccccaagcctggactggaagtgtgttgagcccctgggtcaggctggcgagccagctcggccctgcccacccaggggtttccgagatcacccctggtgaggcggcgtg

SEQ ID NO: 596 - DNA, 1300 bp, Homo sapiens
  misc_feature (1)..(1300): DMR4:1469101
aggccacctcagcagtgggagtttcgcccctattttacagatgcaagcactgaggctcccagaggtggaggctgtggagctaggtctgcggatggctctaagcgctgcaccctgctcctgctgagtttcgggctgactggcaaggggggaaggttcagggtcttgggaccctgaagggcattgcagagccctgctgcctggctttgaggaggcccccagggtagggagtggagatcacagggggctggcccctgtttgatgacatggctgggactgacataagattctcagtggattcaagtgacctctgaacatcagggtatagctgtgggtaccccaaagggccatgagaagggtaggaggcttggaggggaggtggtgggaggtgggcagaagctgtgggcctagggaccaaccagagattttgccaacacagtgggcacaccaatgtcctgtggctgccataacaaagtgccccaacccgaggggctaacaatgccagaagtgcgtcctctcacaggctggagcccagaagcctgaaacccaggtgctggcagagctacactctctgcagtctccaggggaggacccttcctgcgtctccccagattcctgggctgctggccttcctggatgccatcctcttggcttgtagcagcacactccacctgcctctgtcttcacatggccatctccctgcgtgggtgtctccgtgtctctgttttctcttcttacaaggacaccagtcattggattagggcccgccctacccatgtgactccattttaccttgagtacatctgcaaagcctgtttctgaatgagtcacactcatgggtactgatgtacaggaatttcagagggatgctgttccacccagtgcactacagcacacaggcctgcagccagtgggccgggggccgcggcacctactgccagagctgctgggtggcctggtggccagtcgctggtgacccttcccaaggccaccaccctcgtgtccatgcctgaccgcgccctgcatgctgacagtgtcctggccctgactcacagccagagcccagtatcatcaagacgctggtggcggccacgaccccagggctgtgcgtgttgcctctggctcctgaggcgggctccgcggcctcatgctggacaccgtgtctaaccggccaagattgacctgtttggggctcctcactgcagctgagcgatttgatctgagacccagacagcagtcagggcagtaattggatgttatgagatcggagggccactctccgaggagggggcagctgagcggc

SEQ ID NO: 597 - DNA, 1800 bp, Homo sapiens
  misc_feature (1)..(1800): DMR4:2710701
tgccagattgtccaggctggtctcaaactcctggtctcaagccatctgcccacctaggcctcccaaagtgctaggattacaggcatgaaccaccgtgcccagcctaccttgttaatttctgctttcgtctttattttctttctgtgctttcttttttttttttttttttgagacagagtctcgctctttcgcccaggctggagtgcagtggtgtgatcttggctcactgcaaactccgcctcccgggttcatgccattctcctgactcagcctcccaagtagctgggactacaggcgcccaccacctcgcccggctaattttttgtattttttagtagagacggggtttcaccatgttagccaggatggtctcgatctcctgaccttgtgatccacccaccttggcctcccaaagtgctgggattacaggcgtgagccaccacgcccggccactgtgctttcttttgttttactttcttggggttttttctaactttttaatttagaaattcagttcattttgttttttcttccatttttattgataaaagtgttcagcacgtggaactttcctctgatctttttcttaacaatatcccatggaatctgatagataatttttccttttttgtttgtttgtttgtttgttttgtttttgagatggagtctctctctgtcgcccagattggagtgcagtggcatgatctcggctcactgccacctctgcctcctgggttcaagcaattctcctgtctcagcctcccgagtagctgggattacaggcatgcaccaccacgcctggctaatttttgtatttttagtagcgacggagtttcaccatcttggccaggctggtcttgaactcctgacctcaggtgatccacccgcctctgcctcccaaagtgctgggattactggcgtgagccaccacgccgagcctccattattttttttaaagaaattctgggctgggcgctatggctcatgcctgtaatcccagcactttgggaggccgaggcgggcagatcacttgaggtcaggagttcggaaaccctgtatctactaaaaatacaaaaattagctggacgtggtggcacgtgcctgtagtcccagctactgtggaggctgaggcagaagaatcgcttgaatttgggaggcaaaggttgtggtgagctgagatggtgctgctgcactccagcctgggagacagagcgagactccatctccaaaaaaaagaaattatgtaatttccatgcgtcttttttctttcactcgatagtgtaataggcagcttttaaatttccaagaggagaaactttgttgttgttaataatttacaggtttttttcattgtgatcagagaatattgcttttgttttgcaaaacctattgatactttctgaggcccagtgtatgtcagcttttgtaactcctccatgtgtacttgatagaagtgtattttcttgggtcttggtatagagttcactgtgtgtgtgtgtatatatatgtacgtatgtatttacatatggagatacatatatgtatacacctccatgatacattaattctgttgtttagtcttctgtatatccttattttgtgtcctcatggcctgtcttctgtggcttattattaatatgtttctgtgttttcttgcatctcctgtttccgtgttgtttggtgcacattcctgttatatatttttagttacttgtggctttttgtgttgagaagcggccaccttctggtcgtgctttgtgcctgcggcctaagtcctgctctgtctgcgttgtgactgct

SEQ ID NO: 598 - DNA, 2800 bp, Homo sapiens
  misc_feature (1)..(2800): DMR4:3266501
gaggcggaggcgggtggatcacgaggtcaggagatcgagaccatcctggctaacatggtgaaaccccgtctctactaaaaatacaaaaaaattagccgggcgtggtggcgggcgcctgtagtcccagctacacgggaggctgaggcgggagaatggcgtgaacctgggaggcggagcttgcagtgagccgagatcgcgccactgcactccagcctgggcgacaaagcgagactctgtctcaaaaaaaaaaaaaaaaaaaaaaaaagtggagatattggccgggcatgatggctcaagcctgtaatcccagcactttgggaggcccaggcaggtggatcacctgaggtcaggagttcgagactagcctgaccaacatggagaaaccacgtctctactaaaaatacaaaattagccaggcatggtggtacacgcctgtaatcccggctactcgggaggctgaggcaggagaatctcttgagcccaggaggtggaggttgcagggagccaaagtggcgccattgcactgggcaaaaaagagtgaaactccatctcaaaaaacaaaacaaacaaacaccaaagaaatggagctcttctagaggaaacgtggaaagatgcacgcctctgctctgaggcctttctgagtgcatacggtgaaaatacagtgtctaacttgattaatattccataagtttctgtatagcaaaagggctttaaaaaggtgaaagaggccggaccatggctcatgcctgcaatcctagcactttgggaggctgaggtggacagatcacctgaggtcaggagttcgagaccagcctggccaacatggtgaagccccatctctactaaaaatacaaaaattagctgggtgtggtggtgcatgcctgtaatcccagctactcctcgggagactgagacaggagaatcacttgaacctgggaggcagaggtcgcagtgagccgagatcccgccactgcactccagcctgggtgacaagagtgagactccatctcagaaaaaaaaaaagggtgagatagctaccatgggcggtaacaacacttgagcagcatgcaggctggacagtggttattgtgggccagcgtttgaatggggctggaagtgtgcagccccagcgtcctgggaggaggggcctccatccccaccccgagagccaggcagggcctcaccttccagggcacccctttctcaccaccccttgcccagcccctccttccaggggcctctgctcttccttctcgaagcaggtgctgtgcctgagtgtccaaggccaatttctgacgctacattctggagtgttctactgacaccatctgccaggacccacacttccaagaatccccacctgtgtgcttctagagcagacagatggggtcagaggtgaggcagcggggatttgggaggcaggaggtcagggccatggttggcagaggccactgatggtcaggagaagcaagacagggatgcaggcatcccgcaggtgccggtttgtcggctcctcctgctgtgtgcagcctccttcctgccgggccctgctgaccagccctgacctcaggccgccctgaggtgcacagaggtcggcagccggggcagccagctgcagggatccagcaatcttatctaggagcctgcagggtcccatgagacaagtgagatacctgaagaagttcctgccaaatctggcaaactgccttaaaggggcaggcaggtaggcttttcctttccatattgcttcttgcgcaaacagacgaggtggaggaggtgtctggctctccatcggccttctagggccctgaggcagtcctgagggtgagggccacgcccaccagagcggaggggcctgagggcactgtgggctgtcacctgggcctggctgcttctgtgggagacagaaataaaattcccaaccatgccagcgttatttccacgtttgaagccaaatgcaatttttgagagggaatttagtgcccaaaaggggagggagtgttgaaaatgacaggttcaactcctacagcatggcattggctcgtgaggctgctgaatggggcgtggggaggaggtaaggttccacctgctgcaggctggaaggctgatgtggtgggaaacgtggggtcacactgtcacctgggcctcctgggccagcagaccacccacaggccgggagggcagcctgaggagaaaggcaggaaaaaccttcagaatgtggtgccactgtcagcaaagttccccaagaaggagatggccttggggcacagccagcgggcggggtggcaggagctgcagctgggctagggagcgctctctgcccgtggggtgctatgaaagccggtgtgattttgagctctgcagggctgtccccaggctgccgacattgcaggaggggtccagtcctaggcacacaccattgtcacttcaccaggctccacggggccccagatctggggactgtccagtcaccggactctgcggacacagagtcaaatctgaccccatcctgccttcaagccagcgtagatcaggtctgggtacactgggcctgtgggggaggggctgtgggttggccctcaaggaggggaagatgggggcggcaggcaggggtggcgttgtggaggtccatgaggagggcagggcagcctgggagcctggcattggttgtagatcctggcagcacgggtgagtaagggaagggccctgaggaggggagggcagggctcaggtcttgctcagccctagactggctctgaccccacacccagggttgcaacgtggtggggtgaggtcagga

SEQ ID NO: 599 - DNA, 400 bp, Homo sapiens
  misc_feature (1)..(400): DMR4:3792201
ggcaagggcgctccaggcagccactggcgtctctggactcagttggagcagagacatggaacatatgatggtagcgcccctcacatcccgagttcctaagtcagggggcccaccagcccaaaagggagccactgttctccccagttgaccagtgtgcacacagcagtgggggaagcactgctcaccatagggtgaccaaggggccatcccagaccccaaccctacattcaggagacttcccaccaccctttacctcagcttcccgttcatggaagaaggctcacaccctgtcaatgcctgctggaaacatgtgtgtgagtcggcagaatggctggtgggtaccatctgctcccacccttccactggccctttcagtacgtgcatttctgaaaatgcctgt

SEQ ID NO: 600 - DNA, 1200 bp, Homo sapiens
  misc_feature (1)..(1200): DMR4:4918201
ctccaaactaaactatgatgctgctacccccattgattctgggggatgctaccttgtataacccctgacgtcatgctccctgctggactgggctaacatatgccacaaaacctagattagttaataatgcaagaaacacttgccctgggaccccagggggtaaggctttgccttctaagtttacaatctaggggttagagggcagaaaaacaaacaacaaacatggcaccagacattgggtgtggcctggggaggacaacaatgtcacatccttcaagggcgggatcttggtgagttgttgggtgtcttcagttgcagatgtcagaagccaaatgtaaccagcttaagtccaggaggaacgtctattggctcaagtcctcaaagatggaaaaggagcctggacgttgcagaaaagccagctcagccggaaacagagtgacattttctccacaagagtacctgcttctgtttgcacactatggcttagttttcttctgctacagttaactggggagacatgcccctggagcgacatctgactcaagaggaaagggtcttctgtctcctgctcccccctggaaaatcctctggaaggatgaggttgactcccctggggtacgagctcccccttgggcccaagactgtggtctaagagatgaggcaccaggcagccaggaggtctcacacgcacctctgtgagcagagagacgggggctgctaccagacaaggaggaagagggcagggattgcacaaagggctctctctaggcactccctgggatctgggtctgcagccatatcacacctccctctccttggcccacctagttgggcttcttcctgcctggtggcccatgctgcagaagaccttcatgccttgctgctgaaactgtacacggtatcgccctgtgcctaaggctactgagcttccaccctgtcccagagtctagatgccctctgtccttacctgcccaacagaatggtcgctgctgcctacccaccagcctctgcatatgccctccccacacccccgcccccacccccacaaaagcaaactcctattaccctgtaacagtcagtgcaagtgccagcttcaccattctgagctattcttggggtctcaatgccccaggacctcctcaggcttccttaggcctctgagcccagcaggctgcagagccagggactgagggctgggcc

SEQ ID NO: 601 - DNA, 300 bp, Homo sapiens
  misc_feature (1)..(300): DMR4:6252901
ctgcccaagggcatctcttgctgggcccacctaagcccacgcatgcccgcccacctccctctttccatctctatttatagagcccctgccgggtgccaggcagtgctctaggcactcgggggcaatggtgagcaaacggagccctccctctttggactcatgttctaatgggaggcaggcgaagaaatcaacagctaagcttatggcacccagcagggaggaaggaagggggacgggatgggagggctgcagtgtcccctagggtggccagggagggtgtctgagaaggtggcacatgtg

SEQ ID NO: 602 - DNA, 1300 bp, Homo sapiens
  misc_feature (1)..(1300): DMR4:6736401
cactgcactctagcctgggcgacagagcgagactccatctcgaaaataaacaaacaaataaataaaataaattaaaaagtacatttacagtgttgcgcagccatcacctcctcacccatctcccgaacttgttcaatttccccaactgaaactctgtccccattaaccactaacactcattcctctctcacccaggccctgggacccaccattctactttttatctttatgaatttgacaactccaagaacctcatgtaagtggaatcctgcagtatttgttcttttgtgactggcttgtctcatttagcataatgtcttcaaggttcattcatgttgtagcatgggtcagaatttccccctttttttttctttgagagagggtctcactctgtcacccaggctggcatgatctcagctcactgcagcctcaaccttctaggctcaagcaatcctcccatctcagcctctggagtagctgggactacaggcgctcactaccacaaatggctaatttttatttttttgtagagattgggtttccccatgttgccctggctggtctcgcactcctgggctcaagccatcctccctccttggcctcccaaggtgctgggattacaggcgtgagccacgatgctgggagtgattttcctcctttttaaggctgaataacattctagtgtgtgaatatactacattctgcttatctattcatctgtcaatggacatttgggtgtttccacattttggttacggtgaatgatgctgctgtgagcaggggtatacaaatatctatttgagtccctgatttcagttcttttggctatatgcccaaaagcagaatcgctggatcatatggtaactctgtgtttaatttttaaaatttttaaattttttgtagagacagggtctcgttatgttgcccaggctggtcttgaactcaaacaattctcctgcctcagcctcccgaagtgctgggattacaggcatgagctaccacatgcagcttgttttttttgaggaactgccatactcatttctacagtgggagcaccatagaacactgccaccagctatgctagcaccaggtatttctccctatcttcagttttattttccccatatcttcaccaacactggtaattttctgtgtttgtttgtttgtttgtttgtttgtttttacaatagccatcctaatggttgtgaagcactatctcattgtggttttgatttgcgtttccctaatgatcagtgatgttgagcatctttttatgtgcttattggccatttgtatatct

SEQ ID NO: 603 - DNA, 200 bp, Homo sapiens
  misc_feature (1)..(200): DMR4:7203701
tgtatggttctgggggcattcaatgcattcacagtgttgtgcagctgtgaccaccattcttctccagaacgttctcatcttcccaaatggaaactctgcccctcttaaacactaacccccatcaccctcctccacccccgccactcacagtctactttctgtctctatgaatttgatgctctaatggcctcatatgggtg

SEQ ID NO: 604 - DNA, 2900 bp, Homo sapiens
  misc_feature (1)..(2900): DMR4:7825801
ttttttgagagaactaataaaattgataaacttctggcaagactgtgaagaagaaaaggcagcaggcacagggcatttttactccagttaccacacagaagagcatgcaagaccatcactcccaccctgacaaataaaacaagtggatatgcttaaaaaaaaaaaaaaaagtcctagtacgtctgaaccgttctgagcaatgaagatgcaaaaaacctacatgaactaaatcctaaaagtgaaggctcctttgcaggaaaaaagtgacccacaggcccccttctaactggtagaatggtgggtgaagggggaacccaccatatttgggacagggaagaagccagccaagttctcactgtgtgggctggcatacctgttgacaattcaaggtgccccggtgacagaatgagtccacagtcacctgccaactctctccaaggtctttactgggtatgcaggtacagaacagaagctggaggcaaggaaacagagtttggagagtccccaccccaccccgccgcccccagaggcacagcccttctcccaggtgcaaggcagttgccctacaggggaaggcagggaagcagagagacgcccctcccaggaggcccaggcttcccagagcatccacagctggagacagagcacagcacagagggatttcgcccaaggcacaaaaagccagaggcaagactgcagagaaaagagaccacttagcaagtgaaaaagctggccggtaggccaaaaacaaaaacaaaatcaagctggtttagaaagctggcacttgtctgtagcacacaaaagagatcttcagattttcaccacgggtcttgggtcctgggccatgccatgccaacgacaggaaactcctgatccaacacgtcaatggtttggaaggcagtaggggagtgagagtgaggcaaggtgaagctgcaacaacgtgcagcccctccccacctgcaggagagccagatacaggctgccagtggggagcagggtaggaggcgggcacacccttctccagggaaataggactcttgtcagtctctgctgttcttctacacaaaacgcatggaatgtcatggaaactcctgagacaaattcaacagaggcagcccaagagctgggcccaatattggaatgaccaaagatgttaaaataactaaaataaaacatgctgaaatagctcatgaaaaggcaggcgacataaagagatggagaacttcagcagagatggaaacgatttaaaaaagaaagaaagaaatgccagaagtgaaaaatggatctcagaaaagatgacgtcatcagctgggctgaagagcccacaggagagaagaggacccgtaagcccgagtacaggtaaatagaagcgtccacccaagctgaggcacggaaggagtgaaggaaaccacaacggagtatccacaatctacgggaagtatcagaggacccaacatacctacagatgcaacttcaaaaggagaggagaggccgggcacggtggctcatgcctgtcatcccagcactttgggaggctgaggcaggcggatcacctgaggtcaggagttcgagaccagcctgaccaacatagagaaaccccgtctctactaaaaatacaaaattagctgcaggtggtggcacacgcctgtaatcccagctacttgggaggctgaggcaggagaatcgcttgaacccgggaggtggaggttgcggtgagcagagatagtgccattgcactccagcatgaacaagagtgaaactctgtctccaaaaaaaaaaaaaaaaaaaaagggagaggagagaaaaatgaggcaagagaggacggccaaaagcttccccaagtgaagcttttgagagacaccaacccatagaacaaagaagcacaaccaaccctgagaaagagaaaaacccacaccaccgcactgagacacatcgcagtcagctgctgaaaaccagatgtggagaacaaatcttaagaggaggaaggcgggaaaggacactccacacccggaggaccaatgggcacaaagggcgggtgacgtctcatccgagcgagggagaaatgaagacccttccagacagtcaaggctccgagagttgacttccagaagattcgctgtataaaaaaaggtttcttaaaattttgttttaataacttctttggggtaaaaggaaatgaaagtgactgaacacccaaatcttcaggaggaaatgaagggcatgtggaaggtgaattcagcccggtgaatattaaagacgtggcttcaaatgtgggtgtccacaggattcaggttctgcaaggacaatggatacagtaaacatattgtggttcttccttgagaactctggcaaagccactatggtacctgcacagcacattaaagccactctgtgttcacctagggctgcttgaaaccacaagatgctaagaaatccctatagcgtcgcccccacgccccccggctggctatgtgaacttgggatccaccagcaccaggactctgctacgtcctgatgagaaaaggaaagcagcattttcaaaactgcttaagatggttgccttagggtgttttggtttattttgaaattcgagacagcagcttattcaccatgtggtttcttctttcagcagacacaggaagagtctgtctctcagcctcccccacagtttggccaaaggagtgtgggaagcggtgatgtaagtccagttcttgcccccagaaacatcctgctgtcatcagctatccggcctgttctctgcaggcgtatgcggagcctaatgagatgcagaggtggtggcagaggaaaagcaacagtggtaagagcagcttttacttatgtaaggctcatgacatgctttctgccattgtgaacactctgtcttagcatctcgtcctcac

SEQ ID NO: 605 - DNA, 800 bp, Homo sapiens
  misc_feature (1)..(800): DMR4:9642901
ggcccggacttcaatccggcctcccacattattcctgataccacacctgaccctcatgactgtatctctctgatccacctgacattctcgccatttccccacatttccttctaccctgtttctcaccctgatcacacttagtttattgatggcagttccaccaggcctactcgccacacaccagcaaaggcaggctatgctatagtacaagccactagcccgcctcttagaaactcttatttcctttccattgtggaaatctatcctcaaagaaataacttctcagtgttccatctgctattctactactcctcagggattattcaggccccctcccttccctacacatcaagctcagggatttgcccccacccaggactgacataatagctttactcaacgtgccccgattcaggaaactaaaacaccttttggtctaggtagacactttcactggataggtagagtcctttcccacagggtctaagaaggccaccacggtcatttcttcccttctgtcagacataattcctcagtttggccttcccacctctatacagtccaatagtagactggcctttattagtcaaatcagccaaacattgtttcaggctcttagtattcagtgaaacctttatatcctttacagtcctcagtcttcaggaaaggtagaacagactaatggtcttttaaaagcacacctcaccaagctcagccaccaactaaaaaaggactggacaatacttttagcactttcccttctcagaagtcaggcctgtccttggaatgctacaaggtac

SEQ ID NO: 606 - DNA, 1900 bp, Homo sapiens
  misc_feature (1)..(1900): DMR4:12059301
aattcctaggtttgtgataatgcctctacttccttcagtagtctcatagttttgccttcatgttaaaagccatctcaacttctatcactttctgtactttatttttagctcatttaactctaattctttaagtctcagtataaatttacctttggaaagcattgactggccatttccctttgggattaggcttcccttctttctgttcttatggcaccattgagtcatccctttagaaactctcattttctgcattacaattgattttttatacttgtctctctttcccagtatgccattaattccttgagagacagaactgttgatgatagtaattcctattctagaagagtgtcaagtacatagtatgtgcataatacattaattctgaataaattaactaccatgtaaatattagaataaagctgaaattctagtaattgaaattataaatcttatctctcctaaattatagttatttcccatcattccagacttcagtgcaagaatacaagaaaacacacagagttttaaaacataataaaattttatgcaaacctatattttattattagactttgatgatatacacctgggcctgacatagactcagtcactgagggtatgaaggaaaatgagttttgaaatctgaatgcgtggattttttttgtctctcactaattaagtgattttgaaaattaatttgagcctcagtttcttcatctgaaacacagactcataatttctctttcagagcacttatatgatatttaaaatggaaaatgtaaaataaattcctggctccatacatgacaataggtaggtattccagatatttgcatttgctgattttctccctttgacagtggtaaaagaagattgttttcctatttttcttatgtgtgtgtacttttctctgaaatcatcagcctctcaactgcttctgttcaattttatatttttgctcagagtcagaagaaccaagttactgtctgcaaatatttggaacttctaataaagcaatgcatactatttttggaaatatggaaagatatccgcaaaatgttccacctattttatccttgacattacaatcttttctctctccctttcactcttatcatagtaactctctgcttgctcctctcctttacccacagaagaattcccaagtagaatgtctgggtttggcctccagtactcttagaattctagacttataaatatttacacttatatataaatattgttgttttttatcattttcagttatagaatattgctgcagttgttctttaaacaagtataagatttgaaatccaaacccctaggaatgatttctggatctatgctatgtgtatctactgggtgcattttttaatggttgacatttgagcttcagtttctccatctgctacaatgagaataataacgtctaactcagagattgttctgatagctaaatgagagaatatttatagaaatacccaatattttgccaagtactcaatggaccatgaatatgagtggaatcttatttctgatgcacttacttatggtacagaagagcactctgtcctaactgcagatctaattccatccatcacccaatacaaacatctgagtcttgatattttggagaaatatgaattatcagtggatcccgttacacattttataaaattcagaagtctggcttaagtcatacaatttatataggaagatgaataacctcttagaaatagcgagaggtgaaagttttattccttcttattatctcctagtataatatgacttacatatacatatgtaattgtgtatcatacatgtacagttatgtaccacataacattttagtcaataacaaactgcgtatatgacagtggtcccataacattat

SEQ ID NO: 607 - DNA, 2100 bp, Homo sapiens
  misc_feature (1)..(2100): DMR4:14660801
ggtatatacccagtaatgggatggctgggtcaaatggtatttctagttctagatccctgaggaatcgccacactgacttccacaatggttgaactagtttacagtcccaccaacagtgtaaaagtgttcctatttctccacatcctctccagcacctgttgtttcctgactttttaatgattgccattctaactggtgtgagatggtatctcactgtggttttgacttgcatttctctgatggtcagtgatgatgagcattttttcatgtgttttttggctgcataaatgtcttcttttgagaagtgtctgttcatgtccttcgcccactttttgatggggttgtttgtttttttcttgtaaatttgtttgagttcattgtagattctggatattagccctttgtcagatgagtaggttgcgaaaattttctcccattttgtaggttgcctgttcactctcatggtagtttcttttgctgtgcagaagctctttagtttatttagatcccatttgtcaattttgtcttttgttgccactgcttttggtgttttagacatgaagtccttgcccatgcctatgtcctgaatggtaatgcctaggttttcttctagggtttttatggttttaggtctaacgtttaagtctttaatccatcttgaattgatttttgtataaggtgtaaggaagggatccagtttcagctttctacatatgcctagccagttttcccagcaccatttattaaatagggaatcctttccccattgcttgtttttctcaggtttgtcaaagatcagatagttgtagatatgtggcgttatttctgagggctctgttctgttccattgatctatatctctgttttggtaccagtaccatgctgttttggttactgtagccttgtagtatagtttgaagtcaggtagtgtgatgcctccagctttgttcttttgtcttaggattgacttggcgatgcgggctcttttttggtttcatatgaactttaaagtagtttcttccaattctgtgaagaaaggcattggtagcttgatggggatggcattgaatctgtaaattaccttgggcagtatggccattttcacgatattgattcttcctacccatgagcatggaatgttcttccatttgtttgtatcctcttttatttccttgagcagtggtttgtagttctccttgaagaggtccttcacatcccttgtaagttggattcctaggtattttattctctttgaagcaattgtgaatgggagttcactcatgatttggctctctgcttgtctgttgttggtgtataagaatgcttgtgatttttgtacattgattttgtatcctgagactttgctgaagttgcttatcagcttaaggagattttgggctgagacaatggggttttctagatatacaatcatgtcatctgcaaacagggacaatgtgacttcctcttttcctaattgaataccctttatttccttctcctgcctaattgccctggccagaacttccaacactatgttgaataggagtggtgagagagggcatccctgtcttgtgccagttttcaaagggaatgcttccagtttttgcccattcagtatgatattggctgtgggtttgtcatagatagctcttattattttgaaatacgtcccatcaatacctaatttattgagagtttttagcaagaagagttgttgaattttgtcaaaggctttttctgcatctattgagataatcatgtggtttttgtctttggctctgtttatatgctggattacatttattgatttgcgtatattgaaccagccttgcatcccagggatgaagcccacttgatcatggtggataagctttttgatgtgctgctggattccttttgccagtattttattgaggatttttgcatcaatgttcatcaaggatattggtctaaaattctctttttttgttgtgtctctgcctggctttggtatcagaatgatgctggcctcataaaatgagttagggaggattccctctttttctgttgattggaatagtttcagaaggaatggtaccagttcctccttgtacctctggt

SEQ ID NO: 608 - DNA, 300 bp, Homo sapiens
  misc_feature (1)..(300): DMR4:14807801
tttcatgctgctgataaagacacatctgagactgggcaatttacaaaagaaagaggttcagtggacttacagttccacatggctgggtaggcctcacaatcgtggtggaaagcaaggacgagcaagtcacgtctcaagtggatggcagcagacagagagagcttgtgcagggaaactcccatttttaaaaccatttgatctcatgagacttattcactatgacgagaacagttggggaaagtcctgcccccatgattcaattatctcctactgggtgcctctgacaacacatgggaattg

SEQ ID NO: 609 - DNA, 1800 bp, Homo sapiens
  misc_feature (1)..(1800): DMR4:15888301
aagtgaaaacttttgcacacaaaatttctgatcatcaagactgtattgtaaaaatgcaaagtgccaccctcattccagctctacaggtagcgttgacaggtggtatggtttggatctgtgtccccatgcaaatctcatgttcagttataattcccattgttggagatggggcctagtgggagggtgattggatcatggcggcagtttctcatgaacggtttcccaccatccccttggtgttgttcctgtgacagtgagtgagtgagttatcgtgagatctggttgtttaaaactgtgtagcgcctctcccacccactccctcctgctctagccatgtgaagcaccagcttccccttcaccttctgccgtgtttgtgagtttccagaggcctccccagaagccacgcagatgacgccatcagcttcctgtacagcctgtggaaccgtgagccaattaaacttcttttctttataaatcacccagtcttgggtatttctttatcgcaatgcgagaactgactaatacaacagggctttgaaaaatcagctcttcagcattgcaatggaagctgaaaggaggtggtgaaatcaaatcaaaaccttgatagaaagatgttataggataatttctaaaattatattaacataattttaataatattttattaagaatttagacatgtcaagtggaatgaaacttttaggactcaggaataaaccctgctgggaggcaaatccacttgcaaaagttttgtcagatcagaacatcaaatcatactaggcggataaacattgaagttgaatttgtctttataaaacacatgggaatttaaattaaaaacactttagtaaaaaaacaaacaaaaagacaaaaaaagctgatttgtgttgtccacagaaaagttatgaggacctatatatttgttatcctttgaactatttaatcactatatctgctctgttcaaggaaatgcactgcattgtctggatgcacaaaagatttatagctctcaaagaacgtcctaggtagacaggcatgaaaaccttactaagaatgcacaatgcagacataaagtgctatgggagctctggaagcagggaccactgtggctgagaatgtcagctaagccttcattaaggagacagaatttgagatgggttctgtggcgaatactgctggttacctactcaatatcaatttctccttttttctctaagcatagcatagatttttgttcagggctgcagtgtgatcatttatgttaataaaaaaccaaaacaaggctgggcgtggtggctcacgcctgtaatcccagcactttgggaggccgaggcaggtggaacacctgaggttgggagttcgagaccagcctgaccaacatggagaaaccctgtctctactaaaaatacaaaattagccaggcgtggtggcacatgcttgtaatcccagctactcgagaggctgagtcaggagaattgcttgaacccaggaggcggaggttgctggagctgagattgcgccattgcactccagcctgggtaacaggagcaaaactctgtctcaaaaaacaaacaaacaaaaaacactgaaaacaaaccagcaaaaaagccatacatcccatcacagcctcactttaagtctaggactgaggcataaacccatttccatgagaatcttccaggaaagctcttgacaaaggacagatgaactgacccaagtcttcgtttggtccttcgtccttccctgtcttcctatctgcaatgtggataagaggccggaggtggagtagccaattgaaaa

SEQ ID NO: 610 - DNA, 1100 bp, Homo sapiens
  misc_feature (1)..(1100): DMR4:18842301
caacttgactgggacacaaaatgtgcccttttttatctggcctgactgattgagccaaacatctcatttcatcctctcctgtcctcatgccacaggattctttaggtgccacttcaccagctggaaacctctatggccagtggtgcctctgcttgagtttcactggtgcatgctgggcttgcttcacctactcagcccaggaggctgcactcagcttgcactaccggcctggatcccatgcccatcaatggcaagctaggtacagtgggcgaagagtgtgtgaatgagcaagtgtgaggttcggccacagtgcacagccctgcactccagctgctgtggcggtgtgggcagctccaggcagtggtgcacacacaagctccatgtgaggctcttgctggatcaggcacacctcaagcgtcttctgctgtgggcaccagcatctggacaaggggaaggtggtggtgcccaaaaactcaaagatgctagcaaccttgaagccccaagggagttttacagcatgtcacagttctggctcagggattcctgaggtccgggcccccagaagagtggcagctcttcccccatagtccagctaacaggaacatgtcactgcctgcatttcagcaggccagccaggaacgtgtttcatcttgttcatgttataggtcattcagtcccaccaccacactccagcccatggctcctgggctggtccagcagcgtggccactccctgtcatggggggcagctgctggagggcaggaagactacagtgttacagctcctatggcacctgccattcgtggatcctgggttcttgtcccatgtacaagaagaatgaagttacatggacaaccaaagagtgagcaaggcagagaagagttttattgagcaacagaacagctgtcagtagagaggggacccaaagtgggtagcccctacctgaagactggtagttccaatgtatgactgagtctggagtttttatgggctcagatgggggagtgcatgctgattggtccataggcaggcctggaaaaagcatcatttgattggctaaaaggcatggaggaagttctcactccagattgtggactcta

SEQ ID NO: 611 - DNA, 1100 bp, Homo sapiens
  misc_feature (1)..(1100): DMR4:23261101
tttactttgttcacagagttctttgtatcacagaagtttttaattttgatataattcaatttacctacttttttctttggttacctgtgacttttattccatatctaagttttttttttttttttttttttttttgccaaatctagggtcataaagattgacccctatgttttcttctaaaggttttatagttttagagctcctacatttggaagctaaaataatctgaatttctaccttagaaaactagaaaaagaagaacaaattatctaaaataagcagaaggaaatacataacaattaaattttaaatcaatgaaattataaacaaaccaatgggaaaaaagtcaataaaaccaaatgctatttttttcaaaagataataaatttgtaaagatccagccagattaaccaagaaataaagagaaaaggtacaaattgctaatgtcggagaaagaaggaccatcactactgataccatggacattaaaataaaagtaaagaaatgttataaatgactctatgcccaccaatttgataacttagatgaaattgaccatttcttaaaataatttgacaaaagtcacaccaaaagatatagataatctgagtaggcctataactactgatgattttgaatcaataattaaaaaccttccaaaaaagcacaaggcccaaataggttcactggtgaattctaccaaacattaaatatcttaaaggaagaaattatgctagttcccttcaacctcttttagaaaataaaagtgaaggaatatttcctaactcattctatgaggctagcattaccttaatagcgaaacaagacaaagaggtaaccaaagaaatttacagaccaacatctcttattacacagacctacctaaaatcctcaaaaaattttagcaagttgatcgtatcaatgtataaaaatagaggtacacatcacaacccaagtgggatttatttcaggtattcaagtctattcaatatctgaaaatcaattcatataaatcaatccatcatgaataagtattttataacaaccgaaacattggtaataaaaatgtgcagcgaacttagaggggaatttcctcactt

SEQ ID NO: 612 - DNA, 1800 bp, Homo sapiens
  misc_feature (1)..(1800): DMR4:24425801
aggatcaaattgtcatggtgccgaattcctgattttttccccttgtgttactttctgaataattatttgaatctccacaggaaatgaaagttgactaaagctaacaacgaaataacaagcttttacacacaaagaaattactctatggtgttttatttaacaataaatatttcaaaaaggaatgcttacacatttgaaaaaataaagatctgactaattcaaattccagccctactgttttctcagtaagataagtaacacaagcaatcataaatatggtttaaaattacaacggggagggaacacttgcaatcagttaagtttagaccttgtccttatttcttcttacagaagaaggtagagaggtaaagccctctaatataatacttcgtaattccagaacatatactattgatattgtgattctttctgagacataataactaattattcagaaagtgtcagaaaataaatccaactcctcctctaaccttagtccctaatttaaaggggaagaaaaacagggcttctaaggatgaaaagtcccaagtgccatttaaaaataaaaggaacatttcaaataaacttcaatctccttgacagcatacgaacaaaaacagcagcgatataccagcttcttcccaaaacaaaacccagtgaaattactgagaatttcagctactgtaatccaactatgtgaaactctgggggtgtcagcagctactcaataaaaaggaaaagtgaaaatagtacaaaaatggttcctaatagcaataatgtatagttttgtggtcattactggtcagataataaccggcagtgaccttaaaaccatgcattatggcttaagtatgggctagtgctcattgcagatgtgtagcttagaaataagcaatacaatcttgccataaaagctcaaactgttccaagtctggcttgcgtgcatggatttttccctctctagtgttatcacaccaggaatcttataatgatctgaaaaatatgtaccttagggcaatagttctatactgaaaagataaatactcgggccaaggcaatctaaaacatacacagagagcgggctccagtaaggcaggtgaatgtttttacaacagagactcgggtacattttgaccttttttaagtttcagctgtcaggaaagctgcaagaatctcagttaatatgttcttcacctccgtgaaatgacatatcaatattcccattctgcagatcaaaacactgaggcacaggtaaaccagataacctgttggggaggaagcaaggcaatgatgctgagaattaactgctttgtagggcaggcttaggttcccatagtaaggtcaatttttttacaattttctaatgtcctcattacaaattcacttgtatttcttttctgcctcctgtaaactgagagatttttgcatacttaaaatatttttttcaaatgtacagaaaatgctgcatctattctttatttattttttttttttttttgagacagggtctggctctgctacccaggctagagtgcagtgatgtaatctcagctcactgcaacctccacctcctgggctcaagccatcctcccaactcagcctcccaagtaggtgggactacaggcaagtgctaccatgtccagttaggtaatgtatttttggtagagaggggttccaccatgttccccaggctgatcttgaactcctggactcaggcgatccacccgtgacctatccagtttgttttttcaggtgaaacactcaagagtctgcagagccagtggagacctgcccaacggt

SEQ ID NO: 613 - DNA, 200 bp, Homo sapiens
  misc_feature (1)..(200): DMR4:24588101
cagctaaccagctgcagggtctcaagtcaacctaaattaataaaaaataattgctaatagcaaacacatacaaagcactatgagccagatgctgttccttacacatttgagcctatttgagacttacagcaacttcaagtttagtccaatgaattactcttatttacagctgaggaaactgttactcaaagaggcaagta

SEQ ID NO: 614 - DNA, 300 bp, Homo sapiens
  misc_feature (1)..(300): DMR4:24627801
tgagtgtgtgtgtgtgtgtatgtatgtgtaaacatgtatatttgtgtacaaacttctacttataattacatgagtttgggaaaaaagtttggaatgctctacattggattgttaacaggaattttgtcgagttgtgtgtgagggtgtgagatttgggtaaaatctgaaaggagaagggtagaagaaaaattggatctaatttttttagctaccataatgatattctgttaatatatttacatattaatatgtatataatacattatatgcatatatacctaaaatataatacacacgtat

SEQ ID NO: 615 - DNA, 3400 bp, Homo sapiens
  misc_feature (1)..(3400): DMR4:25104501
gttactcaacatcctttgcctacaaccaaagacaaatcgacctatctgtgccagatcacacttctccttcctgtccaaaaggataatgtgagggtctctgataacatctcacaagatcaaggtccacctggtctggagcattttgcaaatccatattaaccacatcccaaaagagccagtgagcccatgagagtcctgggtgatttttactcttttcttctaccagtgtgccaaactgcctaacaattttataagggattaacaccctcccatctggaacttctgcaatttaccattttttccttaaaagggaactaaaaaagctctttccatcgccggctctctcatgccactgccatacctcgtggttcctcagggaatactcacagcagttccatggccatatcagcaagtttttcagtgtcctggggtgcaatttagctgagctttggacatggatggtactaatttaaaggaactagacattttttcactgtcctcctggtccgaaggatcagtttgcttgttccctaaatagttgctttaaaggtaagcttctctgaaaaagctaaaagcagacttagtgtggttatagtctgttctgggcttcaacacttgctgcttataggctcacaaggaatccttgcaacaactctatgcagtaggtacagctgtttaccctctcgtgcagatgagaaaactgaaggacaaagagagtaacttttccaaggtcacacagctcataagtggcagagccggccacgcaacccccgtcctgaaccaccatgctacactgatctgttccttgtcactttttttgagcttagcttgcaaagtccttcatgattggcaggtggaattatgggacatgattttctcttttctgttcaagtgttttgcatcaaacaattgtttttaaaccctttgagatagctctagcgccccgactgaccccagccttaatggaacccgagccttcctctaccagacctggcctccctgcctccttcagcctccccctggttgacagcatcagtcacggggctgctgcctccttcactctgcagcgggaaagcccacccggctccttgtctgcctcctgactcatcccctgtcggtccttttgggagccacagatccaatggagctggatggtaaggaccaaagactctcccctggaagcattgtgactccaagaaaagacttgatattataagttgaattgtgtcccctcaaattcacatgttgaagctctaactcccagctcattagaatgtgacctcatttagaaatagggtcattgcagatgtaattaattaagatgaggtcacagtagagttgagtgggcccaatccaataagactggcgtccttacagaaaggggaaatttgaacacagatctacacagagaacaccacgggaagatgaaggcagagatggggcaatgcatctacaaaccaaggaacaccaaagacggccagcaaaccaccaggagctagggaggggcatggagcagatgctgcctcacagcctcagaaggaaccagctcagctgacacgttgacctgggcttccagcctccagaattatgaggtaatacacttctgttgattataccacccagtttgtggtacttagttacacagccctaggaaactaatacactgaatatcacatgataaagaggaaaaaaagaaaattccagttaacaaaatcctccagctctcctcttagattcccttcttttgggaaacctttccagagcccttgaccgtggccctacagaaaaggggactggcggagctcgctggcagaagagaaggccaggacgtggcgttgagatggtatgctgcagggataacatgctagtgtgtttatttgtggtgcctttggtggaaagcttgtgaggctgggaggaaataaaggcacctccgaggtccccgttaggctccatcctgccccgagtctgggtaaggtgctccttccacgtgtttcctgccttagctccttaggcttcccccatcctccctcccatcgcatggcctgaagatcgtctctttccttgttggctccccagctagactcaccctcaggaccagactaaggtcaggagatgcccactggctccccattgtatctgcatggccaggcgacatgccggggccaccgtacacatctgttaggtggatggatcgatcgtgtgtgtataggaggaaaacgagagccaaagagctacgaagatgaagccaggcgtggtggctcatgcctgtaattccaacattttgagaggccaaggtggaaggatagcttgagaccaggtgttcaagaccagcctgtgcaacaaagcaagaccccatctgtacaaaaagtaaaaaaataagccagttgtagtggcatgcatctacagtctcagttacttgggaggctgagtggggaggattgcttgagcccaggagttcaaggttacagtgagctatgattgcaacactgcaccccagcctgagtgacacagcaagactctgtctcaaaaaacaacaacaacaaaaactacaaagatgaaaagcagaaagggaaggtaaagaagaagcagaatattttaaaaataagaggaggagtgaaaagggagagaaaagagagagaaaaaggacaaagaaagaatgagagaaggacaagaagaatatgcatttttctgatatggattcacaattcctggtctgatcctcttgggaccaggtgtttttcatattccaaatctgggggtttttaaagagggtactgtggggcattgtacccacatgagggcagcctcctgtacacaaacacacattgacatttctgcagcaaaaaggtatgtatattcacacaatgtgggataaacaaagactagaaagagcctcacgtagttggagttgggtcagattttcttaaactttaggttttcagaggattttggacttaggaggatgttcatggagcatggttctcttatggggcctctgcaacccaagccatgctaagatggagtctgctcacactttttgtgtctaagaaggcaaaatgcccggggccgagagcctttcccctgctgttgtgttctcaggtctcatccaaggtgagttttgggccaagtgttcccaagaaagcattgaggacaaaccatttgctcagtctagaaaaagacagggctttgttcgcaatcaaagcaagatgaagaatgagagacagggagagaagccttcgtatggaaaatccagtcctttagttgcataatcttcacttttccccactaataagccccattttccattattcttttctgggaaatagttccacagtcattttcccagctgctgggcccccgcctctgctgtcctggctgcagatggtctgggcagcgtctg

SEQ ID NO: 616 - DNA, 600 bp, Homo sapiens
  misc_feature (1)..(600): DMR4:26411601
ctattgaaaagtcttcatttttcttatatttattacatgattggaaagcactttcaagatagaaccttggtcagtgttttgaatagagaattttttatcaacctgatttttaccatttcatgcattttgtcacagtacttttgagaaaaccagcactactcattcttttatcagtttagctctctttatatttttcagatgtgaaattaagaagtaccatttatgggccaggcgcggtggctcacgcctgtaatcccagcactttgggaggccgaggcgggcggatcacgaggtcaggagatcgagaccatcctggctaacatggtgaaaccccatctctactaaaaatacaaaaaaaaaaaaaattagccaggcgtggtggcgggtgcctgtagtcccagctactcgggaggctgaggcaggaaaatggcatgaacctgggaggtggagctttcagtgagtggaggtcgcgccactgcactccagcctgggtgacagagcaagactccgtctcaaaaaaaaaaaaaaaaagtaccatttatgataactcattgagatttgactactgtatttggcatataggttgcgcattcccaatcc

SEQ ID NO: 617 - DNA, 1900 bp, Homo sapiens
  misc_feature (1)..(1900): DMR4:26524201
ctcagctctgtttacaaggttattgctgaatgttttattgctaaagtgggtgcagatgcagggcagttaaaaagaatcctctttattccttttcattacagctactggagaatgttcggatttgcttcttgtggctagctagggtctgacaattgctcttcactggcaacacaaaatatattgcttttgattccctgtcagatttaaatgtatccttcagctaataataagctgaatctgcaaagaaaatgaagaaaagaagaagaggaaatcagggtcttggtacagagatgagctgatgagtgtgatgctgggggcaccgagccagcgggcggtgcagacttgggtgcatccctgctctggctcactccagggtgagcgaagagatgagaaataggccatggatggggagcagataaagaagcgctgtctgaaaaacatgatcttcattgttttggggtttgtgatttaaaatttatccaaagagggcacttgtatgcagatatgaaaattaaggtctatttttaatctgaactttccattctttgccttcccatcactgtaaacctttcaatgttcatgtttcaacccacaaaacagtaaaagtcagaaaatctcattattgcatttatatgctaagtactttgatgggtaacagaaaaataattttgttatttataacccttttcttttctttagagatgggatcttgcttttgcctaggctggtctcaaactcctgggttcaagcaatcctcctgcctcagccttctgggtagctaggattacaggcatgagcccctttttcaagatgatgggtgtggtggattgaagatcgtacaaatactttgcccctcttcctcttaaatttaagctggtctttgctttgaccaatacaaagtggtggaaactttttactgtagaactttcaaacctgggccttaagagagtagcaagttctgttttcaagtgcttggaatgctccttcatggaacccagttgccatgctatgaaaagcccaatcaattggagagaccacatggagaactaagttgctccagttcagctttcagcagagaaccaactccaactgccagccatgcgagtcagccatctcagacattccagcttcccaatgactgtaacaccagcttaccccatgtgcaaccaaggaaccaccaggctgagccccagcccacccaaaggactgtgagaaagacaataaaggcttcttgttatgtggagcccctacattttgtgtgtgtgtgtgtgtttttttaatgcagcaatagtaaccaagataatgggccctgataaaataactagagaaccctttgtttgctaagtagtgtgtcaaatatgcatatatgagtgtagaattcagagcaggcttagcgccaaagcaatatggtttgatggagttgcttggggtgaaagatcttggagggagaaggaggagtctgaaagctgaaagtgtgtagagttgggggaaagttaagggagagaaagaaaaagaaatagattttaagtttaaactgcccacgcactccatccccttctgtagcaggttagcagagaaggggagttagggaaagaaacactaagtcgttgctgtggtgggggataggtaaagttcctcctcatctcttctacacaatcctcagtatagtctatattacttacaaatgcttctgtgcaagtgtattcttcggggaaaactaaaaggtgatgactaagaagtgactaaaacatgggtgagtggagggcaagtggacacaatggctgcacatggttacctgggggccaaaggacaagaaggcaaagcacagggcacagccatcgatgtcgtgtttcatcctgccagcaaccctccaagacaggcattgctatgctcatttggc

SEQ ID NO: 618 - DNA, 1600 bp, Homo sapiens
  misc_feature (1)..(1600): DMR4:27326801
agacctctttgaaaatatagaaacccttaaaatataaagaaaacactgggagtaaaatttccctccattgtgtcacagcaaggcctcaggttatgactgctggttcattctataaccttcgacaatatccagcctccctcattgttgcctttgcctgcagcagctagcatttccttaacaaattatgccacgtttttcatttctattcacttcatcatttagtcagcagagttgtaattcctctttccctaatacgtcttcattttcgaccccattacctgcacagtctctgaaggctcacctgttcctagcacggcgttcccattctcaaggtgctctcctgggtctctgacaatctgctccctgctaattggtgcagatgggagtaggaggataagcagagcacatgagggaggaagcagattttcccagtaagtaaagggcccttgggagccaaggcactttggggaagctgctttaactctgtcaggcacaatgaaagagggatttatggagtcttattccaagacatttttcttgtccctagaaacgatatttccaaagggtacactagtcttggctgatcctcttgaggtctatacttaagcaagctcagaataataataataaataataaatatcacttattgagcccaacacaatgctaagcactttgtacataatcattcattcattcattcaccataggaaacctatgaggtgtgtattatttttcccgcatatcacctgaagaaccacagtctcagagacattaagcagtttgaccaagctgatgcagctcgtgggaggctgagtcaggctgagatggcagatctatctgtctccaaggaaagtgttcccaggcatttactccactgcctgaagtaagtagagtttatttttggattctctttctatccctttaggtaacctctttccttacttctggtactccttgttgtgatcaaatttcccagggcctgtgctgcattatagggttcctgggattgttatcctgcaagtatttggtaaaataatctccattagagtggctaagatggtgcccctcatgtggatactcagctagagttgagtgctcttgaggactaaaagctaatgacgtaatttttagtccctgtgtctcaaagcaggggaaatagttttgaaatgggagagtccctttatgccccacacaggatgtgcaacaagggtgtggcttgtgtgttcggccaccaagtgcttaaactccccccacccccaccctgttacaggagggggagcacacagacaggcaggttgaagagctggagcaagtgccttggggctccggccccaccataacttctaggggtgggtatctgtgactcccaaagcctaagtgggcatgtgttacagtgtgctcttttagctttgctgtccacagactgcttaagtgttaatcaactcagtgccctcttggtacccaggtcgttttctggcatccaggaagaattaggtcacacaggaacttgaaggataaatgtgggggttttattgagtggtggaggtggctctcagtgggatggatgggaagctggaagggggatggagtgggaagatg

SEQ ID NO: 619 - DNA, 1600 bp, Homo sapiens
  misc_feature (1)..(1600): DMR4:30359901
tgttagccctatggggttccctttgcaggtgacctgctgcttctgtctagctgcctttaatatttttactttcatgtcaaccttggagaatttgctaactgtgtgtcttaggggtggttatcttgtatagtatctcacaggggttccttgcatttcctgaatttgaatgttggtctctctagcaaggtcggggtgattttcattaatgatattctcaaatatgttttccaagttgcttgctttctctctctctctttcatggatgccagtgagttgtagatttgggctctttatgtaatctcatatttctcagagattttattattcttttctatttttttttttttttttgctttatttctttctgactgagtttatttggagaaccagtcttcaggctctgagattctttcctcagcttggtcaattttgctgttaataattttgattgcattaggatatttttgtagtgagcttttaagctccatcggatcactttggttctttcttaaaatggtcatttcatctttcagctcctgtatcattttattgtactccttagattccttagattgggtttctactttggtgatctttattcctatccatattctgaattctatgtctgttgtttcagccattttggcctggttaagaaccattgctgggatctaatgcagtcatttggaggtaagaagatactctggctttttgagttgccagagttcttgcactgtctctttctcatctgtgtcagctgatattcctttaatctttgaagttgctgtcctttggatgggttttttttttttaatttttcattgataaacttaggggtttaattgtggcctaaagtggtctcagtcagctggttcattttggaaggttttagggggacacagctcagcttagcactcctgggctacgtgttccgtctctggggtgttggtactgagcccccaggtttattcttcggccctttgaagttaggaacctgttcttcaggaggggttgcaccactagcagtggtgggacagagggctgcacacgcacacatatgctgtttgggaggggagtcaaggtccgtcacatgcatgtgctggcaaaacagtggtgggaggcactgtggttgaaggcatcacgggaaagcagcagtaggaggctgtggtgggggaagaagcaagtgggctggggcatgttagtgtgggctggtatataggagttctctgatgatcatgcatgtccactggcaaaggagatattttgaagttccccagtaagcaccctatttgacatctgagtctgtgatgcaagtgggcacagccaggttagggtatcaggaaagtacagcagacagggatctttcagatcagactgtccccatcccatggacaagaatgccctgctctatccaggtgtgacagtcacctaataggtaaagcttcctagaggagcaaggccagccttggagaatgggcctgcatggctgtgctcactgtagtcattcctgcatcaaatcctctgggcttcacacaagccagagtccttcctctgccacctttttaagcaactctacttatcagctcaagcgtccatggga

SEQ ID NO: 620 - DNA, 2600 bp, Homo sapiens
  misc_feature (1)..(2600): DMR4:31437301
ttacagtgaagaaacctgacaaacactaccttagccagatgatccaagattacatggactgtgaggagtcatgtgctcttgatataaggtgatggaaatggcattttaccatagtgtttttcctcccccaagccataattccagtccaataatgagaaaaacattcaagaaatctaaaatgaggaaaattctgcaaaatatctaatcagtactcctaaaaatgtccaggacatcaaaaacaaggtaagtctgagaagctgctacaaccagaaggagtctaaattaggcatcatgactgaaagtagtaaaggtatcctgggtgagatcccgaaatggaaaaaggacattaggtgaaacctaagagaatatgaacaagagtatagtctggttaataataatgtatcaatattttataaactgacactagcataagatgttactgatagggaaaactggtagtgacatttatggcagctatcaatggtcttcacaacttttctgcaaatctgaaattacttcaaaataaaatgtttttttataaattaaaatatgtaagccaggcttggtggctcatgcctgtaatccctgcactttgggaagctgagacggatggatcagctgaggcctggagtttgagatcagcctggctaacttggtgaaaccgcatctctactaaaaatacaaaaattagatgtaccactgtaaccccagctactcaggaggttaaggcacgagaattgcttgaccctgggaggcggaggtgcagtgagccaacatatgtcactgcactccaccctgggcgacagagtgagactgtctcaaaaaagaaaaaaaggaaataaacaaacaaacaaatatattttaaattcaccttacatttgacgatcattttaccaaggagatgcatttatttaaaaacatatatttaaataaatgtaataaagacacattgtagaaattttagaatatatagaagaaaaaatacaatatgtgagaagtgcttggcatttaatatatgataaatacgtaaacatttaaaaagattatttaacattttcctgtaacattatatataacattcaacaaatcaatatctaatcaacaaacctctgcctcattttattgtaaaataagaccaaacaaaacaacctaatgtgtataattaataatgagaggtgacagcatgctggcagtcctcagagccctcgcttgctctcggcacctcctctgcctgggctcccactttggtggcatttgaggagcccttcagccccccactgcactgtgggagcccctttctgggctggccaaggccggagcccactcccccagcttgcagggaggtgtggagggagaggcacgagcgggaaccggggctgcgtgcggtgcttgccggacagctggagttccgggtgggcgtgggcttggtgggccccgcactcggagcagccagccagccctgctggccccaggcaatgggggacttagcacccgggccagtggctgcggagggtgtactgagttccccagcagtgccggcccaccggcgctgcgctcgatttctcgctgggccttagctgccttcctgtagggcagggctcaggacctgcagcccgccatgcctgagcctcccacccactccatgggctcctgtgcagccccagcctccccgatgagcaccaccccctgctccacggcacccagtcccatcgaccacccaagggctgaggaatgtgagcgcacggcacaggactggcaggcagctccacctgcagcccccgtgcgggtccactaggtgaagccagctgggctcctgagtctggtggggacgtggagagtctttatatctagctcagggattgtaaatacaccaatcagcaccctgtgtttagctgaaggtttgtgagtgcaccaatccacactctgtatctagctgctctggtgaggaggtggagaacctttatgtctagctcagggattgtaaatacaccaatcagcactctgtatctagctcaaggtttgtaaacacaccaatcagcaccctgtgtttagctcagggtttgtaaatgcaccaatcgacactctgtatctagctgctctggtggggccttggagaacctgtgtgtggaaactctgtatctaactaatctgatggggatgtggaaaacctttgtatctagctcagggattgtaaatgcaccaatcagcgccctgacaaaacaggccactccgctctaccaatcagcaggatgtgggtggggccagataagagaataaaagcaggctgcccgagccagcattggtaacccgcttgggtccccttccacactgtggaagctttgttttttcgctctttgcaataaatcttgctactgctcactctttgggtccacactgcttttatgagctataacactcaccgcgaagatctgcagcttcactcctgagcccagcgagaccacaagcccaccgggaggaatgaacaactccagacatgctgccttaagaactgtaacactcatcgcgaaggtctgcagcttcacttctgagccagtgagaccacgaacccaccagaaggaagaaactctgaacacatctga

SEQ ID NO: 621 - DNA, 200 bp, Homo sapiens
  misc_feature (1)..(200): DMR4:31620401
ttattttaagacatggtctcactttgttatcccggctggaatgtggtggtatgatcatggctcactgcagcctcgacctccttggctgaaacaattctcctacctcagcctcccaagtagctgggactataggtgtgtgctaccacacctggctaatttttgtattttttgtagagatgagggttttgccattttgccca

SEQ ID NO: 622 - DNA, 1700 bp, Homo sapiens
  misc_feature (1)..(1700): DMR4:34475601
gaaaccatcatgctcagcaaactaacccaggaagaaaaaaccaaacactgcatgttctcacttataagtgggagttgaacaatgagaatacatggaaacatggaggggaacatcacacactggggactgttgtggggtggggtgtaaggggacggatagtattaggaaaaatatctaatgcatgcagggcttaaaacctaaattacgggttgataggtgcagcaaaccaccatggcagatgtatacctatgtaacaaacctgcatgttcgttcagcacatgtatcccagaacttaaagtaaaatgaaataaactaaaaaattaaaaaataaacttttaaaagtaccatattaaaaaaattatggcaaaaccttggagaattttgactgtcaagcttatttggggctttaattctgtttaaataaaccctatttgaattcatattttgttttctattcaaatttgtctttcactatgctaccaacattctttgaatattcccacctctggatcttagcacccaccattcatctcttggtaaaaatcaaacactttctgtcagtttactgtcttttcttaaggtttacttcaaaattgttaatcatatgaagctgactccaaccacaccaagtcagcagaaattcatcgctttgaaaattttagatgttactccatactctctgtctggaacttttttcttttttcttttattattattttttcttttttcacttttttttattattatactttaagttctagggtacaggtgcacaatgtgcaggtttgttacatatgtatacacgtgccatgttggtgtgctgcacccattaacttgtcatttaacattaggtatatctcctaatgctattccctcccccctccccctatgccacaacaggccctggtgtgtgatgctccccttcctgtgtccaagtgttctcattgttcaattcccacctatgagtgagaacatgcagtatttggttttctgtccttgcgatagtttgctgagaatgatggcttccagtttcatccatgtccctacaaaggacatgaactcatccttttttatggctgcatagtattccatggtgtatatgtaccacatttttttaatccagtctatcattgatggacatttgggttggtttcaagtctttgctattgtgaagagtgacacaataaacatatgtgtgcatgtgtctttatagcagcatgatttataatcctttgggtatatacccagtaatgggatggctgagtcaaatggtatttctagttccagatccttgaggaattgccaaactgtcttccacaatggttgaactagtttacagtcccaccaacagtgtaaaagtgttcctatttctccagatcctctccagcacctgttgtttcctgactttttaatgatcaccattctaactgatatgagatgatatcttattgtggttttgatttgcatttctctgatggtcagtggtgattagcatttttcatgtgtctgttggctgcataaatgtcttcttttgagaactttttgcttatcccttctgaattgctacttatctgtgtacgtttgagtttagtatgggacatgtttaaggtgtttggatgacactcagctgaagaagatgtcatcagacaaagggtatgaaactccagaggatgtttggagtcagaagtacctctctgtgg

SEQ ID NO: 623 - DNA, 2300 bp, Homo sapiens
  misc_feature (1)..(2300): DMR4:35333601
taacagtcctccaagattttaactcattttcgcattaactcaaaagtcctcagtctaaagtatcatctgaagcaaaacaaattgcttctgcctaggagcctgtaaaatcaaaagcaagttagttccttccaagaaacaatgtgggtgtaggcagtaaataaatgttcccatttcaaacgggagaaactggcccaaaccaaggggctacaagccccatgcaagtctgaaatccagtggggcagtcattaaatattaaagctctaaaatgatctcctttgactccatgtctcacatccagggcacaccgatgcaagaggctggtacctacagccttgggcagctccttcccaggctggtgatgagtgtctgtggcttttccaggcacgtggtgcaagctgtcaatggacctaccattctgtggtgtggatgacagtggtcctcttctgacatgtccattaggaaataccccagtggggactctgtgggggctccaaccccacatttcccttcggcactgtcctagcagaggttctccatgagggttccgcccatgcagctgacttctgccttccttgtgtccctacatcgtctgaaatctaggtggaggttcccgaacctcaattcttgacttctgtgcatccacacacccaacaccatgtggaagctgccaaggcttggggcttgcaccctctgaattcatagtctgagctgtaccttgacccctttttgccatgaatggagctgaagtggctgggacagaagcccccatgtcctgaggctccacagagcatcagggccctaggcccagaccacaaaactatcctactaggcttccaggcctgatgagagagggtgctaccaagcgctgtgaaattccctggagacattttcctcactgccttggtaatacacatgcagctccttgttagttatgcaaatttctgcaactggcttgaatatctcaccagaaaatgagtttttcttttctaccacatggtagggctgcaaattttccaaacttttatgctctgcttcccttttaaacataagttccaatttcaaaccatctttttgaatgcataaaactgaatgctttcagaattactgaggtcacatcttgaatgctttgctgcttagaaatgtcttccaccaaataccgtaaatcatctctctccaactcaaaggttcacagagctctagaggaggggaaaaaatgccaccagtttctttgctaaagcatggtatgagtgacctttactccggttcccaataaattcctcatctccacttgagaccacctcagtctgaacatcattgttcaaatcactatcagcattttggtcaaaaccactcaacaagtctctagaaaattacaaacttttccacatttttctgtcttcttctgaaccctccaaactgttcccacctttgcctgttaccagtttcaaagttgtttccacattttcgggtatctttacagcagtaccccaatctctgcagtaccaacttactgtattagtctgttctcaccctgctataaagaactttcctgagacttggtaattcataaaggaaagaggtggggttttttgtttgtttgtttgtttgtttgtttttgacagagtttcgctctgtcgcccaggctggagtgcagtggcgagatcttgggtcactgcaagctccacctcccaggttcaggccattctcctgcctcagcctcagaagtaactgggactacaggtgcccaccaccccaccaccacgcccggctaattttttgtgtttttagtagggacgggttttcacagtgttagccaggatggtctcgatttcctgaccttgtgatctgcccgccgcggcctcccaaagtgctgggattacaagcgtgagccactgcccccggccaggaaagaggtttaatggactcacacttctacatggcttgggaggcctcaggaaacttacaatcacggcagaagaggaaacaggcaccttattcacaaggaggcaggagagaaagaactgcaagcaggggaaatgccagacacttataaaaccgttagatcacatgagaacttactcactatcacgagaaccacatgggggaaccacccctatgatccaatcacctctctcaagatcccttccttgacatgtggggattatggggattacaattcaagatcagatttgggtggggacacagagccaaaccatatcaatataattacactgttgtaattattgtacttaacaaaactttggaagataaaagtttgtaagaagtttctataactttgc

SEQ ID NO: 624 - DNA, 1500 bp, Homo sapiens
  misc_feature (1)..(1500): DMR4:35360701
ttacatatgtcctttatttctttctcttgtctgagtcttctgggtagaacttccagtactatgttgaatagaaatgttgagagtgagcatccttgtctccttccagttctcagggggaatgctttctgtttttcctctttcagtattatgttggctgtgggtttatcatagacggcttttattacactaaggtatgtcctttctatgttgattttgctgaggattttaatcataaagggatgctggattttgtcaaatactttttctgcatctattgaaatgattatttgatttttatttttaattttgtttatgtggtgtaccacatttattgacttgcagatattaaaccaaccctgcatctctggtatgaaacctacttgatcatggtggattatctttttggtatactgtaggatgttgttagctagtattttgttaaggatttttgcatctataatcatcggggtactgatctgtagttttcttttcttgttatttcctttcctggttttggtattagggtgatactggcttcatggaattaggaaggattctctttctctatcttgtggaatggtgttaataagattggtaccaattcttcttcagatggctgatagaattcagctgtgaatccatctggtcctggtcttttttttgttggcaatttttttaattaccatttcaatcttgctgcttgtttttggtccattcagagtttctatttcttcctggtttattctagcagagttgtatatttccaggaatttatacatctcctctaggttttctagtttatgtgtgtaaagctgctcatagcagccttaagtgatcttttgtatttctgttgtatttgttgttacagctcccatttcatttctaatcgagcttattttgatcttctcttttattcttttggtgactctctaatggtctatcaattttattgaacttttcaaataacaagctttttatttcatttatctttttctttttctttttttttttttggtttatttgtttgttccaatttcatttagttcgctctgattttgtttatatcttttcttctgctgggcttgggtttggtttgttcttgtttctctagctccttgaggtgtgatcttagattgtctatttgtgctctttcaggctttttgatgtaggcacttaaggccatgaactttcctcttagcacagcctgtgccatatcccagaggtttttataggttgtgtcactgatatcattctgttcaaataattgtttaattcctatctttatttcattgttaacccaatgattattcaggagcaggttatttaatttccatgtatttgcatggtttggagagttacttttggaattgatttccaattttattccactgtggtctgagagagtgcttgatataattcaatttttaaaaatctattgagacttgttttgtggcctattatatggtctattttggagaatgctccatatgctgatgaata

SEQ ID NO: 625 - DNA, 600 bp, Homo sapiens
  misc_feature (1)..(600): DMR4:36743201
caccagcaagaaagctctcaccagatatggttatggttccttgaccttagacttctcaggctccataattgtaagaaataaatttattttttaaataaatcaccccatttcaggtattctgttgtaagtaacagcaaacagactaagacaagtaggtaaatcattatgaagagaactatctagtagtatttttcaaaacattgtcctgaacatataccaaggtagatcgcattctgggccataaaacataccttaataagtttaaaataatagaaatcatacaatgtatgccctcaggccgcagtggaattaaactagaaaccgatgacagaaaaagagctgaaaaatcccaaaatatttggatagtcaacaatacatttctaaataatacataggtcaaagaacaaatatcgagagaaataaaaaagaatattttaagctaaataaaactgaaaatactacctatcaaaatctgtgagatgcagcaaaagtagtgctcatagaaaaatgtatagcgttaaatagatatattagaagagagatctaaaatcaattatctaagctgccagattaagaagctagaaaaagaaaagtaaatta

SEQ ID NO: 626 - DNA, 3600 bp, Homo sapiens
  misc_feature (1)..(3600): DMR4:37841101
tgtgtgtgtgtgtgtttgtatatgtataatatacttcaaaaccataaataggaatatttgtgtgtgtgtgtgtgtgtgtgtgtgtgtggtttgttctgtgcacttttccccccaattaatttgtcatggacaccttcctgtgttagtccctattagtcctgactttctgtcttaaaggctgctgcaccggtgtatttaactcagtgacacagactcagtccttaccatcaggtaggaagaggtgtagcagagtgacagtagtgtctgcttgagtatgctgtaggtcccacccctcctgattgtccccctagcaagaaaccactgattcaaagaaactgaacttgtaggtttgtctttgatactgtatttgttggatcagctgatggtgcccactccagtgcagagtatgaaagcccagtcctgcctgaagggagcagccgtgccagctgagtgttgcccacatgaaaatataggtcccagttgccagatcatctgagttctcctcttcccaaaataactggaaacctggattttgtgtgtgaaatctcctaattcctacgtgttggaccattttttccaatggtgtgtagtccagacaaaatacgtctgtgaactttccctctgcccctctgatttaacttcacgaagaatgaggcatttctgcttttccactccaggtagcttgggagttaactccccttgtgcacagttgcttgagtatgtgtgtgggtgtgtgcgcgcgtgcatgcacgtgcatgtgtgtgcgcatgtgtatccgtaaggtaactttctggcatcaaaattgtatgtgcattcacaaagttgatagtgcttagcaaattgacctccaaaaatataccagttggtgctcccaccaacagtagatgttgacagcatatgatacctacatttcctcctgctctgtgatccaatttctcatttttcctgatttgctagttgaaagtaatagctcacttttatttgtattctttaattaacctatattttctatgtgtttgttcaccttttatatttataaacatctttgtttataatatatatacatatatacatattatatatacatatatgcatatactatatatataaaatatattttttagatgttttctgttgtctttggaattttctattgaaactgtttgctgaactgtttaaaaatctgtataatatttattagtcttattttatagcttctgggttttatgtcatgcttaggaagacatgctctatagcaaaattattaaagtaatagcaaaatatttcccttgttctttctctagaactatcatgtttgtgttttataatatttaaatcttttgtttcattagtgatttttaattttatatggggcatgaagtaggaaagcagattagatttttttctaaaaggtttgcagttgtaccaacatcaatggaagaatctttcttttttttcttttttgactaattggaaaggtcacctttatgcaacaatttctaacattaatcaagtgcttattatatatcagataactgctggaggcccttcacatgtcattttttttcttttttttttgagacaggttctcacattgtcacccaggctgcagtgcagtggcatgatcttggctcactgcggccttgacctcccagattcagggaatgctcctgcctcagccctctgagtagctggtactgcaggtgtgcaccaccatgctctgctaattttttgtatttttttgtagagatagggtttcaccatgttgcccaggctggtctcgtattcctgagctcaagcaatccacccgcctcggcctcccaaagtgctaggattagaggagtgagccactgtgcccggtcaacatgtaatttcatttaatcctcagagtaatgccagtaaattctggtatattatcatgcatgttatagatgaaaaaactacaaggaagagtggttaatagccagcagtcacacagcttatagatggcaaagctccaggatttaaattcagagtctgactccagagcgtgttaaccactcagcattattacttctgtgttcatctcccatttcaaattagatcaacttctgaactctctattctgttcctttaatctgcctttttatgtctagtaccaagctgttttaattactgtaggtttattatgtattttaaaatccaagagagttgtttttccagatttttcttccctaatcttacatatttattttccaagatgcattttattttcagggtatgcttgttttaaaccacaattctcttagataagaccttgttcatttattcattcccaaaagaaatggataataacctaagattccagccatcagagcactggaagtttttaaagccttttatttttctgtaacttctcctgttaattttggtatctgttgttagtctgtataaagtccctaagtcatggcatggtatcaaacaggattgttacttggcaaacaaaaagttttatttatttattattattatttttttttttttcctgagacggagtttcgctcttgttgcccaggttggaatgcagtggcacaatctcggctcactgcaacctccacctcccaggttcaagcgattctcttgcctcagcctcccaagtatctgggattacaggcatgcaccaccatgcccagctaattttgtatttttagtagagatggggtttctctgtgttggtcaggctggttttgaactcctgacctcacacgatccacctgcctcggcctcccaaagtaaaagttttattttttatatctttatgtatgggataacccaacacattttgttaaaaaggacattttgaaaatcatttctgaagctgataaaagacatttgggaacctgtcgctttggggatgtgtgggtgtgtggagccctggaactgtcccgggctggctgtagcactgtcagggcacctgtcaggccagcagtgagtctcgtgtgggaacatgagcttgaggttcttctttgtatctcactctagatgggatgcataaaacaaaacctgaaataatcagatttgctgaaaataactacagagtagaatttaaaacttgagtatgttgagggaaggaatatatatatctgggagagaatggatacgttttgtttttctgaaatggaattagaaagatgttcagttgtcttgtgcattcttgcaaaccttgcagttttgagagccctgtttctgccttgtatcattttccactgtgtatctgattctaggagcgtgaacagggagacaaaggtgaagtttgtgcacacctctgtccatggggtgggtcatagctttgtgcagtcagctttcaaggcttttgaccttgttcctcctgaggctgttcctgaacagaaagatccggatcctgagtttccaacagtgaaatacccgaatcccgaagaggggaaaggtgtcttggtaacctaatttttttttaaattatgaaatctgcttttatattcaaaactattactgtcaagtaaaatacatttttatgtgttttcattgtgctgaagaaaaactaatttcagcatggaaatatgtatgtttggctgggtgcagcgt

SEQ ID NO: 627 - DNA, 100 bp, Homo sapiens
  misc_feature (1)..(100): DMR4:37936701
tctggagaaagataaaggaagggcagggtctgggaagaagtgagatatactagaatagaacctccttgcgagatgggatttttatctgttttgttcactg

SEQ ID NO: 628 - DNA, 1000 bp, Homo sapiens
  misc_feature (1)..(1000): DMR4:38897601
ccatgcctttggacaagtttgtgaaatgaagtaagcttggttattatttccaggcagacacaagaatagaaaacattttagaaaagagggtttttggggaggctgaggcaggtaaatcaacttgaggtcaggagttcaagaccagcctggccaacatggcaaaaccccatctctactaaaaaaaaaaaatacaaaaattagctgagtgtggtgacatgcccctgtagtaccagctgcttggaggctgcgacagaagaatcgcttgagcctgggagatggaggttgcagtgagccaagattgcaccactgcactccagcctgggcaacagaacaagactctgtttcaaaaaaaaaaaaagaaagaaaaaagaaaagagggttttgatagtagttccaaatcccacaggatcttatagacctgacttgcttccaaaatgtattactaggctaagagtgatagaccagtagtcaaaatgaaagtcaacaatgctaaaacatgtataagtatacaaaaggaagagctctatagtagaatacagtaatttatttctagataccaccaaaggcttaaatgtttatttgaaattctagttttgacagttttatgagtttaaacatcttatgcaagagtacctgaggttgggggttggtgtgtacggaatgtacctgatatgtatatttactttttccaaaattatcattgttccccttactcatcctctcccaaggtacatagttttttccttctgcacattttaatgaaactcttctagcagcccggtcagaaatgacagtgtttattacagagaatggcaaacttgtcaaaatgatactacgatgagaaatcatcaccgtataaatcactgtcgatagcgcatggattcatttttgaaggtgacattgctgatgatatgaaatttctcaaggaacattgagacaaagagaataggaataatgcttagagtttgtccatcgtcctttagattctatgaataaaaca

SEQ ID NO: 629 - DNA, 300 bp, Homo sapiens
  misc_feature (1)..(300): DMR4:39309401
tatagctaaaagatggaaacaatccaaatgtccatcaactgaaaaagaaacaaaataggatgtgtccacacaatgaaatattatttacccctaacaaggactgaagcactgatacatgctacaacccaggtcaaccttgaaaccactatgctaagtggaagaagccagacacaaaaggccatatattctaatgtctccatacacacgtgaaacgtccagcataggaaaatccatagagacagagcagagcagtgagtgccacggggtggatagaatgagtggctgctgataggtacaggg

SEQ ID NO: 630 - DNA, 200 bp, Homo sapiens
  misc_feature (1)..(200): DMR4:39462101
taactaggaattgtaatagaagaaattaacttcaaagctgtgtaattatttggcagcatatttgttaatagatagttatgtttggctttccttaggttaagactacctccatggctaaagacagagattcccatggggaaaaattacaataaactgaaaaatactttgcggaatttaaatctccatacagtaagttgtca

SEQ ID NO: 631 - DNA, 1200 bp, Homo sapiens
  misc_feature (1)..(1200): DMR4:40304301
cctggctaattttttgtattttttttttttttttttttagtggagatgggatttctccgtgttggccaaactggtctcgaactcctgacctcaggtgatccacctgccttggcctcccaaagtgctgggattacagcatgagccaccgtgcctggccaagatttcattattttttaaaatgttgattcctggcttcttttgaaaacagcagagttgaacatggagcctgaatttctgcatgaccacatcatctaaggtgaaaggggctgctgcttaaaatggggctctccctgtttgctctgtgctccactgcccacaaaagatacacatatgtccttacacctggcaagaatcactggtttatattcctgtctagtcctttgtgcagagtgctagctgttccccaatattgcattctgttcttccatagtaatgttccagatggactcatgatggtccccctaggattacaattccagcttcccttgcagctaggtgtgggccagttactaagttctggccaaggagatgattgtggaattgatgcttggaatttccagactgcctttaatggaaagcaggatgtcttctcttgctctagttcttcttcctgcctgttggagtgtggatgggatagtggcagctggggcagccatgtgctatcacaagatggaagctgtgtatggagcatactagagcaaaaagacaggaagaaactacatccccaacatcatggaatcacatggcagctctggaaggcttatgctcacactcttacctaagaaaaacaaagttctgtttttatctctcatttttacagcagcctcagttatatcttaaagaaaacatcttgtttgtaagggggcctgtggcccctggcttagaccaagaaactctggaactgtgcaggcagcatcaaaccaaatttcaccgagaaccaagatgagccataatcctttctatggtaaaagcaatattggaaaaccctttctatgtctcagaggctctgtttgcaggtggcacattgcatgtagctgtgaactggtttatacaaatggctccttaggggccgctatttcccaccgctgcatatctcaggttcacagactactgcaccacattctcacctctttttcttctccactttgtctttaaaggccacacttgagcaggcagccctcccaccttttctcggcagtg

SEQ ID NO: 632 - DNA, 2300 bp, Homo sapiens
  misc_feature (1)..(2300): DMR4:41331401
taaattatatctaactgtacataacctgggttacattcttgagcgaatcatatcaacattggcagaacgtttaaataaacatgctaggaaaggttaaatagaggttaaacagtttattcttcccttcataccaagttccttaggcatttggattcacccttaaaattttctattttactcagcaaaaattttaagaacaaagaattttatgatcattcttaataaaaactgttaatagaacttgctataaaagcatcttaatcttttgttaactactcatttaatctaaacatgtcattgcctcttgagtgtcataatatgaaaacgaaaagtttttataatctaaacagttcattgcctctaaagtgtcacaatatgaaaaaagtttttttctaaaaaaaaagtgttgcccataaagtgtcataaaaactatttgtggctggacacagggctcacacctgtaatcccagtgctttgggagtgggaggatcacttgagaccaggagttccagaccagtttgggcaacattgcaagaccctgtctgtacaaaaaataaaaaatttagctgggtgtcatggcttgtgcctgaattcctaactacttgggaggctgagggagggggatcacttgagcccaggagttcgaggctacagtgagctatgatcatgccactagactccagcctaggcaacagagtgagactctgctgcaaaacaaaaccctgtttgctagagggttgtttctctatataatatccatagctgggcatggtggctcatgcctgtaatcccaacactttggaaggctgaggcaggagagtagcttgaagccacacatttgagaccagcctggtcaacatcttgaaaccccgtctctacaaaaacttaaaaagaaattagccgggtactgtggcgtgcacctgtagtcccagctactcagaaggttgaggcaggatcgcctgagcctaggagcttgaggctgtagtgagttatgattgctctactgtactccagcaccccagcctgggtgatagaacaagaaagaccctacctcaaaaaaaaaaaaaaagtaagaaagaaagaaaagaaaatatcagtagacatttcaacttttaacagaacttatgagtggagtgggacttggaagaaaagggttatagaataaatgagaacattagatttcctctgtgttcccagtgaagcccagcaccgctaacttctttctataatagaccttatccctttttgcacaggggttggcgggctgactcatgacccaagttgggctgatcactgttccttatcctcttaacttcagtgattggtcctgaatagacatgtgacccaagctggactaattttagaactttcatggaattttgcagacaggggatagaaataaataattctttttcttctttgatcagggagttatcaaaggatcagggagtgatttgggatgtgagtcaatcaccacaggccaccacattcctctttgcatcgtgtattagtctgttcttgcactactgtaaaatacttgagactggttaatttataaagaaaagacatttaattggctcacagttccataggctctacaggaagcatggttggggaggcctcaggaaacttacaatcatgggggaaggtaaaggggaagcagacatgtcttacacggttggagcagaaggaagagagagaaggggggaggtgctacatacttttaaacaacaagatcttgtgagaactcactcactatcacaagaacagcaagggggaagtctgctcccatgatccaatcactcccaccaaacccctcctccaacattggagattccaattcaacataagatttcggcagtgtcacaaattcaaaccatatcacgtgaagattttcatactctgctctgaaaatctctaccacatggagtccccaactgggcttgctttgaacgaaagtaggagagccagtggcatagagaatagctgcagtatgttggattgagatcagataataatcacctaaagaaatgccacactatttttgtttcctaggcaacataggcaaaagaaaatacattatctgtatttgagccatttgcatgataataaaaatgttaagatattggctctagtattaattctcaatgtgatatggctctagtattaaattcatggagatgtccttttggagtatgagagaatgagggcaaaggcaaataaaagcaaagagaaacagagatggttacagtcattggagaattgcggaaaatggaacagactagaattactgaagtcca

SEQ ID NO: 633 - DNA, 1200 bp, Homo sapiens
  misc_feature (1)..(1200): DMR4:41644801
atggagtgatggcccagacatgtaatcagcaaacaccctggccagaagcttggtcacaaaagaggggaggggaggcaggaaactgggatgggttgtagaattgaggctgcactatcttctgaggttatatatttcaaattgatcatgatgatgatggtagtaacgataacaatgaccaacatcaaatgtgtaccagtaccaggcattgttctaagtactttgcatgcattcatttaatcctcttagtaactcaatgaactagcaactcttattgtcctcgattccacagacgaatcccagcacagctgtcacttgctgaacgtcacatagctagcgagtgggggagccaggattagaaccagggaaggaaggctaaagaggctgatgagggctttgagattgtgtgctgagagccaaagcggggagagaggagggagagtggattatttcatttaattctcacaaagcactctggaggtagctattgcaaacttgactccacctttagtttaaaaagttaacttctccaaagttcataaaatatagtaacaattatgtctaaagtatcttgagcacttactatgtgcctggcaccttacgtctattttcacatttaaccctgcaagcttgtaagaataggtgctattatcatcattttagagaggaggaaatggaggcacagggagactaagaaacatgcctgagattccaaagcatggaaaagacagagctgggattatttcccacagctgcaaccccaaccatctgcctccagaatcctcactcttcatcattatgctataactacctgtaggattgtggtgaggttgttgtaaggatcagatgaattaatacatatagaatcaccagatctaaagactccaaaacagttttttttctgccttgactgccttccatgtggaaactgtaaatgaatccctactattctattgtcagcaaatctgttcacaatgcagaggttataaataggaaggaatgaagtttcttacagttaccttgtgaggcaattctctgaaatttggcaactgacatgaaatgtgattgcatatttcacactgccatatttaaataaatgtgcagccctgctatggatactgtagataatatctggatgtttctgcctttgaggcattccagttccaaccagacttacattggattgtgtgggaatgcacacga

SEQ ID NO: 634 - DNA, 31800 bp, Homo sapiens
  misc_feature (1)..(31800): DMR4:49123201
cattccattccattccattccatacccttcaggttgattcctttccattccattccattccatgccattccactccattccgctccattccattcgggttgattccgttccattccatgcccttttattccattccattccattccattccattccattccattccattccattccattccattccattccactcgggttgtttccattccattcctttccatttcattctattccattccattccattccattccattccattccattccattccattccattccattctatttcattccattccactccattccattccattcctctctggttattccattccattccattccattccactcgagttgtttccattccattccattccattttattccattccattccattccactcaggtagattccattccattgcattccattccattccgttccgttccattccattccattccattccattccattccattccattaaattccattccattccattccactcgggtagattccattccattccatttcgttagtttctaatcgggttgattccaatccattccattctattcaagtcctttccattccatgccattccactcgggtcgtttcccttcagttgtattccattccattccattccattccattccattccattccattccattccattccattccattcctttccattccattccattgcattccattccattcgggtggtttccattccgttccattagtttccattccattccattcgtttccattccattccattccattcctttccactcagggtgattccattccattccattccaatgcattccattccagttgataccattgcattgcattgtttccgtgccattccattccattccattccattccattccattccattccactcgggttgtttccattgcattcctttccatttcattccattccattccattccattccattctattccattcgattccactccattccattccattcctctccggttattccattccattgcattccattccactcgggttgtttccattccattcgattccattttattccattccattccgttccattacattccgttctataccattccactcaggttgattccataccaatctattccattccactccaataaattccattccattccattccactcgggtagattccattatattccattccattccgttccactgcattccattccattccattccattccattccattccattccattccattccattccattaaattccattccattccattccactcgggtagattccattccattccattccattccattagtttctaatcgggttgattccaatccattccattatattcaagtcctttccattccatgccattccactcgggttgtttccattttgttgtattccattccattccattccattccattccattccattccattgcattccattccattgcattccattccattgcattgcattccattccattgtattccattccactcgggttgtttccattcctttccattagtttccattccattccattcctttccattccattccattctattcctttccactcagggtgattccattccattccattccaatgcattccattccagttgataccattgcattgcgttgtttccattccattccaatccattccattccattccattccattccattccactccgttttattcattgccattccattccattccatttcattcctctcgggttgattccattccattccacgcccctttattccattccattccattccattccattccattccattccacaccattccaccaaagttgattgcatgctattccattccatagcattccattctattccattccattccattccattccattccattccattccattccattcctttccacttgggttgattccattccattcaattccgttccgttccgttccattccattccattccattccatttcattccattgttttccactcgggttgattccattccattccattccattccattccatacacttcgggttgattcgtttccattccattccattccatacaattccactccattccgttccattccattcgggttgattctgttccattccatgcccttttattccattccattccattccattccattccataccattccaccaaagttgattgcatgttattccattccattccattccattccattccattccattccattccataccattccaccgaagttgattgcatgttattccattccattccattccattccattccattccattccattccattccactcgagttgattccattctattcaattccgttctgttccgttccattccattccattccattccatttcattccattgcattccactcgagttcattccattcctttccattccattccattccattcaattccataccgttcgggttgattcctttccattccattaaatatcattccactccattccgctccattccattcgggttgattccgttccattccatgcccttttattccattccattccattccattccattccattccattccattccataccattccaccaaagttgattgcatgttattccattccattccatttcattccattcaattccattccattccattcctttccactcgggttgattccattacattcaattccgttccattccattccgttccattccgttccattgcattgcatttcattccattgcattccactcgggttgattccataccattccattccattccattccattccattccattccatacccttcgggttgattcctttccattccattctattccataccattccactccattccattccattcgggttgattacattccattccgttccgttccattccattccataccattccactagggttgattccataccattccatttcattgcattccattccattccattcgactcgggttgattccattccattccattccattccaatgcattccattccagttgataccattgaattgcattgtttccattccattccattccacttgatttgattcatttccattccattccattccattccattccattccattccattccataccattccaccaaatttgattgcatgctattccattccattccgttccattcctttccacttgggttgattccattccattcaattccgttccgttctgtcccgttccgtgccattccatttcattacatttcattccattgcattccactcgggttgattccattccattccattccattccattccattccattccattccattccattccattccattcccttcggattgattcctttccattccattccattccataccaatccactccattccgttccattccattcgggttgatttggttccattccatgcccttttattccattctattccattccattccattccattccattccattccattccattccataccattctaccaaagttgattgcatgttattccattccattccattccattccattccattccattccattccattccattccattccactcgggttgattccattcctttcaattccgttccattcctttccattccattccatttcattccattgtattccactcgggttgattccattcctttccattccattccattccattccattccattccattccattccattccattccattgcattccattccattccatacccttcgggttgattcctttccatttcattacattccataccattccactccattctgttccattccattcgggttgactctgttccattccatgcccttttattccattccattccattccattccataccattccaccaaagttgactgcatgttattccattccactccattccattccattccattccattccattccattccattccattccattccattcctttccactcgggttcattccattcaattcaattccgttccgttcctctctgttccgttccattccattccatttcattccattgcattccactcgggatgattccattccattccattccattccattccattccattccattcccttcgagttgattcctttccattccattccattccataccataccactccattcccttctattctattcgggttgattccgttccattccttgcacttttattccattccattccattccattccgttccattccattccataccattccaccaaagttgattgcatgttattccattccattctattccattccattccattcccttccattccttttccactcgggttgattccattccattcaattccgttccgttccgttccattccattccattccattccatacccttcgggttgattcccttccattccatgtcattccatatcattccactccattccgctccattccattctggttgattccattccattccatgccctttcattccattccattccattccattccattccattccattccataccattccaccaaagttgattgcatattattccattccattccataccattccattccactcggtttgtttccattccattcctttccatttcattctaatccattccattccattccattctattccattccattccactccattccattccattcctctccggttattccattccattccattccattccactcgggttgtttccattccattccattccattttattccgttccattccattacattacattctataccattccactcgggttgattccataccattctgttccattccattccattccattccattccattccattccattccattccattccataccattccaccaaagttgattgcatgttattccattccattccataccattcctttccactcagggtgattcaattcctttccattccaatgcattccattccagctgataccattgcattgcattgtttccattccattcctttctattccattccattacattccactcggtttgattcatttccattccattcaattccattccattccattccattccattccattcgtctcgggttgattccattccattccatgcccttttattccattccattccattccattccattccattccattccattccattccataccattcctacaaagttgattgcatgctattccattccattctattccattccattccattccactccattccattccattccattccattccacttgggttgattccattccattcaattccattccgttccgttccgttccattccattccattccattctgttccattccatttctttccattgcattccactcaggtttattccattccattccattccattccattccattccattccattccattccattagtttctaatcgggtgattccaatccattccattatattcaagtcctttccattccatgccattccactcgggttgtttccattttgttgtattccattccattccattccattccattccattccattccattccattccattctattagtttctaatcgggtgattccaatccattccatgatattcaagtcctttccattccatgccattccactcgggttgtttccattttgttgtattccattccattccattccattccattccattccattccattccattccattccattccattgcattccattccactctggttgtttccattccgttccattagtttccattccattccattcctttcgattccattccattccattccattccattccattccattccattcctttccactcagggtgattcaattccattccattccaatgcattccattccagctgataccattgcattgcattgtttccattccattcctttctattccattacattacattccactcggtttgattcatttccattccattcaattccattccattccattcgtctcgggttgattccattccattccattccatgcccttttattccatcccattccactccattccattccattccattccattccattccattccataccattccaacacagttgattgcatgctattccattccattctattccattccattccattccactccattccattccattccattccattccattccattccattccattccattccattccacttgggttgattccattccattcaattccattccgttccgttccgttccattccattccattctgttccattccatttcattccattgcattccactcaggtttattccattccattccattccattccattccattccattccattccatacccttcgggttgattccttcccattccattccattccataccattccactccattccgttccattccattcgggttgattctgttccattccatgcccttttgttccattccattccattccattccataccattccaccaaagttgattgtatgttattccattccattccattccattcctttccattccattccattccattccattccattccattccattccattccactcgggttgattccattccattcaattccgttccgttccgttccgttccattccattccattccatttcattccattgcattccactcgggttgattccattcctttccattccattccattccattccattccattccattccattccattccattccatacccttcgggttgattcctttccattccattccattccataccattccactctattccgctccattccatttgtgttgattccattccattccatgcccttttattccattcctttccactccattccattccataccattccaccaaaattgattgcatgttattccattccattccattccattcctttccactcgggttgattccattccattcaattccgttccgttccgttccattccattccatttcattccattgcattccactcgggttgattccattccattccattccattccattccattccattccattccatacccttcaggttgattcctttccattccattccattccatgccattccactccattccgctccattccattcgggttgattccgttccattccatgcccttttattccattccattccattccattccattccattccattccattccattccactcgggttgtttccattccattcctttccatttcattctattccattccattccattccattccattccattccattccattccattctatttcattccattccactccattccattccattcctctctggttattccattccattccattccattccactcgagttgtttccattccattccattccattttattccattccattccattccactcaggtagattccattccattgcattccattccattccgttccgttccattccattccattccattccattgcattccactggggttgattccattccgttccattccattccattccattccattccattccattccattccatacccttcgggttgattcctttccattccattccattctataccattccacttcattccgttccattccattcgggttgattctgttccattccatgcccttttattccattccattccattccataccattccaaaaagttgattgcatgttattccattccattccattccattcctttccactcgggttgattccactccattcaattccgttccattccgttccgtttctttccgttccattccattgcgtttcattccattgcattccactagggttgattccattcctttgcattccattcaattccattccatacccttcggtttgattcctttccattccattccattccataccattccactccattccgctccattccattctgtttgattccgttccattccatgcccttttattccattccaatccattccattccataccattccaccaaagttgattgcatgttccattccattccattccattccactcgggtagattccattccattccatttcgttagtttctaatcgggttgattccaatccattccattctattcaagtcctttccattccatgccattccactcgggttgtttcccttttgttgtattccattccattccattccattccattccattccattccattccattccattcctttccattccattccattgcattccattccactcgggttgtttccattccgttccattagtttccattccattccattcgtttccattccattccattccattcctttccactcagggtgattccattccattccattccaatgcattccattccagttgataccattgcattgcattgtttccgtgccattccattccattccattccattccattccattccattccactcgggttgtttccattgcattcctttccatttcattccattccattccattccattccattctattccattcgattccactccattccattccattcctctccggttattccattccattgcattccattccactcgggttgtttccattccattcgattccattttattccattccattccgttccattacattccgttctataccattccactcaggttgattccataccaatctattccattccactccaataaattccattccattccattccactcgggtagattccattatattccattccattccgttccactgcattccattccattccattccattccattccattccattccattccattccattaaattccattccattccattccactcgggtagattccattccattccattccattccattagtttctaatcgggttgattccaatccattccattatattcaagtcctttccattccatgccattccactcgggttgtttccattttgttgtattccattccattccattccattccattccattccattccattgcattccattccattgcattccattccattccattgcattccattccattgtattccattccactcgggttgtttccattcctttccattagtttccattccattccattcctttccattccattccattctattcctttccactcagggtgattccattccattccattccaatgcattccattccagttgataccattgcattgcgttgtttccattccattccaatccattccattccattccattccattccattccactccgttttattcattgccattccattccattccatttcattcctctcgggttgattccattccattccacgcccctttattccattccattccattccattccattccattccattccattccattccacaccattccaccaaagttgattgcatgctattccattccatagcattccattctattccattccattccattccattccattccattccattccattccattccattcctttccacttgggttgattccattccattcaattccgttccgttccgttccattccattccattccattccatttcattccattgttttccactcgggttgattccattccattccattccattccattccatacacttcgggttgattcgtttccattccattccattccatacaattccactccattccgttccattccattcgggttgattctgttccattccatgcccttttattccattccattccattccattccattccataccattccaccaaagttgattgcatgttattccattccattccattccattccattccattccattccattccataccattccaccgaagttgattgcatgttattccattccattccattccattccattccattccattccattccattccactcgagttgattccattctattcaattccgttctgttccgttccattccattccattccattccatttcattccattgcattccactcgagttcattccattcctttccattccattccattccattcaattccataccgttcgggttgattcctttccattccattaaatatcattccactccattccgctccattccattcgggttgattccgttccattccatgcccttttattccattccattccattccattccattccattccattccattccattccattccataccattccaccaaagttgattgcatgttattccattccattccatttcattccattcaattccattccattccattcctttccactcgggttgattccattacattcaattccgttccattccattccgttccattccgttccattgcattgcatttcattccattgcattccactcgggttgattccataccattccattccattccattccattccattccattccatacccttcgggttgattcctttccattccattctattccataccattccactccattccattccattcgggttgattacattccattccgttccgttccattccattccataccattccactagggttgattccataccattccatttcattgcattccattccattccattcgactcgggttgattccattccattccattccaatgcattccattccagttgataccattgaattgcattgtttccattccattccattaaattccattccattccattccacttgatttgattcatttccattccattccattccattccattccattccattccattccattccataccattccaccaaatttgattgcatgctattccattccattccgttccattcctttccacttgggttgattccattccattcaattccgttccgttctgtcccgttccgtgccattccatttcattacatttcattccattgcattccactcgggttgattccattccattccattccattccattccattccattccattccattccattccatttcattcccttcggattgattcctttccattccattccattccataccaatccactccattccgttccattccattcgggttgatttggttccattccatgcccttttattccattctattcaattccattccattccattccattccattccattccattccataccattctaccaaagttgattgcatgttattccattccattccattccattccattccattccattccattccattccattccattccactcgggttgattccattcctttcaattccgttccattcctttccattccattccatttcattccattgtattccactcgggttgattccattcctttccattccattccattccattccattccattccattccattccattccattccattgcattccattccattccatacccttcgggttgattcctttccatttcattacattccataccattccactccattctgttccattccattcgggttgactctgttccattccatgcccttttattccattccattccattccattccataccattccaccaaagttgactgcatgttattccattccactgcattccattccattccattccattccattccattccattcctttccactcgggttcattccattcaattcaattccgttccgttcctctctgttccgttccattccattccatttcattccattgcattccactcgggatgattccattccattccattccattccattccattccattccattccattccattcccttcgagttgattcctttccattccattccattccataccataccactccattcccttctattctattcgggttgattccgttccattccttgcacttttattccattccattccattccattccgttccattccattccataccattccaccaaagttgattgcatgttattccattccattctattccattccattccattcccttccattccttttccactcgggttgattccattccattcaattccgttccgttccgttccattccattccattccattccatacccttcgggttgattcccttccattccatgtcattccatatcattccactccattccgctccattccattctggttgattccattccattccatgccctttcattccattccattccattccattccattccattccattccattccataccattccaccaaagttgattgcatattattccattccattccataccattccattccactcggtttgtttccattccattcctttccatttcattctaatccattccattccattccattctattccattccattccactccattccattccattcctctccggttattccattccattccattccattccactcgggttgtttccattccattccattccattttattccgttccattccattacattacattctataccattccactcgggttgattccataccattctgttccattccattccattccattccattccattccattccattccgttccattccattccattaaattccattccattccattccacttgggtagattccattccattccattccattccattccattccattccattccattccattccattagtttctaatcgggtgattccaatccattccattatattcaagtcctttccattccatgccattccactcgggttgtttccattttattgtattccattccattccattccattccattcctttccactcagggtgattcaattcctttccattccaatgcattccattccagctgataccattgcattgcattgtttccattccattcctttctattccattccattacattccactcggtttgattcatttccattccattcaattccattccattccattccattccattccattccattcgtctcgggttgattccattccattccatgcccttttattccattccattccattccattccattccattccattccattccattccattccataccattcctacaaagttgattgcatgctattccattccattctattccattccattccattccactccattccattccattccattccattccacttgggttgattccattccattcaattccattccgttccgttccgttccattccattccattccattctgttccattccatttctttccattgcattccactcaggtttattccattccattccattccattccattccattccattccattccattccattccattccattccatacccttcgggttgattccttcccattccattccattccataccattccactccattccgttccattccattcgggttgattctgttccattccatgcccttttgttccattccattccattccattccataccattccaccaaagttgattgtatgttattccattccattccattccattcctttccattccattccattccattccattccattccattccattccattccattccattccactcgggttgattccattccattcaattccgttccgttccgttccgttccattccattccattccatttcattccattgcattccactcgggttgattccattcctttccattccattccattccattccattccattccattccactcgggttgattccattccattccattccattccattccattccattccattccattccactccattccattccactcctctccggttattccattccattccactcgggttgtttccattccattccattccattttattccattccattccgtttcattacattccattctataccattccacttgggttgattccataccattctattccattccattccagtaaattccattccattccattccactcgggtagattccattccattccattccattccattccattccattccattccattagtttctaatcgggttgattccaatccattccattatattcaaatcctttccattccatgccattccactcggtttgtttccattttgttgtattccattccattccatcccattccattccattccatttcattccattccactcgggttgtttccattccgttccattagtttccattccattcctttccattccattccactcatggtgattcctttcctttccattctaattcattccattccagttgataccattgcattgcattgtttccattccattccattccattccattccattccattccattccattccactcggtttgattcatttccattccattcctttccattcctctcgtgttgattccattccattccatgcccttttattccattccattccattccattccattccattccattccattccattccattccatacctttacaccaaagttgattgcatgctattccattccattccattccattccattccattccgttctgttccgttccgttccgttccattccattccattccattccattgcattccactggggttgattccattccattccattccattccattccattccattccattccattgcattccactggggttgattccattccattccattccattccattccattccattccattccattccatatctttccaccaaagttgattgcatgctattccattccattccattccattccattccattccattccattccgttcctttcctcttgggttgattccattccattcaattccgttccattccgttccgttccgttccattccattccattccattgcattccactggggttgattccattccgttccattccattccattccattccattccattccattccattccatacccttcgggttgattcctttccattccattccattctataccattccacttcattccgttccattccattcgggttgattctgttccattccatgcccttttattccattccattccattccataccattccaaaaagttgattgcatgttattccattccattccattccattcctttccactcgggttgattccactccattcaattccgttccattccgttccgtttctttccgttccattccattgcgtttcattccattgcattccactagggttgattccattcctttgcattccattcaattccattccatacccttcggtttgattcctttccattccattccattccataccattccactccattccgctccattccattctgtttgattccgttccattccatgcccttttattccattccaatccattccattccataccattccaccaaagttgattgcatgttccattccattccattccattcctttccattccattccattccattccattccattccattccattccattccattccattccattccattcctttccactcgggttgtttccattccattcaattccattccgttccgttccgttccattcccttccatttcattccattgcattccactcgggttgattccattcctttccattccattccattccatatcattccactccattccgctccattctattcgggttgattccgttctattccatccccctttattccattccattccattctattccattccattccataccattccaccaaagttgattgcatgttattccattccattccattccatttcattcaattctattccattccattcctttccactcgggttgattccattccattccattctgttccgttccattccattccattccattccatttcattccattgcattccactcgggttgatttcattccattccattccattccattccattccattccattccattccattcccttcacgttgattcctttccattccattccattccataccattccactccattccattccattccattcgggttgattccattccattccggtccgttccattccattccataccattccactagggttgattccatgccattccattccattgcattccattccattccattccactcgggttgattccattccattccattccattccattccattctattccattccattccattccactcgggttgattccattccattccattccattccattccattccattccattccactccattccattccattcctctccggttattccattccattccactcgggttgtttccattccattccattccattttattccattccattccgtttcattacattccattctataccattccactcgggttgattccataccattctattccattccattccagtaaattccattccattccattccactcgggtagattccattccattccattccattccattccattccattccattccattccattagtttctaatcgggttgattccaatccattccattatattcaaatcctttccattccatgccattccactcggtttgtttccattttgttgtattccattccattccatcccattccattccattccatttcattccattccactcgggttgtttccattccgttccattagtttccattccattcctttccattccattccactcatggtgattcctttcctttccattctaattcattccattccagttgataccattgcattgcattgtttccattccattccattccattccattccattccattccactcggtttgattcatttccattccattcctttccattcctctcgtgttgattccattccattccatgcccttttattccattccattccattccattccattccattccattccattccattccattccatacctttccaccaaagttgattgcatgctattccattccattccattccattccgttccgttccgttccgttccgttccgttccattccattccattccattccattgcattccactggggttgattccattccattccattccattccattccattccattccattccattccattccattccatacctttccaccaaagttgattgcatgctattccattccattccattccattccattccattccattccattccattccattccgttcctttcctcttgggttgattccattccattcaattccgttccattccgttccgttccgttccattccattccattccattgcattccactggggttgattccattccattccattccattccattccattccattccattccattccattccattcccttcgggttgattcctttccattccattccattctataccattccacttcattccgttccattccattcgggttgattctgttccattccatgcccttttattccattccattccattccataccattccaaaaagttgattgcatgttattccattccattccattccattcctttccgctcgggttgattccactccattcaattccgttccattccgttccgttcctttccgttccattccattgcgtttcattccattgcattccactagggttgattccattcctttgcattccattcaattccattccatacccttcggtttgattcgtttgcattccattccattccataccattccactccattccgctccattccattctgtttgattccgttccattccatgcccttttattccattccaatccattccattccataccattccaccaaagttgattgcatgttccattccattccattccattcctttccattccattccattccattccattccattccattccattccattccattccattccattcctttccactcgggttgtttccattccattcaattccattccgttccgttccgttccgttccattcccttccatttcattccattgcattccactcgggttgattccattcctttccattccattccattccatatcattccactccattccgctccattctattcgggttgattccgttctattccatccccctttattccattccattccattctattccattccattccataccattccaccaaagttgattgcatgttattccattccattccattccatttcattcaattccattccattccattcctttccactcgggttgattccattccattccattctgttccgttccattccattccattccattccatttcattccattgcattccactcgggttgatttcattccattccattccattccattccattccattccattccattccattcccttcgcgttgattcctttccattccattccattccataccattccactccattccattccattccattcgggttgattccattccattccggtccgttcaattccattccataccattccactagggttgattccatgccattccattccattgcattccattccattccattccactcgggttgattccattccattccattctattccattccattctattccattccattccattccactcgggttgattccattccattccattccattccattccattccattccactccattccattccattcctctccggttattccattccattccactcgggttgtttccattccattccattccattttattccattccattccgtttcattacattccattctataccattccactcgggttgattccataccattctattccattccattccagtaaattccattccattccattccactcgggtagattccattccattccattccattccattccattccattccattccattccattccattagtttctaatcgggttgattccaatccattccattatattcaaatcctttccattccatgccattccactcggtttgtttccattttgttgtattccattccattccatcccattccattccattccatttcattccattccactcgggttgtttccattccgttccattagtttccattccattcctttccattccattccactcatggtgattcctttcctttccattctaattcattccattccagttgataccattgcattgcattgtttccattccattccattccattccattccattccattccattccactcggtttgattcatttccattccattcctttccattcctctcgtgttgattccattccattccatgcccttttattccattccattccattccattccattccattccattccattccattccatacctttccaccaaagttgattgcatgctattccatttcattccattccataccattccattccattccgttccttttatcttgggttgattccattccattcaattcctttccgttccgttccgttccattccattccattccattccattccattgcattccactggggttgattccattccattccattccattccattccattccattccatacccttcgggttgattcctttccaatccattccattctataccattccacttcattccgttccattcctttcgggttgattctgttccattccatgcccttttattccattccattccattccataccattccaccaaagttgattgcatgttattccattccattccattccattccattcctttccactcgggttgattccactccattcaattccgttccgttccgttcctttccgttccattccattgcgtttcattccattgcattccactagggttgattccattcctttccattccattccattccattccatacccttcggtttgattcctttccattccattccattccataccattccactccattccgctccattccattcggtttaattccgttccattccatgcccttttattccattccattccattccattccataccattccaccaaagttgattgcatgttccattccattccattccattccattccattccattccattccattccattccattccattcaattccattccattccattccattcctttccactcgggttgtttccattccattcaattccattccgttccgttccgttccgttccagtccattccatttcattccattgcattccactcgggttgattccattcctttccattccattccattccatatcattccactccattccgctccattctattcgggttgattccgttctattccatccccctttattccattccattccattctattccattccattccataccattccaccaaagttgattgcatgttattccattccattccattccattccattccattccattccattccattccattcaattccattccattccattcctttccactcgggttgattccattccattccattctgttccgttccgttccgttacattccattccatttcattccattgcattccactcgggttgatttcattccattccattccattccattccattccattccattccattccatacccttcgcgttgattcctttccattccattccattccataccattccactccattccattccattccattcgggttgattccattccattccggtccgttccgttccattccataccattccactagggttgtttccatgccattccattccattgcattccattccattccattccactcgtgttgattccattccattccattccattccattccattccactccattccattacattccattctactctggttaattccgttccattcccttccaatccattccattccattccattccattccattccattccattccattccattccattccattggggtccattccatttcattccattctgttccgttccgttccattccattccattccattccattccattccattccattgcattccataccattccattccattctattccattccattccattccattccactcgagttgattccattccattccattccattccgttctgttgcattccattccgttccattccattccattccattccactcgagttgattccattccattccattccattccgttccgttgcattccattccgttccattgctttacattccattccattccattccattccattccattccattccattccattccaaccttctaatcgggttgattctaatccattccatttccattccattcgaggttgattccattccattccggtccgttccgttccattccataccattccactagggttgtttccatgccattccattccattgcattccattccattccattccactcgtgttgattccattccattccattccattccattccattccactccattccattacattccattctactctggttaattccgttccattcccttccaatccattccattccattccattccattccattccattccattccattccattccattccattccaaccttctaatcgggttgattctaatccattccattacattcaagtctttccattccatgccattcctcttgtgttgtttccattccattgaattccattccattccattccattccattccattccattccattccattccattccattccactcgggttgtttccattccatttcattagtttccattccattccattccattccattttattccattccatttcattccattacattccattctataccattccactcgggttgattctataccattctattccattccattctataccattccactcgggttgattccataccattctattccattccattccattaaattccattccattccattccactcgtgtagattccattccattccattccattacgttccgttccgttccattccattccattccattccattccattccattccattccattccattaaattccattccattccattccattcctctcgggtcgattccattccattccattccattccattccattagtttctaatcgggttgattccaatccattccattatattcaaatcctttccattccatgccattccactcgggttgtttccattttgttgtattccattccattccattccattccattccattccattccattgtattccattccactcgggttgtttccattccgtttcattagtttccattccattccattcctttccattccattccactcatggtgattccattcctttccattccaattcattccattccagttgataccattgcattgcattgttttcattccattccattccattccattcctcttggtttgattcatttccattccattccattccattcctctcgggttgattccattccattccatgcccttttattccattccattccattccattccattccattccattccattccataccattccattccattccattccattccataccattccaccaagttgattgcatgctatcccattccattccattccattccattccatttcattccattccattccgttcctttccacttgggttgattacattccattccattcaattccgttccgttctgttccattttgttccattccattccattccatttccttccattgcattccactggggttgattccattccattccattccattccattccattccattccattccattccatacccttcgggttgattcctttccattccattccattgcataccattccactccattccgttccattccattcgggttgattctgttccattccatgcttttattccattccaatccattccataccattccaccaaagttgattgcatgttattccattctattccattccattccattccattccattccattccattccattccattccattccattctattccattccattcctttcctttccagtcggtttgattccattccattcaattccattccgttccgttccattcctttccgttccattccattgcgtttcattccattgcattccactcgggttgattccatttctttccattccattccattccattcaattccatagccttcaggttgattcctttccattccattccattccataccattccactccattccgctccaatccattcgggttgattccgttctgttccatgtccttttattccattcccttccattccattccattccattccataccattccaccaaagttgattgcatgttattccattctattccattccattcgattcaattccattccattccattccattccatccctttccgctcgggttgtttccatgccattcaattccattccgttccgttccgttccattccattccattccattccattccatacccttcgggttgattcctttccattccattccattccatcccattccactccattccgttctattccatttaggttgattccatttctttccattccgttccattgcattccatacctttccactagggttgatcccataccattccattccattgcattccattccattccattccattccactcgggttgattccattccattccattccaatccattccattccattccattcgggttgattccattccattcctttccattccattccattccattccattccattccattccattccattccattcgagttgattccattctattccattccattccattccattggggttgattccattccattccattccattccattccattccattccattccattcgactcgggttgattccaatccattccattccaatccattccattccattccattccattccattccattccattccattccattctggttgattccattccgttgaatttctttccattccaatccattccataccattcgattccattccattccattccattccattctattccactcgagttaattccattcctttgaattccattgctttccattccattccattcctttccactcaggttgattccattccattccattccaatgcattccattccagttgataccattgcattgcattgtttccattccgttccattccattccattacattacattacattccactcggttttattcatttccgttccattcaattccattccattccattccattccattccattcctcttgggttgattccattccaatccatgcccctttattccattccattccattccattccattccattccattccataccattccaccaaagttgactgcatgctattccattccattccattctattccattccattccattccattccattccattccattccattcctttccactcgggttgattacattccattcaattccgttccattccgttccgttccgttccattccattccattccattttattccattgcattccactcaggttgattccattccattccattccattccattccattccattccataaccttcggattgattcctttccattccgttccattccatagattccactccattccgttccatttcattcgagttgattctgttccattccatgcccttttattccattccattccattccattccattgcgttccattccattccttaccattccaccaaagttgattgcatgttattccattccattccattccattccattcctttccactcgttttgattccattccattcaattccgttccgttccgttccgttcgtttccattccattccatttcattccattgcattccactcgggttgattccattcctttcaattccattccattccattccattcaattccataccctttggtttgattcctttccattccattacattccatatcattccactccattccgctccattccattcgggttgattccgttccattccatgcccttttattccattccattccattctattccattccattccataccattccaccaaagttgattgtatgttattccattccattccattccattccattccattccattcaattccattccattccattcaattccattccattccattcctttccactcgggttgtttccattccattcaattccgttccattccattccgttccattccattccattccgtttcattccattgcattccactcgggttgatttcattccattccattccattccattccattccattccattcccttcggtttgattcctttccattccattccattccataccattccactccattcctttccattccattcgggttgattcccttccattccgttccgttccattccattccacaccattccactagggttgattccatgccattccattccattgcattccattccattccattccactcgcgttgattccattccattccattccaatccattccattccactcctttccattcctttccattcgggttgattccattccattccgttccattccattccattccataccattccactagggttgataccatgccattccattccattccattccattccattccactcgggttgattacattccattccattccaatccattccattccattccattccattccattccattccattccattccattccattccattccattccactcgggttgattccattccattccattccattccattccattccattccattccattccattccattccactccattccgttacattccattctactctgtttaattccgttccattccattccaatccattccattccattccattccattccattccattccattggggtccattccattccattccattccattccattccattccgttccgttccgttccattccattcaaatccattccattgcattccataccattccattccattctattccattccattccattccattgcactcgagttgattccattccattccattccattccgttccgttccattccattccgttccattctattccattccattccattccattccattaaattccattccattccattgcattccattactttctaatcgggttgattctaatccattccattacattcaagtctttccattccatgccattcctctttggttgtttccattacgttgaattccattccattccattccattccattccattccattccattccattccattccattgcattccattccactcgggtcgtttccattccatttcattagtttccattccattccattccattccatttcactcaagttgattccgttccattccattgtattccattccagttgattccattgcattccattcctttccattcctatctattccattacattcccttacacttgggttgattccattccatttcaatccattccattccattcccttccgttccattccatagcattccactaaatttgattccataccattccattgcatttcattcctttcctttccattccaatccattccattccattccatttaaatcctttccattcctttccatttcattccattccattcctttcctctcgggttgattccattccattcctttccattctgttccattccattccgttccattccattccattccattccattccattccattccattccattgcattccactcggggtgattccattccattccattccattccattccattccattccattccattccattccattccatttcattccattccattgcattccatttgggttcatacctttccattccattccattgcattccatttgggttcatacctttccattccattccattccataccattccattccattccattccattccattcaggttgactccattccattccgttccattccattacattccattccattccgttgcattccactccattcctattcattacattccactcgggttgaatccattccattccattccaatgcattccatttttttcagttccactcggattcaatcaattccattccattccattccgttctgttccattccattccattccattccattccattccattccattctattgcatttcattccattccattctactcaggttgattccattccattccattccattccattccattccattccattccattccactcgggttgattcaattccgttcctttccattccattccattctattcctttccactcagggtgattccattccattccattccaatgcattccattccagttgataccattgcattgcattgtttccattccattccattccattccattcaattccattctactcggtttgattcatttccattccattccattccattcctctcgggttgattccattccattccatgcccttttattccattccattccattccattccattccattccattccattccattccattccatactattccaccaaagttgactgcatgctattccattccattccattccgttccattccatttcattccgttcctttccacttgggttgattcaattccattcaattccgttccgttccgttccgttccattccattccattccattccatttccttccattgcattccactggggttgattccattcctttccattcctttccattccattccattccattccattccatacccttcgggttgattcctttccattccattccattccataccattcccgtccattctgttccattccattcgggttgattctgttccattccatgcctttttattccattccattccattccatatcattccaccaaagttgattgaatgttattccattccattccataccattccaccaaagttgattgcatgttattccattccattccattccattccacccattccattcctttccactcgggttgattccattccattcaattccgttccgttctgttccattcctttccgttccattccattccgtttcattccattgcattccactcgggttgattccattactttccattccattccactacattcaattccatacccttcgggttgattcctttccattccattccattccattccattccataccattccactccattccgctccattccattcgggttgattccgttccattccatgcccttttattccattccattccattccgttccattccactccattccattccataccattccaccaaatttgattgcatgttattccattccattccattccattccattccattccattccattccattccactcggtttgattcttttccattccattccattccattcctctcgggttgattccattccattccatgcccttttattccattccattccatttcattccattccattccattccataccattccaccaaagttgactgcatgctattccattccattccattccattccattccattccattccattccattccattccattccgttcctttccacttgggttgattccattctattcaattccgttccgttccgttccattccattccattccattccattccatttccttccattgcattccactggggttgattccattcccttccattccattccattccattccattccattccattccatacccttcgggttgattcctttccattccattccattccataccattccactccattctgttccattccattcaggttgattctgttccattccatacccttttattccattccattccattccataccattccaccaagttgattgcatgttattccattccattccatccattccattcctttccactcgggttgattccattccattcaattatgttccgttccgttcctttccgttccattccattccgtttcattccgttgcattccactcgggttgattccattactttccattccattccattccattcaattccatacccttcgggttgattcctttccattccattccattccatacgattccactccattccactccattccattcgggttgattccgttccattccatgccattttattccattccattccattccgttccattccactccattccattccattccataccattccaccaaagttgattgcatgttattccattccattccattccattccattccattccattccattccattcaattcaattccattcctttccattccattcctttccactcgggttgtttccattccattcaattccgttccgttccattccgttccgttccattccattccattcattccattgcattccactcgggttgattccattccattgcattccattccattccattgcattccattccattccattccattccattccatacccttcgggttgattcctttctattccattccattccataccattccactccattccgttctattccattcgggttgattccattccattccgttccgttccatttcattccataccattccactatggttgatcccataccattccattccattgcattccattccattccattccactcgggttgattccattccattccattccaatccgttccattccattccattccattcctttccatttgattccattccattcaattccattccattccattcgggttgattccattccattcctttccattccattccattccattccattccattccattccattccactccaattgattccattccattccattccattccattccattccattccattcattccattccagttgattccattcgattccattccattccattccattccattccattccattccattccattccattccattccattcgactcgggttgattccaatccattccattccaatccattccatgccattccattccattccattccattctggttgattccattccgtagaatttctttccattccaatccattccattccgttccattccattccattccattctattccactcgagttaattccattcctttgaattccattgctttccattccattccattccattccttttcattctattacactcggttgtttccattccattcatttcttttccattccattccattcctttccattccagtcatgttgattccattcattccattcccttacattacgttccattccattccagttgattccattgcattccattccattccattccattctactcctttccattccactctggttgattccattccattccattccattccattccactccattccgttccactcgggttgattccattccattccattccattccattccattgcattccattccatttcactcgggttgatgccattctattccaatctattttattcctttccattccattccattccattccataccattccactcgggtggattccataacattccattctattccattgcattcctttccattccattccacttgtgttgattccattccattccattccattccattccattccattccattccattccattccattccattccattcgggttgattccattccattccattccatttcattccattccattccattccattacactccattccattccattccactccattccattccattccattccattccactccattccattccattccattccacccagattgattccattctattccattccattccgttccattccattccagttgattccaatgccttccattccattccattccactgcattccattccactccattccactcgggttgattccattccattccattccattccgttccactcgggttgattccattccattcctttccattgcatttcactcgggttgattccattccattccgttccattttattccattccattccattccatacctttccattccacacgggttaattccattccattccattccattgcattccattccattccattccattccattcaattgcattccattccattccattccattccattcgggttgatcc

SEQ ID NO: 635 - DNA, 2200 bp, Homo sapiens
  misc_feature (1)..(2200): DMR4:49489601
tctaatacaaaaccaatagcaaattttgaaatgcgtttacttgcaataaaatgttatctgtaatgcagcagattcttcaaatgtgaacccttaaattactcagaattttaagaacaaagttaaagctaccatgagtcataaaaatatattctttactatcatcatctttgccacagaatttttgtacttcattttacttttatttttctgataattcatttttgttcctccttaaatggcacaaagttatctcctagtaaaaagtgtctaacccccttccttcattatcattccccacagtatgtcaaaaaaagtttcagagatatcatattgagttatttaggccaaagtcaataaatgggtctaggaataagactttgaaagtgatattacactctatattaggcatggtggctcattcctgtaatcctagcactttaaaaagctgtggcagaaagatcacttgaggccaggaatttgagatcagccagagcaacatagtgagacccccatctctacaaaaaaaaaatgttttttaattacccgggcatggtggctcatgcctgtagacccagctagttgggatactgaggcaaaaggatggcttgtacccagagttcagggctgcagtgaattattatcactgcacttctgcctggatgacagacaaagaccctatctcaaaaaaaaacacaaaataatgaaatctatgattaaggattctgatgctataagcctttccttaaactgcaaatgtttcatgctaatttgaattgcattttaagaagtaatgattcttggggtaaagaccatagaatacggcacccagaaataaatccacatatttccagccaactgattttggacgaacatgccaagaacatacgctggggaaaggacagcctcttcaaatgaatgacactgggaaaactaaatatccatatggagaagaacgatattagcttcctatgtaacaccatataacaacataaactcagaatcgattgaagactgaaatgtaaggcccaaaattatcaaactactctaagtaaatatagggaaaatgcttgaggacattagtctgcacaaagatttttatgggtaagacatcagaagcataggcaaacaacaaatcatagacaaaagacactacattaagctaaagagcttctgtccagcaaacaactgagtgaagagaaaacctgtagaataggagaaaatattgtcaagctattcatctaataagggactaatatacaaaatatacaaaaaaactcaaacaacttcacagtaaaaaaaaatctgagtttaaaattgggcaaaatatctaactatacttttttttagaaaaagaaatacaaatagccaataaataaattttaaaatgctcagtatcactaatcctcagggaaatacaaatcaaatctacaatgtgatataatcttgcttcaatttgaataaattgctgtcattgaaaagacaaaaaaaaaaacaaatgctggtgaggctccagagaacagtaaactcttacatgctgttggtgggaaggtaaattagtgcagccacaatagagaacaacaggaggttttctcaaaaaaactaataatgggactgccgagggatccagcaacctcactaccgggcattcaggcaatagaaaagaaaacaatagatcaaaaggatatctgtcctcatatgtttactgtagcactatccacaacagcttgtgtatggaatcaacctacatgtccatcaccaaatgaatggacgaaaaactgtggcacacaaacacagtggaatactattcaccgtataaaggaattaaatcctgttattcgtggccacgtggatcagtctgacggatgttatgttaagtgcagacacagaaagataaatactgcacattcttactcatgtaagggagctaaaggaaaattgaaggctgggcaatattgctgatgcctgtaatttcctagctctttgtaagaccaaggcaagagaatcatttgagaccaaaagttccagagctccctgggcaacatggggagatatctccacaaagtcaaaaatcagacatgtgcaatggtgcatgcccataatgacagctgctcaggaggctgaggtgtgaggatcagatgggcccaagagtttgaagctgcagtgaactatgatcaaaccactgtctccagtctgggtgact

SEQ ID NO: 636 - DNA, 1100 bp, Homo sapiens
  misc_feature (1)..(1100): DMR4:50262401
aggtggatatttggatagattttaagatttcgttggaaacgggaatgtcttcatataaactcaagacagatgcattctcagaaacttctctgtgatgtttgcattccactcatagagttgaaaacttcctttcatagagcaggtttgaaacactctttttgtaatatttggaaggggacatttgcagagctttgaggcctatggtgaaaaaggaaatatcttctcataaaaaccagaaacaagcattctcagaaacttctttttgatgtgtgtactcaagtaacagagttgaaccttccttttgacacagcagttttgaaacaatctttttgtagaatctgcaagtggatatttggatagctttgaggatttcgttggaaacgggatatcttcatataaaatctagacagaagcattctcagaaacttctttgtgctgtatgacctcaatttacagagttgaaccattgcttgcatacagcattttggaaacattccttgagtagaatctgcaagttgatatttagatagatttgaagatttcgttcgaaaacggaatatctccatataaaatctagagggaagcattctcagaaactgctttgtgatgtttccattcaagtcacagagttgaatattcccttttatagagcacgtttgaaacactctttctgcactatctggaagtggacatttcgagcactttgaggcctatggtgaaaaaggaaatatcttcccataaaaactagacagaagcattctcagaaacttgtttgtgatgtgtgtattcaactaacagagttgaacttttgtttttacagagccgttttaaaacactctttttgtggaatcagaaagtggatattcggatggctctgaggatttcgttggaagcgggattacatataaaatctagagagaagcattctcaggaacttctttgtgatgtttgcattgaagtcacagaattgaacattcactttgatagagcaggtttgaaacactcattctgtaggatctggaagtggacatttcaagcgctttcaggcctatggtgagaaaggaaatatcttcgaataaaaactagacagaagcattctc

SEQ ID NO: 637 - DNA, 900 bp, Homo sapiens
  misc_feature (1)..(900): DMR4:50783301
ttctcttttatagagcacgtttgaaacactctttctgcactatctggaagtggacatttcgagcgctttgaggcctatggtgaaaaaggaaatatcttcccataaaaactagacagaagcattctcagaaacttgtttgtgatgtgtgtattcaactaagagacttgaacttttgtttttacagagcagttttaaaacaatctttttgtggaatcagaaagtggattttcggatggctttgaggatttcgttggaagcgggattacatataaaatctagagagaagcattctcaggaacttctttctgatgtttgcattgaagtcacggaattgaacattcactttgatagagcaggtttgaaacactcattctgtagtatctggaagtggacatttcaagcgctttcaggcctatggtgagaaaggaaatatcttcgaataaaaactagacagaagcatcctcagaaacttatttgtgatgtgtgtcctcaactaacagagttgaaactttgttttgatacagcattttggaaacactctttttgtagaatctgcaggtggatatttggatagcttagagggattcgttggaaaggggatatcttcatataaaatctagacagaagcattctcagaaacttatttgtgatgtgtgtcctcaactaacagagttgaaccttggttttgatacagcattttggaaacactccttttgtagaatctgcaggtggatatgtggatagctctgaagatttcgttggaaacgggaatttcttcatataaaatcaaacagaagcattctcagaaacttctcagtgatgtttgcattcagctcatggagttgaacacttcctttcatagagcaggtttgaaacactctttctgcactacctggaaga

SEQ ID NO: 638 - DNA, 1200 bp, Homo sapiens
  misc_feature (1)..(1200): DMR4:51638501
tttgtgctgtatgacctcaattaacagagttgaaccattgcttgcatacagcattttggaaacattccttgagtagaatctgcaagttgatatttagatagatttgaagatttcgttcgaaaacggaatatctccgatataaaatctagagggaagcattgtcagaaactgctttgtgatgtttgcattcaagtcacagagttaaatattcttttacagagcaggtttgaaacactctttctgcactccctggaagtggagatttcgagcgctttgaggcctatggtgaaaaaggaaatatcttcccataaaaactagacggaagccttctcagaaacttgtttgagatgtgtgtattcaactaagagcgttgaacatttctttttacagagcagttttaaaacactctttttgtggaatctgaaagtggataattggatagctttgtggatttcgttggaaacgggatgacgtataaaatctagagagaagcattctcaggaacttctttctgatgtttgcattcaagtcacagaattgaacattccttttcagagtgcaggtttgaaacacactctttctgtagtatctggaagtggacatttcaagcgctttcaggcctacggggagaaaggaaatatcttcaaataaaaactagacagaaggcttctcagaaacttatttgtgatgtgtgtcctaaacgaacacagttgaacctttgttttgatacagcattttggaaacactccttttgtagaatctgcaggtggatatttggatagattttaagatttctttggaaacgggaatttcttcatataaactcaagacagatgcattctcagaaacttctctgtgatgtttacattccactcatagagttgaaaacttcctttcatagagcaggtttgaaacactctttctgtaatatttgaaagtggacatttgcagcgctttgaggcctatggtgaaataggaaatatcttctcataaaaaccagaaacgagcattctcagaaacttctttttgatgtgtgtactcaagtaacagagttgaaccttcctattgacacagcagttttgaaacaatctttttgtagaatctgcaagtagatatttggatagctttgaggagttcgttggaaacgggatatcttcatataaaatccagacaggagcattctcagaaacttctttgtgc

SEQ ID NO: 639 - DNA, 300 bp, Homo sapiens
  misc_feature (1)..(300): DMR4:51687901
acacaatctttttgtggaatcacaaagtggatattcggatggctttgaggatttcgttggaagcgggattacatataaaatctagagagaagcattctcaggaacttctttgtgatgtttgcattgaagtcacagaattcaacattcactttgatagagcaggtttgaaacactcattctgtagtatctggaagtggacatttcaagcgctttcaggcctatggtgagaaaggaaatatcttcgaataaaaactagacagaagcatcctcaaacttatttgtgatgtgtgtcctcaacta

SEQ ID NO: 640 - DNA, 200 bp, Homo sapiens
  misc_feature (1)..(200): DMR4:52463501
gaatcaatatcatgaaaatgaccatactgcccaagataatttatagattcaatgccatccccatcaagctaccaatgactttcttcacagaactggaaaaaactactttaaagttcatatggaaccaaaaaagagcccgcattgccaagtcaatcctaagctgaaagaacaaagctggaggcatcatgctacctgacttc

SEQ ID NO: 641 - DNA, 200 bp, Homo sapiens
  misc_feature (1)..(200): DMR4:53707601
tcagttggcttgtagatggctgacctcttgctgcctctttgaggtcatccctctgtgcacaccagccctggcatctttctcttcttataaggacacagtcatattggattaatgccccaccctaatgacctcagcgtaatcacttccttagaccttttctccaagtatggttacattctggaatatgccggctggggagg

SEQ ID NO: 642 - DNA, 1300 bp, Homo sapiens
  misc_feature (1)..(1300): DMR4:53924201
gtaaaggtgggttttgataaaggtgggagtgtgcactagacttgcagaggatcacacttggatttcaacaggatggggtagaaagataagagcaatgaattgtactccttgtttttttaaaaacgaaccaaagatagagagagacacatgacagtgtcaaaaaaaaaaactctccttttttattctaaaatcctgttttcttattgagtcaattgcagaggtccctctgtgacactccagaatataacccctccctgcctggaggccttgctcaggataacttttcccgtctgcctgtggctcagaggtggttggagccaggctgaatggagggcaggcaggcagctctgctgattcttttccacttgaaagggggcttggggactgagacagccatcatcccttgccacctccactgagccagtctgttgcgggtggagactgaacttggactggctgaggacctgggtctccctacactggccaaaccccacaagcctctcacagcctgcagccatcccagcgtgtctctgagcactctcattccctccaccctgccccacacctccatctttcagtgtctttgtcctgccatgcaccgttccctctgctagaaatgtccttctcatcctttaacccgtaatatctgcgtatccttccagacaaaacttcagccttatcttctcccagccatctctccgaatgccccagggcagaagtagcacacttttgtacttccctctcagagtgctcaggacacagtccagtattaagtaatgcacacagtgcttctcccagtaaagtttgagttcctggagggctggagacatgtttgatttatctttgtcatttctaggacatgagaggctctcaataaatgtggaatgaattgataactgactaaataaatgacaccagtctgaaattcctaactaaagttacttagagatcatttttcccaacctggttctccccttcacttgctgtgtggcctttggcaagttacttaacctctctgtgcctccatttcttcatctgtaaaatgcagctaatagtagaaggatatatctactttatagggtggcatgagcatcatctgttagtgtaggtaaagtacttagataagtacctggcaaataataagcactcggtaaatgtcagagtttacatgcacatgcccagagatgcatctgactcaccccacctctgtccccacccacactgctgtgagggttggctgctgatggctctacctgcagcctttctttggagaattactctcagccaaagggagcagcct

SEQ ID NO: 643 - DNA, 200 bp, Homo sapiens
  misc_feature (1)..(200): DMR4:56463901
agtaaagaagactgccttcacccatgtgggtgagcgtcatctaatccattgagggcctgaatagaacaaaaaaggggaagaagggtgaactgctgggacatccatttcgtgcccccagatgttggtgctcctggtcctcaggccttcagactaggacttaacgttattgcctcccctgattctcaagccctcgggtttgg

SEQ ID NO: 644 - DNA, 2100 bp, Homo sapiens
  misc_feature (1)..(2100): DMR4:57188501
gaatattttttctcttggctcttgcaaggcatgtttcttttcatccgtcaggtctcagtttgaatgtcagaaaagcctctcctgattatcttatctaaagatgctcccttctccaccctcactttctattctagtgattcctcagccttagcacagattagaatcacctggcaggcctgataaaacaaaggttgctggggcccatggccagagtttttgattcagcaggtttggaagcagcatgaagttctgtgttttaccaagttctcagttgatgctgatgctgccaggatgggcatcactcttggagaaacactgctctgagtgttttctttcaacacctgacattattttccccctttgctgatttgctttctgtctcccatagagctgaaagttccacacgagcagagatagtgatgctcctattttctgattcatctacggtactaagaacagtgccttatataaaagaagtttaatgattatttgatgaatgaatgaatgaaccattttctatttttttgttttgtattgtaacaaagggtttgcttaccaaattactgttgaactgaggtgccagaaccaagttatagagattggctttcatcactaagatatgtttgtggaagagtagttgtcttaatttaataaaccacaacaatatttgaccagtaacttgaataaagacaagtgcctactgcggcctacactttccattagcacgccttcctgcttagggtcaatgtcattaaccaacagttggttagatgacatcagggctttaggtgctattgacaggtctcaagaagatatgagttttgccaagactggtagctatgatgagcattcagaagacatatatggcaagtggggtgagggaagggcttgtgctttggctttaagcatgcctcatggatgaagcagcttgggtaaaggaagggagagagaggaagcagggagaatccttcctccaagctaggttataggcagtgctctcacatccctggtcttggcaggtcctaactccaggcctcctgatgcccatattctgttccaaagaccacagtccaggctttagggcatagcctcaggctctcctacccactaaccctctaggttctgtttgtttccccccttctactctcttctatgccattcctctaggcttttaccttgccatgtgacaggcttatgtggtaaactaatgggtcctaatgactgccacacacacacacacacacacacacacacacacacacacccctatatataaggccacatgcggtggttcacgcctgtaatcccagcactttgtgaggccgaggcgagtggattgcttgagctcaggagcttgagaccagcctgggcaacatagtgaatccctgtctctacaaaaaagttcaaaaattagccaggcatggcggcgctcacatgtagtcccagctacttgggagtctgaggcaggaggattgcttgagtccaggaggtcgaggctgtagtgagccatgttcatggcctgggtgacaaagtgagaccctgtctcaaaaaaatatttatatatccatatgtatctccttggggtgtgtgtgtgtagtgagacacaatatggcatagtgcctaaaagcatatactctgaagccaatcctatgtttgaatcttttttctgctaaatactgtgtgtccctgagaaagttgcttacccattctgttcttcatattacggggttaacaacagcactaaatcatagggttgttgtagatataaaagcgataataattgtaaagggtttagttcctgtgccttgtagctaccaggataataggcctaatagacagcaccctatggaaacagctttccattttaacaagggactttggtaaacacatgcgctgagtacaacactcttggaagatcagatatttgatggcattcagatgacagcatgtgagcagatgcctattctgtctgggtgttaggggacagagcactaggtgacttggctgctgtctctgatcttaaaaattgctcagaccctggcaattgaggataagacaataatagcaatgttgtattcaggagcgttgctttaaataatc

SEQ ID NO: 645 - DNA, 1500 bp, Homo sapiens
  misc_feature (1)..(1500): DMR4:58680201
ttttcccttcttacgcctaggtttttttttttttttttttttctaagaacctctaatccaaatctttccacagtaatgaatcaagtcttttatgtgtgaaacttctaggaaaatttcagatagggtgaataaagtagtgccgggaactttagcctcaaatatggctccatggtatgagtatttgaaattaaaagcacttggagatcaacagactttggcagaatcttttcccctatctacataaagaccagaggaactcaccaaggaagacacttgtttttttcttcctttcccttttatttcattatctattgcacaaaagaaggcaggaatagaatgacacctggacagatcttttcacaagataatgtccgtttcaaactcattcaatttctaaagagaacaatttacaagttaaactccatttctagatgctttcattctctctggtaataatttatttcctctccacagaattacctatgttctgcattccttccctcccctctgaaataagaatatataatttgggacccattgggatattgactaattactctatgaatctctctcatgtacacattaataaatttgtatgccattcttcattttaaactacctttgacagttgatttttcaatgaactttatgaggataaaggagttttttcccttggcccctacatgagcaaaatgaatttatcaaagtaattaaaaaaaacacagaaatcaaagaatacaacagtacggtgattatattaactttcactttaagacaacttctatacacaatagtatttgtactattcattctgttaactttattattcatctttttaaagcaattattgatgttaaaattggtgggatgaaataattgatgttaaaattggtgggatgaaataacaagaaaatgtctattttttttttttctgaagcccaaagagacctggtaatgagaggcaatgccatatttctcaggttactgaaaaaataaaattgagccatatgcttgtgcttttgttatgagttatatttatgagatatgcatagtgaaatttttcaaactattagaaaacacttgcttattatccatttaatgttttctatgctcctgtctcccattagagaagattcaaaaatgcaagaaaaaactagcagagtgacaatatattttatagacaaaaatcttcaaaaggaaagaaaaaatattgagggaaactcaatccatgacaaccatgccaagataatcacatttcaacaaccattattaaaatactttatgtcagaattattctgctttttaacagttgattacactgagcctagcttacagggttacttgactttattacacacaaggttttttataatgattgtttcattgtcagatcattgttatttctggatagaataagttttctgctatggaagtgatttggtggcctacaattataaacctgcctcaactgattttgttagcagtgatgaatccgtatgg

SEQ ID NO: 646 - DNA, 200 bp, Homo sapiens
  misc_feature (1)..(200): DMR4:60509901
tatgaaaagggagaggatacaaataaataaaatcagaaatgaaaaggagacattacaacggataccacagaaatcaaaagaagcattagtgactagtataagcaaatatatggcaatactttggaaaatctggaagaaattgacaaattcctagaacatacaatctaccaagattgaacgagaaagaaatccaaaaccag

SEQ ID NO: 647 - DNA, 1500 bp, Homo sapiens
  misc_feature (1)..(1500): DMR4:63729801
atctcctttgtattttgaatttttgcgtatcaatttatatctttttatatctatctcttaagaaattgctatagttataatttttatagtgttgtcgtttagtcttcatactaaagatactaaagtaccatactgaagtaatggtagtttatcattacggtatcagagtattctaaatttgcgtacttactcttaccagtgagttttacagatgatgatgatgataatatcttgctttatgtaagaatcttttatcttttcagactgaagaactccctttagcatttcttataagagaagtctggtggtgataaatttgctcagcttttgtttgtttgggaaagtctttatttatgttgaaagatagcttttcttgatacagtaaagcttttggaagtttttatttttcttgttctttttttttttttttttcatcagcactttgcatgtgttatcccattcccttctggcctgtaaagtttctgttgcaaagtctgttgtcagatgtatcagagctcctttaaatgttcttttcttcttttctatgctgcttttagaatactctttttgtcatcagcctttgcaagtttaatatattatatgcctttgagtagtcttatttgagttgaatttgcttggtgatttttgaactatctgtacctggatattaatgatttctctagtattaaaaaggtcagtgttattgtttctttgaataaactttctattcctatctctctgcccccattttaagaacaatgacttatatttgcccatctgcttctattttctaaatctcccaaacattgttcattttctattcttttcttttttttccctcacctctgagtgtgtattttaaaataacctgtcttaaagctcactgactctttctttctcttgattgattacgcagttgagacactgtgatgcatttttcagttcataaattatatgttttaccttcaagatttctttttttcgatttctggagaggtcacacatctacatcactccagtgtcactcactagtgccttatttagtccttatttggtgaggtcatattttcctgaatgttcttgatgattatggatgtttgttgacaagtctgctaaataaagaattagttattttttctgatcttcacagcctctctttgtttgtacccagcctttccaaagggctttcaaaaaattcaaagggaattgactgttgcattccctgtctgtgatcattacagccagtttagcacttaagggcacctaacatccaattatgctctgacccttttgaatactcttagatactcagacctgatgtacttgagggtgatcagggagaattccctgtgttcccaggaaaaactcacacttatttccctctttgccccaccctctaaccaattggagagagtttctctccttcccagcaatgtattaaaaggacaatacatccatgggccaagtggttgaatatttatcatttgatattcaattatt

SEQ ID NO: 648 - DNA, 300 bp, Homo sapiens
  misc_feature (1)..(300): DMR4:66893101
atataatggataaagaatatttttattgatatgataatatcaaaatgcatttgcttattattgtaaactaagaaaggcagatttatattagaaatttgtccaaggtatctagaaacctagccgtggtagggggacattctcttaatggaatatgaattcacttatacttttaaaaaatacatatatgtagtttgacgggaaatgtctgaagaaagagaaatttcaatatcacaaacattcatttttctatcttctcaccatagcaacttgacaaaacacctgccctgttttcaatcatga

SEQ ID NO: 649 - DNA, 300 bp, Homo sapiens
  misc_feature (1)..(300): DMR4:68913701
ttattctaagtgaagtaattcaggattaggtaaccaaatattttaacttctcacttacaagtgggagctaagctatgaaaatgcaaaggcataagaataatacaatggactctcaggactcagggaagggtcagagtgagaagagggataaaagactacacgttgggtgctgtgtacactgctcgggtaatgggtgtgccaaaatttcagaaatcacaactaaggaatttatccatctaatcaaacaccacctgttccctaaagtctcttgaaataatttaaaatgtaagaataaaatcg

SEQ ID NO: 650 - DNA, 300 bp, Homo sapiens
  misc_feature (1)..(300): DMR4:70121301
ataatatattcaaatggtcaacaatcaaagacaaacagaggatcctgaaagcagcaagaaaaaagaggcaagaaacgtaaaagagagtcatagtatgcctagaagcagacgtctcaacagaaatcttacaggacaggagagagaaataatatattcaatttgctgaaagaaaaaaacccgccaaccaataatattgtaccaaggaaaggtgtcctttagaaattaaggagaaataaatattttcccagacaaacaaaagctgatcatcactagctctgctttaaaaaaaaatgctaaaga

SEQ ID NO: 651 - DNA, 1100 bp, Homo sapiens
  misc_feature (1)..(1100): DMR4:70763601
actggtagaaaagcttgttccagaagccgcagagataacagcaagtgttaaagatcttccaggacttaagtaagtctaaggttgaattccatttctcaggaacagcattcttattaactatcccttgaagagcaagactaaagacaattatgtacgaataatttattttataacaatccaaaatgcatgatgtcatgaataggtgctgacaggagagaattggtatacagaatattgagaaaaatgtgctcttgagggataattattcatctaagagagattgtctttttgttgaaatgccaaacatttgcttattttttaaagcacttgggagaatcatatctaagggggtggcatgctgtacttgacttagggaaaaaaggtattcagtgggtttgagagtcaagattaaaacagctgtcaaattaacctgaagagctagtgactgtagcctgccttagaactataaagtagtgaccaccttcccaaatgagactggtttaattttaatcagacagaggcctagattgcctgtgtccacattcatgctttggacatttatataatccacactgaatttataaggatttgctattattgatctgatggaacatttttagttgggtctcccagaggctgtgtcttcaaattgtagttacattcagtaattctttttgaaagcatttgttccgggtcacattagcccacacacaaaaattccttgcatgggaatgtactgggagaggtcctgaggagcacctcagtgtgcttgttacactggaataccattagcaagaataagtgaactgattctactgtagcctttgcttctggtgcttatgttttcagttgtttgatttctgtgtttttgtaggacaccagtaggtagaggaagagcctggcttcgtttggcattaatgcaaaagaaactttcagaatatatgaaagctttgatcaataagaaagaacttctcaggtatgaacaccttcttgaactttcttctttccttggtatgttctacatcgtataaagtcaaaccatataagttcactatttttgtagatcagaaacatttgattcataacagcttcactgatac

SEQ ID NO: 652 - DNA, 1500 bp, Homo sapiens
  misc_feature (1)..(1500): DMR4:73049501
tcactcctgttgtccaggctggaatgcaatgcagttggagttacctggttcactgcaatctctgcctcccaggttcaattgattctcctacatcagcttcctgagtagctggaattacaggcatgtgccaccacacctggcttatttttgtatttttagtagagatggtgtttcaccattttggccaggctggtctcgaactcctgacctcaagtaatccacccacctcagcctcccaaagtgctgggattacaggcagtgagccactgcaccctgccaaccttgtggttcctatggatgtatatcaaccaggatcaaaatgcttttatacgtagtgtttttttttttttttctctgagacattgtctcactcttttgcccaggctggagtgcagtggcatgattttggctcaatgcaacctctgccactcggattcaagcaattctcctacctcagcctcccaagtagctgggattataggcacgtgccaccatgcctggctaatttttgtatttttagtagagacgaggtttcaccatgttggccaggatggtctccatctcttgacctcgtgatccgcccgcctcggcctcccaaagtgctgggattacaggtgtaagccaccgcacccggccttatatatagttcttaattgggattgtggagggacttagttgaaacagatatgaaggctaggctttctgagcatggggatagagaactgtggagaaagaggatcctcttttggtggaactaatccttttccttaggggcaatctctaaagccagattaaaaaattagtttatcaaaattttggctttgggttgatcctaatttccacaatcttaaaagaaaattttcaaaaagatgtaaaatatctccaatagatttcttcaatatctttctcttggtggtaataagcagcgcaaactaatatacctactaaacataattatttactaaaagttttttaaaaatgcattattaacagcaatataattactacataaagttcaaaatttctaataattccttttgcttttggattgtattccactaatggttttcagtggttggttcagctattggttgttcacgagtcacccaatagctccctctctgtggctgttagtccttacctgatgaacagtttagttcagtttcagtttgctttattcgttggcatcctagcagctgtcatttagaagctcttacaacattatggctttcaggtgtggagagaggagggtctactctattttgagatgataaaaagcactcaaataggcccagtgcggtggctaacgcctgtaatcccagcactttggggggggccaacgtgggcagatcacttgaggtcaggagtttgagaccagcctggccaaatggcggaaccccgtctctactaaaaatacaaaaattagctgggcatggtggtgcatgcctgtggtctcagctacacaggaggctgaggcaggagaatcgcttgaacctggga

SEQ ID NO: 653 - DNA, 900 bp, Homo sapiens
  misc_feature (1)..(900): DMR4:73529801
tcatagttttctttcggtttcaaactaatttaaaccccaaaaaccagtattcatgcacagacttattatattccattacctagcatttctaaagaatgactttttttttttttttttttttacagaggtgagctttttagataacttacactattttaagttacaaggttttcataatcttaatttttttcagtggaaattttttgctaaatgtgtaatatgcacctataatgctaagcataagcagatgctcataagctagggattcctttttcttcctcattttgtgatgtttatagccttgctgctgccagggtgtctgtacctagtggcgtttgctcctttctcagagaaaattacataatagattgcataaacattctatctatgatcagataatgtgatctatgagggaaagcctcagagaatctcttatgaagaagtgaatacatttgcttgtttttgattttgaatgagtatgatacaacaaaataataataaattataaaatataattaaattttatttaataatattcattaaataaaaatattattatcatgccagttttatggtttgaatatcacctttgcatgcattttctaacttgtttttgaaaacctcactgtaaggtacagttactcatagtaaaaacaatatgtgatcaatataatgtttttaataaaaatatggagttgttctaaactttcgtttatttatttatttctttttgagacagagtctggctctatcgtccaggctggagtgcagtgacatgatcttggctcactgcaacctctgcctccctggttcaagtgattctcctgcctcagcctcctgagtagttgggattacaggcatgcaccacaatgcccaggtatttttgtttttttttttttt

SEQ ID NO: 654 - DNA, 100 bp, Homo sapiens
  misc_feature (1)..(100): DMR4:74386601
tctaaacagttatttctgtttcctatttaatacagctgaagtcaaaatatgtaagaacacattttaaatactctacttacagttggccctctgtggttag

SEQ ID NO: 655 - DNA, 2900 bp, Homo sapiens
  misc_feature (1)..(2900): DMR4:78306401
tgttggcctgccttgctagattggggaagttctcctggataatatcctgcagagtgttttccaacttggttccattctccacatcactttcaggtacaccaatcagacgtagatttggtcttttcacatagtcccatatttcttggaggctttgctcatttctttttattcttttttctctaaacttcccttctcgcttcatttcattcatttcatcttccatcgctgataccctttcttccagttgatcgcatcggctcctgaggcttctgcattcttcacgtagttctcgagccttggttttcagctccatcagctcctttaagcacttctctgtattggttattctagttatacattcttctaaatttttttttcaaagttttcaacttctttgcgtttggtttgaatgtcctcctgtagcttggagtaatttgattgtctgaagccttcttctttcagctcgtcaaagtcattctccatccagctttgttccgttgctggtgaggaactgcgttcctttggaggaggagaggcactctgctttttagagtttccagtttttctgctctgttttttccccatcttcgtggttttatctacttttggtctttgatgatggtgatgaacagatgggtttttggtgtggatgtcctttctgtttgttagttttccttctaacagacaggaccctcagcttcaggtctgttggagtacccggcactgtgaggtgtcagtctgcccctgctggggggtgcctcctagttaggctgctcgggggtcagaggtcagggacccacttgaggaggcagtctgccagttttcagatctcaagctgcgtgctgggagaaccactgctgtcttcaaagctgtcagacagggacatttaagtctgcagaggttattgctgtcttttgtttgtctgtgccctgcccccagaggtggagcctatagaggcaggcaggcctccttgaactgtggtggggtccacccagttggagcttcctggctgctttgtttacctaagcaagcctgggcaatggcgggcgcccctcccccagccttgctgccgccttgcagtttgatctcagctagcaatcagcgagactccgtgggcgtaggactctccgagccaggtgccggatttaatctcctggtgcgccgttttttaagcccgtcggaaaagcgcagtattcgggtgggagtgacccgattttccaggtgccgtctgtcacccctgtctttcactaggaaggggaactccctgaccccttgcgcttcccaggtgaggcaatgcctcgccctgcttcggctggcgcatggtgcatgcacccactgacctgcgcccactgtctggcattccttagtgagatcaacccggtacctcagatggaaatgcagaaatcacccgtcttctgcgttgctcacgttgggagctgtaggccggagctgttcctattcggccatcttggctcctccccctagaaacggtttcttgaagaagagggtgttgtgtttgtcctgaggtgtacatgtgtcaatagcagtttaggaactaaggaaccaactgacatcctccttgtgtattctaaaatatttaaaagaaaaatgatgaccagtcctttctgccgtagattactcactgattttgctattcgtctgcagtctgccatgagtcctgtgcaggttgctggggcccaacggagaagcactgcttggcctgcagagatcccctccacgtgctgagagatggcggctgtgagagcagctgtggaaaaggcttctacaacaggcagggcacctgtagcggtgagtgctgggttgcgatgctgacgtgtcctttcctttttcttttccagcatctcttgttgtattcaaatcatagcacattaccaatgtttcttttactcaacatatatgtgaatagctgctgagattaatctttgatttagatgtgcataacacactttccatcagtggtattcctcttaattgccccaccagtctgctagggttggggtgctcattctagccttgtcccgcagatgaagatagtgaggcccaggtggcctgctcaagacccacagctggagggaaaggagctgggctcccacccaggctttcctttccccagatcccaaactctctaccaacaccagactgccttccaaatgtacatggggacaaagagactattaggccagctgagggcagacccgcctttggtgttggtgccactgacttaaagctgagcagttattatccattctaccttaacacccatggccataacaatgagagttaacccagcttagcacttccttgaaccaggcacggttccaagtgctttataaatattaacccactgagaggcagaaaagtcaggaggaaaagcatggctttcggcacattagtcaatctctgtgcatgtcaattcccacttgtgaaacggggataatagtagcacctgtggaagacacaataatgggctcccaatgatgcccttgtcctaatccgtggaactgtcatgtgttcccttgaatggcaaagaggactctgtaggtgtgattaagttaaggatcttgatgtgaggatattatcctggattatctgggtaagccccatgcaatcaatcacaagagtccttatatgagggaggcaacagagtcgagtcagaaaagtagaatcgaggatggaccagaggtcggagtgatagagtgaagcaaggaaaatgccataagcatgcaggtgacttttagaatctgggaaaaggcaaggaaacagattccacccctggagcgtccaggcaaggaacagattctacccctaaagcttccagaaggaactttgattctagaacttctaacttctagaactataagatgataagtctgtgttgt

SEQ ID NO: 656 - DNA, 500 bp, Homo sapiens
  misc_feature (1)..(500): DMR4:78942601
ccactgcactccagcctgggtgacagagcgagactccgtctcaaaaaaaaaaaaaaaaaaccctaaaaatgggaactgctttggtcttcagcagtgtacccatgaaaccttttgcaaaatgacttctggatttatttcaacaatttatggcctttttcagttctccctagtccatttacatgacttaactttccagttatgcactctaacaacaagcactaaaaaaacacttataaaattcacaaacaaatatgaaaaggtagatatagcaacaatccatgcctgagtcctagagtgagaaagagatctataggtaaaaaaacaaaataatagaaatggaaagagctcttctattcaaatctgtaagacaatggaagcaggagcaacactgctttgggacacctctaacagagggtaacacaaaggtgagagggcgcatttccccacagataacaatgacattgtggcactttgagggctctggctgtttagtcatggtg

SEQ ID NO: 657 - DNA, 2300 bp, Homo sapiens
  misc_feature (1)..(2300): DMR4:79770901
atgaaaaggaaaaaatcacatcatcatcttagtagatgtagaaaaatatttgacaaagtttaacactaattcacgattactaaaattctcaagaaaatagttgtagaagaaattaccttaacacaatatagactataaatgaaaagctcatagatgacatcataattaaagaagataaactgaaaactttcccactaaggtccagtacaatacacagatgaccactctttcaacttcttttcaacataatactggaagtcctaggcagaacaattggacaagaaaaaaaaaggcatctaaatcagaaagaacaaagtaagattatatctgtttgctgatgacatgatcctctatgtagaaaaccctaaagaatcaactacatcaacaacaacgataacaagaaaacagaactaaaatttagaaagttgcaggatacaaaatcaacaaataaaaattagtagtgttaatcctatacacagagaatattgtgtaggctttcctgaaaaggatattaagaaaacaatatctcttgggggatacaaaaaataggaggcaagactaacttgtagctcccacttggacagacagaacagtgtgtggggactcacacagtgaacttttgatccaaaaattactgcaggaacataccaagaaaactgaaataatacacaggccttgtgaaagaaatggcttgccattgcaaactccataagacagctgaaaaactcagctgcagcaggccccacccaaggagagtctgagctcagacacacctagccctgcctcaacttgatggtctttttctacccaccctggtaggtgatgacaaaatacataatttcttgggagctctatgaccccatccattgcttgagaaacccaaatacttaacacaggccatgttagggcaagcttgaatccccccatactaccacagctgaggctctctggaaagcgcaacctcctggctggaggtcaaccaacacaagccattaaaggaactcataaaataataactccactccaagaaaggagaaagcaacagctaattcctctgccggtaacatcctggctaatcagaggtcctgagtctgtccatgtgacaacttaattgctagtgcaaccagcatttgagaaaaccagtgcactgaacaaaactgtaaccaagggctcttgcagagtccacttgactcccctgctacctgcaccgtatcaggtgctggtactcatggctggcagacttgaagatggattacatcacaggactcttagcagacactccccagtaccatccaagagcccagtagcttccctgggtgactagacccaggagagcaataacaatgcagtctggttctcaggaagccccatccctagggaaagggggagggcaccacatcaagggatcaccccatgggacaaaagaatgaaaagcagcccttgagctttgattttccctctgacatagtctacttgaataagaaggaaccagaaaaacagttttggtaatatgataaagcaagtttctttaactccctcaaaagattactttagcccactcataatgaatttgaaacaaggagaaatttctgaagtaccagaaaaagaatttggaaggctgattttttaagttactcaaggaggcctcagagaaaggtgaaaaacaacttaaagaaattttaaaaaacttcaggatatgtatgaaaatctccacagaaaatttctagaaacagcataaatgaaaaacaatcacaactcctggaaatgaaagacatacttagagaaatgcaaaatacactggaaagtttcaacagtataatttaacaaggagaagaaagaacattagaacttgaagacaaggcttttgaattaacccaatctgacaaagacaaagaaaaaaatcaaaacaaatgaacacagcctaaaataaatttgggattatgttaaatagccaaccctaagaataattggtgtttccaaggaagaagagacatctaaaagtttagaaaccttatttgggaataattgatgaaaacttccctggccttgctggagatctaaacatccaaatacaagaagctcaaagaacacctgggaaattcatcgcaaaagtatcatcgcctaggcacatagtcatcaggttatctacagtcaagacaaagaaaagaatattaagagctgtgaggcaaaagcatcaggtaacctataaaggaaaacctatcagattaagagcagatttcccagcaggaaaactataagctagaagggattgcggtcctatctttagcctcttaaacaaa

SEQ ID NO: 658 - DNA, 900 bp, Homo sapiens
  misc_feature (1)..(900): DMR4:82732501
cttgcatctccctctcgtggaaacaggcctacccatcacatcagatcctgctgaaagcaggcgtcctgtccaaggttggttaccaccttgtgccttgagttgctggggacaggctccggctacctcccaccctgaggtagaataagcgggttgggtaataaatgaatacaaattacagtattcattgaaaggagtcaatgagaggttctggggaagctcctttcactggttattgatagccatgcaagctggccactctgggtactaaagacagaaagtgaaaataacccagggacagagctcagggaaagaaacggaatgtggggtgctaagaaaggaagaacttccagatcctccacctcagtggttctcaaagtgtgattcccaggcaggaagcattggcaccacctggaacttgctagaaatgttatttttgtcactaccagtctagtagaaagaggaggtggagtggttcccaaattaatgatgatgctgatgataatggctaacattcatggaccagccactgtcctagggactttattaacacagttaatcatcacaacaaccctatgaggggttaagcgctattcatattcctggaattttatgaactagggaactgagaagcaaagaggttaagtaactgggcgtactcacagagtaaatgacaggacgacaggaaaacaggtcaggctctccacgcacacgccccacacaccaccagcatgcactcccacacctcactcttcactctagctttggtctctttcacatcagccccctccccagagcacaggcaagctagctctggtgccctgttacgatgcacagagcacagtggcccacagcctgcactctgggccaactgcttgggtgtgaagcttgcttctcccatgt

SEQ ID NO: 659 - DNA, 1200 bp, Homo sapiens
  misc_feature (1)..(1200): DMR4:83040301
actccagtcagtatttgacgttttggttgttgcgattgtctgttgcttttgttgattctagagagaaatttcattacctgagggtgctaacagtgtataatcaaggcttcagaatttttttggtttacctgggtggtcttgggatagaatttgtaaccttacttccaaagtgtgtgtctcctcctttggcagaatatggaacttccattcccatttgtgcagctctattagtctgccagaaatggcagcttgcttctcagtgcttccagcagattcgcagtgagcccaccttctcctccctacaagaagtgccactctacctctcagccatctttccacagtcagcaaatgcctttagacagaatatatggtttatcttattttcctcattttacctttcttgttaggattttatgcaattacattttttttttcatttctttcagctttttatgttggcttttttttttttttttttgagggagggttggtccagtcgtttagttcaccattactgtaagtggaagatctgttaatacctacctttaccacccattgtgatcttaaatgatgactgtggtacattttcatgctttatttatctccagattcctttcaagtgccaagaaattaagaatcaacatactgaatttggttcatatacattaaagatgctcaattcactgatgataaatggataggagagatgtatgatgccttagtaataaaacttattttcctccataagttttttttttttgttttttgttttttttttttgagatggaatctcactctgtcgcccaggctggagtgcagtggcatgatcttggcttactgcaatctccacctcccgggttcaagcgattcttctggctcagcctcctgagtagctgggactacaggcacacgccaccacgcccggctaatttttgtgtttttagtagagacagagtttcaccatgttgggcaggctggtcttgaactcctgacctcaggtgatccgcccacctcagcctcccaaagtgctgagattacaggcgtgagccactgcgcccggccaaatttttttaaggaagaaaatatttggcacttgtcacattctccatatcagtcacatttctctttgtatactgagtactcatataaaaagctattattatctacgaagccttatttgacaaatctagtccatttttg

SEQ ID NO: 660 - DNA, 2500 bp, Homo sapiens
  misc_feature (1)..(2500): DMR4:83266101
gctgagctatgaccaaaaagggatgctgagaaattctgaagggaaaaatggtgacatcctggaaagtcaccaattcacattttagttttcacagtgaggaaaacagtggaggggacacagcatatggtttactttacagacatcagattctgatttccttcataccatgttatgtgagtcttgcctatactgatagtaattggcaataatctgtataaaatcagtcatctaaatacagcttcatgaatatcttcttttttttttgttttttttttgagatggagtcttgctctgtcgcccaggctggagtgcagtggtgtgatcttggctcactggaacctctacctcctgggttcaagcgattctcccgcctcagcctcctgagtagctgggattacaggtgcccaccaccatgcccagctaacttttatatttttggtacagacggggttttgccatgttggccaggctggtcaaactcctgacctcaggtgatccaccatgaatacctttttgattctgtttaatgaaaataacaataacactgatataaaaatatagtcaatttattagcaagtgatttaatcaaaattagatttagttcattcatttacaagtcaacaatgtagattctcaacataagtttctgacaggtaggggatgtggtgtgggtgaatatcctgaaatgacagcttcctgctctctactggcagaactttgacatgttccgcatttcatgtcttatctgtccttggtctttatgccagcagaaaccaaatttatgaataattagtctactaaccatcactagaaacccagatttttttttaaaagctttatctgtcagtttgcttttagagtaattcaactcaaaccacaagcttcagatatcactgaaatttttccagacatgaatcagaagtaattccaggaaaatcagatgggaaaatttggatttaggcctatattatttttaaaaaataatataccttggctggggttggtagctcacactggtaatcccagcacttttgggagaccagggcaggaagattgcttgaagccaggaatttcagaccagcctgggcaaaatctcaagaccccatttctacaaaaaataaaaaaaattagccaggcatggtggtgcatgactgtagtcccagctacccaggatgctgaggtgggaggattgcttcagtccaggagttagaggttgcagtgagctgtgattgcaccactgcactccagcctggatgacaggctggacagcactgtttcaaaaaaaatttaaaaataaaataaaatactagagctagctttcttataagttgaggccggagggcaggggggtctgttaaaggtagtagaagccaagtagttgtttaagaagttccttgccaggtaaacacagagggcatactgtttaaataatttttataatttataccaaggaaatatgagggacaaataagaaaaaggtcaaacctggtgagtcagatgggctcctacagcacccagggcagcgtagtagggagcagtctgtccactgttcacacccactaggctcagtgcccccagcattgcaacactgaagccgctgagccacggcttggtattttctccgaaccgcagagccgttgacttaagaccaatcaaaacatcatctcttttgtcctaatatcagaaagaaaaataaactgttttttgagatttagttcacacaccataaaattcacattttgaagtatcagatttagtgtttttttgtatattcacaaggttgtgcaaccaattaccactaactactttcagaagaaattgtcttttaaagaacatgcagatataccataagcggtgaaagatgacagtaactcagaaacaggctgatcagtaatgaatgtgcaggccaatcaaagctaaacaccactgctaaaatcaccatccagcttcatttctatacaccattatatttgttataatcctataatgactcttaaccatatttttagtgttaggattaaaattcagctctaattcttcccatagctcctctctacctcagagttctcaaatctcaataatctcctatacattttagtttcaatcttgcaaaagtcacagatgtagaaaaatgctcacttaccacctaaccacatccactcatttcccacttctagcccaacctatcccttgcctttcctatcaaatcctgtttaggtagagctaggtcttgatgatataaccacatgtagctgcctggtttctcccagcaagtttacttgtaagcatctccatatactgttgtaaataatgatggtcacgtagtatcagtggctgtatgctgaactctctgcactgacctaccggcagacagcaacctgacaggctctcttttggggcccaaatccaaataacaatgactgtgggtgtttctgtttttcctttcatactagaatcaccttcagggtgcaaactgtgtctatagttattatgtgaacca

SEQ ID NO: 661 - DNA, 300 bp, Homo sapiens
  misc_feature (1)..(300): DMR4:83425301
gtgggggaaaatggaaggtaactaggtttcaatgtaaattggattgccaaataaaatttaaaatgaaaaaaaaaagtgtattacaagggggaaaataacattctcttaaggaaatcgaaggtatggttatgaaagaattacttcaatttctcttaaagttagtgtatgcatttgataacttgcttcatgcctgcagactgaattttaaaacaccaaaatatatcacaccaacgagtattagcttatcccctttaaccttctaaaatgctttatgtaatataagtactagactaggagttc

SEQ ID NO: 662 - DNA, 1600 bp, Homo sapiens
  misc_feature (1)..(1600): DMR4:83435301
aaaattgggaggttaaagagaaaagtctaaaagtttctggaaaagaaaaacagaaaatccatgcagagacaaaaatgagcaacattggcctctagaaaatatggaacaatatttacaaaatccctaaaggaaaaaaattgaatctagaattcttttgctagtgaagtgtaaaagtgtgaggccaaaatacagatatcttcaactatgcaaagagtcaaaatgttttaccccctaaagcggtattctaaaaaggattactcaaggaaggcaaaattaaaaaaaaaaaaatcagagaagaaagatgtgggatataagaggcagtggtaagcaaaaaagaagtatgatttacaggtaagtttaaatactacataagatgaaagaaaatgtttaaatctggcactaaaattctaagtaattgcaacattcatggggcagagtagaatatactaaggacatgctaagcctctttttatgttcaggagaggacagttattgattaattctaaagtaataaaaaatgtttggttacaacttaaaattttaagagtaaccactggaataatagaaacaggatatataactttcatttttttcttcaattgtctgaaaaatggaaaacttaatgagagacagaaattgaaaataaaagaatggaaaaaggtacatacgtggcaaaaaaaaaaaatgagtcctggtattcaaagcaaaattattaaatgagaaaaacaagtatttattgtattgataaaaggtataattcggcaataagatatttgaagtaaacctttgtatatctaaatagttttgaaatataaaaagtaataacttctagagatgcaaaaaggagaaactgataactacataattaaagtgggagactaacacacttctctgaaattgatagaccaaggaatcaaatatagtaagaaaatagagaagccgataacacaatgaacctctgtgatctcgctgagatgtacaaaactgcatattcaactgaaaatacatatttttttaaacactcatggaaagtttataaaaattgatcatttattagcaaaataccccatgatcataaattataaaggggagaagtcaattacacaggcctacacctttggtaataactggaaaggtaatcaagggcctgctttaaaatacatatattagacacaaattgcctatggatcagctctccaagatttcaaggaaatctctatgttaaataaactctttcatatcataaaaaaggtaaaacacttgccaactatttctacaaaaccagattaatagaccctaacatcaaaaccagatataaagagcagaaaggatggaattctaatatcaagaaatctattaacgttatttttcattacatatttcattacatattcattaaaatattaaagaaaataaaccaaccaatcaactcagcatatgctaaaagaacatttgataaattctcatccactactgagaaagcataaaacaacaaaactcctcgcaagctagaaatggaaaagttctgagcctggtcaacacttacttatctcttaccttcgagctggtaggttgacacctgccgctagggtagatgtgc

SEQ ID NO: 663 - DNA, 200 bp, Homo sapiens
  misc_feature (1)..(200): DMR4:85300501
taactatagtcatcatgttgtgcagctgaacaacagaacttattcctcctatctaactgaaacttggctgttgaccaacatctctcctttctctctccacctttccacgctcagcctctgataaccaccatcctactttctacttctgagtttgatgtttttagatgccacatataagtgagatcacatggtatttttct

SEQ ID NO: 664 - DNA, 900 bp, Homo sapiens
  misc_feature (1)..(900): DMR4:87924601
cccacctgcccagttcccttattaggctgagacactttaactaaattatctgcttccctgactattcctggactacagctgtatctcattgcctcccttcttcccaatccaaagcctcctttgcatcctcctcttgtatccccccaccttaacccacaagtataagatacctctattccctccttggcgaccaatcatgcaccccttaccatctcattaaaaccaaatcacctttaccccactcaacgccaatatcccatcccgcagcaagctttaaaaagattaaagcctgttatcactcgcctgctacagcatggcctttcaaagcctataaactctccttacaattcccccattttatctgtcctaaaaccagacaagccttacaagttagtttaggatctatgccttatcaaccaaattgttttgcctatccaccccatggtgccaaacccatatactctcctatcctcaatacctgcctctacaacccattatcctgttctatatctcaaacatgctttctttactattcctttgcacccttaatcccagcctctcttcgctttcacttggactgaccctgacacccatcaagctcagcaaattacctaggctgtactgccacaaagcttcacagacagcccccattacttcaatcaagcccaaatttcttcctcatctgttacctatctcggcataattatcataaaaacacatgtgctctccctgccaatcgtgtccaactgatctctcaaacccaagcaccttctacaaaacaacaactcctttgcttcctaggcatggttagcgcggtcagaattcttacacaagagccaggaccgcaccctgtagcctttctgtccagacaacttgaccttactgttttagcctagccct

SEQ ID NO: 665 - DNA, 300 bp, Homo sapiens
  misc_feature (1)..(300): DMR4:90317401
caggagttcaagaccagcgtggccaagatggtgaaaccccgtctctatttgcattttgtaaaaatacaaaaattagctgggcatggtggccagtgcctgtaatcccagctactcggaaggctgaggcaggagaattgcctgaacctgggaggtgaaggttgcagtcagctgagatcatgccactgcactccagcttgaacaacaaagtgaaactctgtctcaaaaataaataaataaaataaaataaataaataataacttccaaatctagcgacttatataatatagatttctttctca

SEQ ID NO: 666 - DNA, 1500 bp, Homo sapiens
  misc_feature (1)..(1500): DMR4:91001901
tttgtttcaagatttagagctccttttagcagttctcatagttctggcttggtagtggcagattctcagagcatttgtctgaaaaagattgtatctttttttcatttatgaagcttagttttgctggatccaaaattcgtgcctgataattgttctgtttaaagaggctgaagatagggtcccaatcccttctagcttgtagaatttctgctgagaaatctgctgttaatctgataggttttcctttgtaggttacctggtgcttttgcctcagctctcaatattctttccttcaccttgactttagataacctgaagacaatgtgctgaggcaatgatctttttgtgatgaatttcccaggtgttctttgtgcttcttgtatttggatgtctaggtctctggcaaggccagggaagttttcctttattattcccccagatatgttttccaaacttttacatttcccttcttcctcaggaataccagttattcttaggtttggttgtttaacgtagtcccaaacttcttggaggctttgttcattttttcttattcttttttctttgtcagattgggttaattggagaccctgtcttcaagctcagaagttctttattctgcttgctccagtctgttgctgagaatttccagagcattttgcatttctataagtgcatccattctttcctgaagttttaattttttttaatttatgctatctctttcattgaatatttttcccttcgcttcttgtatcttttttaaaattttcttagattgggctttgcctttctctgatgccttcctgattaacttagtaactgatcttctgaattctttttcaggtaaatcagggatttcttcttggtttgaatccattgctggtgagctagtatggtatttgggggatgttaaagaaccatgttttgtcatagtaccagaattgttttttctggttccttctcatttgggtggctatgtcagagggaagatctggggctgaaggctgctgttcagattcttttgtcccacggcatgttcccttgatgtagtactctctgtctcttcctagggatgtggcttcctgtgatccaagctgtagtgattgttatctctctctggatctagccacccagtaggtctaccaggctccaggctggtaccgggggttgtctgcacagagtcctgtgatgtgaaccatctgcaggtctcatagccatggatagcaacacctgctctggtggaggtggcaggggggtgaaatggactctgtgagggtccttggctttggttgcttaaggtattatttttgtacgagtgggcctcctgccaggagctgtagtagtatggggaggaagaagtggtgggcaaggccctagaactcccaagagtatatgccctttgtcttcagttaccagggttggtagggagggaccattaggtgagggcagggctaggcatgtctgagctcagcctctccttgggtgggtcttactgag

SEQ ID NO: 667 - DNA, 1700 bp, Homo sapiens
  misc_feature (1)..(1700): DMR4:91877401
gcacatgctctcttgcctgccgccatataagatgtgcctttgctcttccttcaccttccagcatgattgtgaggcctcccgagccatgtggaactgtgaggcctcccgagccgtgtggaactgtgaggcctcccgagccgtgtggaactgtgaggcctcccgagccatgtggaactgtgagtccattaaatctttttttctttataaatcacccagtctcaggtatttgttcatagcagtgtgaaaatggactgatacaggacttttagttttttctaacatttttctgttataataatcttattaatatttttgccttatattattcctcatgtctaaccatgtacagggaatattattattaattgaatttttgataagtaggatcaaatttccttcatagagattgtaacactttatgctctacccaacaatatatgagaccatgtttcttaactcccttctcttctacaaagttactacattcttgattttcctaacttataaaattgtttttttctaaataaggtcgatgacttttcacacttttaacaacaatttgtatttgtttctctatgttctttctatgtatatccatgcccaattcttgaaatgtgttggtcttttaatcatttgaaagtgctctttatataacgtggagattaatgttttactgtaaaaataggtagcatattttaaaactcagcttgtcatttatatttggacttctccattattttaccattcagaatgatttttaaatatgctattgaatttattattttcttttagactacagagttttgtgtcatcattatcaaaagcactggtgaagagtcagccttgaaaagacctaggaaatgtatcactgtttgtataatgggtttaattgtgtgtccttacaaatagaattttcaatgtatgtcataagaaaagtctgtgacacattaatctacagcaggtttatagatggcaaatgataaaataagaattcttattccatagtagagatggagtaaaattcttcatttccagcaaagtacaagaagttgccaatacagtgctccaaaaaccacatttagagtaacaaggctgaagagtatgtccttaggagtacaaatgctaggacctgaggtagccacaactttatttcattagaaaaagacaaatagaattccaaataaatgtaccaattcacattaccaagaaatgcagaaatgttcaaattacttacctattgttaactgctttgttgtttcatgttgtaagtgtgtgaaatggcataatttgatgttttaatatgtatttatcatgattattaatgagtgtgaataaatacatttgttttctctttttctcagtctttcaagttttccttttttaaataaatttaacttttattttagatccagtggtacacgtgcaggtttgttacatgcatatattgtgtgatgctgaagtttgaggtatgagagatcccatcactgaggtggtgagcatagtacccaacaggtaggttttcagcctttttcccctttcccctctagtagtccccagtgtctattgttcctgtctttatgtccatatatacccagtgtttagctcccacttataaatgagaacatgtggtatttggttttccatgcctacattaatttgcttggatgaaaacttccagctgaatccatgttgttgcaaaa

SEQ ID NO: 668 - DNA, 500 bp, Homo sapiens
  misc_feature (1)..(500): DMR4:94137901
acaaaatattagtaaatcaaatccaagaacatataaaaaaagagaatgtaccatgaccaattggtatttaaacccaaatgcaagattggtttaacatccaaatattaattcgtatgacaccttactaattagaattaaaaatgcactcacacaatcctcttaataaatgcatgaacatcacttggcaaaatccaagatccatccgtgattttagaagaaaactatcaacaaataagaaataaaaagaaacttccttgctcgatagaagaaatccacaaaaaacctaaagctttccccctactgtactatagggaataaggcaaagatgtctgctctcatcactcctatttatcattgtactggaaattctagccagggtaatctggcaagaaaaaaataaataaatgaatgaatgaataaataaaatacataaagattgggttaaatctttatttaacaaaaccagtaagttcagcaaagttgcaggacaaaatttcaat

SEQ ID NO: 669 - DNA, 600 bp, Homo sapiens
  misc_feature (1)..(600): DMR4:95956901
agagaattgaatccctaaagacttggaaaagaaaaccctgtgctgtatgtattcatagaagctagagtctcggggctataggggtcagtgttcaagttttaaaacattattttttattaagctgtggaggtcattaatgcaaaataggaattttagaggcatctaaagaattaaagcatttattttagcgcctttatgtataaaaatgctttagtttcgctctcagaaattgagcacacaatgtccagtggcttctctgcaggtcaactcatggtagtttgggaaccactctacgaagtataagcttctttaaaaatgcttatgaatgtcttgtgaaagacttgatgcacagacagtgcaattccggctaaaatttcccctgaaagtcagagatgactcattttcattgtccatttgctaacaataacactttagtaaaaaaaaaaaaaaaaaaatctttaaaggtaggatgaagagatgaagataaaagtaaagaataagatgaatcttaaaaaaagctctgtaaagaaattcacctgacataatatttgagcctttttcaataagtggagtttcgcctttcttatatgaattacactc

SEQ ID NO: 670 - DNA, 2100 bp, Homo sapiens
  misc_feature (1)..(2100): DMR4:97337101
cacttgggagccaacaccactgaggccttgggtcccaaccatggagccatgcagtttctcaacacctaatcggctggaatcagcctaagcctgctgagttccttgggggcggtgtggccatcaccaatgctatggctgcctgtggtctaagccacctgagcttcatggaggagggacaggaaccatcattctggctgcagggcctcccagcaggaactccaactctagccaggggctcagggacagaactgtgatctccctaggcctaaacccctagaggtaggggtggctttagtctccacagaccagaagacttagtctttcctcttgcttgctctcaggaatccaggcagcccagatgagtgagttttcccccagcacagcacaccacctccaccaagggacagccaaagtgccttgttaaatggatcctgcttcttgtgccacccaactgggtgagaccctccccaaaaggggttgtcagacatcttatacaggagcactcttactggcatcaggttgttgccccttgaggccagagatcccagaggaaggagtaggcacccatgtttgtggctctctagcctccttgagtgacatctccaggcataggaacaaactagatgaaaagggcctgaagtgaacgcacagcaaaccgcagcagccctgcagaaaagggacttcattattgaaagaaaaacaaacagaaagcaacaacagcatcaacaaaagtccccacaaaaacctcatccaagagtcagcagcctcagagaacaaaactagacaaactcatgaagactaataagaatcaatgaaaaaatgctgaaaacccataaagccagagtgtctctactcctccaaatgattacaacacctctccagcaagggcgtagaactggatgagatggatgaatggacagaagtaggtttcagaaggtgagaaataacaaacttcagtgaggtaaaggagcatgttctaacccactgtaaagaagctaagaaccttgataaaaggtcagaggaactgctaaagagaataaccagttaagagagaaacataaatgacctgatggagctgaaaaacagcatgagaacttcgtgaagcatacacaagtatcaatagccaaattgatcaagcagaagaaagtatcagagatggaagactatcttgctgaaatcagcaagggagacaagattagagaaaaaagaacaaacaaaacctctgagaaacgtgggactatgtaaaaagacagaacttacaactgattggagtacctgaaagagacagggagaatggaaccaagttggaaaatacacttcaggatattatccaggagaacttccccaacctagcaagacaggccaacattcaaattcaggaaatacagagagccccactcagatactccacgagaagatcaaccccaagacacataatcatcagattatccacggttgaaatgaaggaaaaaatgttaagggcagccagagagaaaggccaggtcacctacaaagggccaggtcacctacaaagaaaggccaggtacctacaaagactaacagcatatctcccaggagaaaccctatgagccagaagagaatgggagtcaatattcaacattcttaaagaaaagaattttcaatgcagaatttcatacccagacaagcttcataagtgaaggaaaaataaaatcctctccagacaagcaaatgctgagggaattcttcaccaccaggcctgccttgcaagagctcctgaaggaaacactaaatatggaaaggaaaaactataccagctactgcaaaagaaatgaaaatataaataccaatgatgctatgaagaagaggtatcccactgtacaaaaaaaccacacagcatcataatgataggataaaatttacacataacaaaattaaccttaaatgtaaatgggctaaataccccaactaaaagacagactggaaaactggataaagagtcaagacctatcagtgtgctgtattcaagagacctatctcttgtgcaaaggtacacataggcttaaaataaagggatggaggaaaatttaccaagaaaatggaaaacagaaaaaagcaggg

SEQ ID NO: 671 - DNA, 1600 bp, Homo sapiens
  misc_feature (1)..(1600): DMR4:98437501
tttgtttaggaggccaggcacggtggctcatgcctgtactcccagcactttgggaggctgaggtggtggatcacttgaggccaggagttcgagaccagcctggcgaacatggtgaaaccctgtctctactaaaaacacaaaaattagccgggagtggtggcacacgcctgtagtcccagctactcagaaggctgaggcaagacaatcgcttgaacctggaaggcagaggttgtagctgagagattgtgccactgtacttccagactaggcaacagaacaagactctgtctcaaaaaaaaaaaaaaaattttttttttcaacaaatcattggtatatcttctatggacattggcatatcttggtatatgttctatggacacctgaaaagagtgtgtattatgcagttattgggtactgttgtataaatgtgaatttgattctgttggtactagtgtcaagtttcctttattcttgctggttttgcagttaattgttctgtcaattgtcgagaggaagggtgttgaagtctcccactgtagatttacctatttctcctttcagttctgtcaatttttgcttaacataattttcagctctgttgttaggtacctacacctttaggattgctgtgctttcttaagggattgacccttttatcattatatagtgtacctctctctggtatttttctttgctctcgtcaactttatctgactttaacatagctacttctgcttgtttttttattattactattttattttctttcatgtgccactacaagaagccatcctactttcttttgaataacattcacatgatcttttctcactcttttagtttcaatctgctgtatttgaagtgagtttcctgtatacagcacaaagttgtcattttctaatctactctaccagtcccttttgtgtatttagaccatttacatttaatggatgactgatatggcttaagtgtgcaatcttatttttgttttctgtttgtcacatttcttctttatttctgacttcctatgggttaaacattttttaatcatttacatttattcttccatatatatatatatatatatatcttttttttttttttttttttgagacagagtcttactctgtcacccaggctggagtgcagtggcgtgattttggcacactgcaacttcttcctccagggttcaagtgattctcatgcctcagcctcccgagtagctgggattacagatgcctgccacatcacacctggctaatttttgtatttttagtacaggcggggtttcactatgttgcccaggctgatactgaactcctgaccacccgtcagggtgatccacctgccttggcctcccaaagtgctgggattacaggtgtgagccaccacgcccagcctctcacgtatatcattcttaaatatttcttctacatatatttagaatcacgttagacagtgttacaacttttctttcaaccaccaaacatatttcagaaaactctttgaaagagaagggaagtctatcgtatttacgcacatttttagatttcttatttttgttataatcattccctttctgtttagagaacttccttta

SEQ ID NO: 672 - DNA, 200 bp, Homo sapiens
  misc_feature (1)..(200): DMR4:98494301
ggatccaagtaaatccaaaactcagaaagtggggtagcctggacaatgggggagacagacaaacagacagacactaatacagactagcttgtcttgaatcccaatgctaagccaaattgaggcttaggcagatgaagtaacctgcctaagatcgcacttactacctgtgtcatcttaggcagattacctcatctgcctaa

SEQ ID NO: 673 - DNA, 800 bp, Homo sapiens
  misc_feature (1)..(800): DMR4:98641101
gggaagaggaggggagaaaaagttaaatcacagaaataaaaaagtaaatatcccctctttttatataatctcctactatctggagctcatcagtataaaacaataaaataaattccatggatacctgcattctgtaacaaaaaaaccaaacaggacatatgtgaatgtgtaggttatgttcgtcaccacagaaccttcaaacacctaataacttgtttaaatgaaatataaaaatattaaagatgacaaagaatttcaaataatgcctatgccatcaagcttaacttactcaatatacaattttatgtgcaaattaattggaaacctttgtgtttctgctaacttaaaggccacatatggaatccatatgaagcagaagtttttgagtctgctcattccaaagcatgagagtaatgcataataaataacctgaatagttacttaacataagcaaggttgatgttaatcaaaacgactgcgccaaaaccatttagtggaaccaaatacagtcaaagtgctgggacttgggaacttggacaattcagcgtgcacacatcctacaaagaacacaggccaagtgccgacttcatcctaattcaacatataaacggtaagcagatgccttctccaccagtctcagctcaaactccacccatgggtaaaatccaccaggactcccactgtcccctctgcacactgttcctacacagtgataccaagaacacagctgaggcacctgagatgctgggctcccagaagagaagctctgttctttgttttataaactggggtctttgctt

SEQ ID NO: 674 - DNA, 100 bp, Homo sapiens
  misc_feature (1)..(100): DMR4:99262101
tctttaagaatgttgaatattgtcccccactctcttctggcttatagggtttcagccaaaagatccactgttgtctgatgggcttccctttgtgggtaat

SEQ ID NO: 675 - DNA, 900 bp, Homo sapiens
  misc_feature (1)..(900): DMR4:100004501
ttttaattggagaatttagtccatttatatttaaagttaatattgttatgtgtgaatttgatcctgtcattatgatgttagctggtgattttgctcgttagttgatgcagtttcttcctagtctcgatggtctttacattttggcatgattttgcagcggctggtactggttgttcctttccatgtttagcgcttccttcaggagctcttgtagggcaggcctggtggtgacaaaatctctcagcatttgcttgtctataaagtattttatttctccttcacttatgaagcttagtttggctggatatgaaattctgggttgaaaattcttttctttaagaatgttgaatattggcccccactctcttctggcttgtagggtttctgccgagagatccgctgttagtctgatgggcttccctttgagggtaacccgacctttctctctggttgcccttaacattttttccttcatttcaactttggtgaatctgacaattatgtgtcttggagttgctcttctcgaggagtatctttgtggcattctctgtatttcctgaatctgaatgttggcctgccttgctagattggggaagttctcctggataatatcctgcagagtgttttccaacttggttccattctccccgtcactttcaggtacaccaatcagacgtagatttggtcttttcacatagtcccatatttcttggaggctttgctcatttctttttattcttttttctctaaacttcccttctcgcttcatttcattcatttcatcttccattgccgataccctttcttccagttgatcgcatcggctcctgaggcttctgcattcttcacgtagttctcgagccttggttttcagctccatcagctcctttaagcacttct

SEQ ID NO: 676 - DNA, 200 bp, Homo sapiens
  misc_feature (1)..(200): DMR4:101206001
ggctcaatatgccctactcgggtaggctctagagcaggctgcagcaaaacatcaggccctctgggtctttccacgtttcagtaatgcttacactgtttgcttccttctgatgaccagatctgttctcatccacagtctgcggttcaccatttctaagaaccacttactcatctgaataacacagaatcatgcaggaagtt

SEQ ID NO: 677 - DNA, 400 bp, Homo sapiens
  misc_feature (1)..(400): DMR4:102670001
aaaaattagccgggcgtggtgacacacatctgtaatcccagctacttggtaggctgaggcaggagaatcgcttgaacccaggaggtgaaggctgcagtgaaccaagatcgcaccactgcattccagcctaggcaacagagccagactccatatcaaaaaaaaaaaaaaaaaaaaaaagatcatagccccaaagcagcctgtctgagtcggaatttcattccaccataaatgagttgttagagtttggataaaatatataacctcttcatgtgtcagtttccttatctgtaaatggggatagagaatagtaactacatcattgaatgggcatgaagataaaatatgtagagcacttagaacaatgcctggcactcagagaatattatagaatattgtcatc

SEQ ID NO: 678 - DNA, 200 bp, Homo sapiens
  misc_feature (1)..(200): DMR4:104601701
aacgttactggatttgttcattagttctaatcatttcattccttagggctttctgcatacaagattatgtcatctgcaaacagaaataatttaacctcttcctttcctatttgataccttttattttttctcttatctaattgtcctggctaggacttccagtactatgttgagcagaaatgtcaatagttggtactctt

SEQ ID NO: 679 - DNA, 200 bp, Homo sapiens
  misc_feature (1)..(200): DMR4:105739101
ttttgtccctcattctgttgatataatgtatctgatttattgatttgcatatgttgaattatccttatattcctgggataaattccacttgatcatggtaatgagtgttgtaatgtgctgttggattttctgtttgctagtattttgttgaggatttttgcatcactctttatcagggatattggcctatagttttcttt

SEQ ID NO: 680 - DNA, 1100 bp, Homo sapiens
  misc_feature (1)..(1100): DMR4:107815401
atcctacagggagtcactttcctggtgtgggcaccagtctgttaagagtctggtctttagtttggtaggcttgacattcaatattgctaaaacactaaggtgactagccttctagtgactgacttacaagaattatagtcacagaacactctcaaaaccggaatataactattaagcttgttagtaaattcccttcctctagactagtctaggctggtgactgacaaacaatgaaggagattgggaatgggatggtgaggcctcgtctttctttttctttttttttgagacagggtcttgctctgttgcccaggctggagtgcagtggcacgatcaggctcactgcaacctccgcctcctgggttcaagtgattctcccacctcagcctccccagcagctgagattacaggtgcccgccaccatgcctggctaattttttgtatttttagtagaggtggggtttcaccatgttgtccaggctggtcttgaattcctgacctcaggtgatccaccctccttggcctcccaaagtgctgggattacaggtgtgagccaccacatccgacctaaggcctcttctttctattgaggccactgagaagaggcctcagtctccctggagaagcttttcaaacaatttaagtcacctctgtcttcccttcccttctctctcttatccaaccccagacagtcttataattttgatagccccttccaaaaagatggcatcatccctgatgaacattatagctaatatttctttagatagtatgtaatttgcatctactgcatagcaaaaaaattgaggattatcaccttagcctaaaaatttccaaatttttctcaacgtaaaaatcatctcaggcacttacttgaaatagtggctagaatccctcccctgagggttcattaaatcatgggtgaatcccacatggtgatgatccttaggaaacttgcaagttcaggcaatgctgcactaggccagtccccctgggaatcaaatcgttgtcaatgtacagaactcctttcctttgctgctgctgaattttccaaggcgtgtgttcccagtactctccagaagactctccgcctatatctg

SEQ ID NO: 681 - DNA, 1200 bp, Homo sapiens
  misc_feature (1)..(1200): DMR4:109476201
ggtctcaaactcctggcctcaagtgatctgcctgcctaggcctcccaaagtgttaggattacaggcgtgaccattgtgcctggccaatcactacagcttttattgttggtataaaattggtcaaaacaacataaacatcatgaattttggtatttatgtgaagtacgtttttattggaaatacatctttcagtgaaatgaatgggctgtctcctctccccactatagttttgtatctgagttgaatatgattcattgttagaatatgataatgttcagataaatttcattcttagtttttattttcatacatataattgctgagaaacattgttcacataaagtagattagaattacttgtaagaattctgctaaagcagtatcattctgttttgctttattttgcttttactctttttaaccttctgagttacatgtcagaaattattgtttgttagattttattttccaggtggtagttgttaacattattatttcatataacagtttgtaatttgcaaatccctttaactttttctatctgtcttactttctcatcacatggaacaagcatatcatatgttttcttccttttgtaagtgaggaaatttaaatttagaaaggttacatgtcttaccttaagacctacagagttggccgggcgcagtggctcacgcctgtaatcccagcactttgggaggccgaggcgggcggatcacgaggtcaggagatcgagaccatcccggctaaaacggtgaaaccccgtctctactaaaaatacaaaaaattagccgggcgtagtggcgggcgcctgtagtcccagctacttgggaggctgaggcaggagaatggcgtgaacccgggaggtggagcttgcagtgagccgagatcccgccactgcactccagcctgggcgacagagcgagactccgtctcaaataaaaaaaaaaaaaaaaaaaaaaaaagacctacagagttggaaggagaggtacccaggcccattgcacaccttttgccttcaaactcagtacttgttttactctatcagcagttattcaaaatattttgaatttccttctaccatggccaatatagcttaccatactttttattatttttatttatttatttattttgagacagggtcttgttttgttgcctaggctggagtgcagtagctcagctcactgcagcctcgac

SEQ ID NO: 682 - DNA, 500 bp, Homo sapiens
  misc_feature (1)..(500): DMR4:111383801
tcacaaggacaaaaaaacaaacactgcatgttctcactcttaggtgggaattgaacaatgagaacacgtggacacaggaaggggaacatcacactctggggactgttgtggggtgggggaagagggtagagatagcattaggagatatacctaatgctaaatgacgagttaataggtgcagcacaccaacatggcacatgtatacatatgtaacaaacctgcacattgtgcacatgtaccttaaaacttaaagtataataataataaaataaaataaaaataaataaataaataaataaataaataaaaagttattgttatcatgccttgccactaaatgtagttacaatacataattaaattattatcacaacatcactactaaaatataatttttgccttcataattatgttagttaagatctgtttgctacagaaaacaaaaagcccttgcaaggttttgtttgaaatataattttactataaaaataccactccct

SEQ ID NO: 683 - DNA, 2500 bp, Homo sapiens
  misc_feature (1)..(2500): DMR4:112756301
attataggatacaaaatctagctggggtttatgatttcaccagttcagtattgttggttcggaaataatttggttatcaattcacgtagaactaactaatcaggctttgggagaatagattctctataatttataagatactgctttataacccaaaatggcaatcaatttattagtggtgggattgtgtctttccaatgtctagaatagtaatgtttatctggtatccaagtacttgctaaagcaaattaataatccacatgttacttgggagaattggttatgtacatagggagttatctgtgatggaagctgaggaactatgaaagctttatgattatgaacactcgagtaagagattttttgagctcggctggaaaaatattgaaaaattagatcttgtggctcatgcgtgtgatcccaacactttgggaggccaaggcgggtggatcccctgaggtcaggagttcgagaccagcctggccaacatagtacaaccccatctctactaaaaatacaaaaattagccctacatggtggtgggcatctgtaatcccagctactcaggaggctgaggcaagagaatcgcttgaacccgggaggcagaggttgcagtgagttgagattgcggcattgcaatccagcctggatgacagaacgagactccatctcaaaagaaaaaggaaagttagatcttaggaaattttcctagaactcatgagtgccatcacttaaaaaaaattgttcttacatcaccctgtaattcccaaattatatcatttctctcaatgacagcagtgacttttcttttctttttttttttttttttgatacggagttttgctcttgtcacccaggctggagtgcaatggcgcaatctcggctcactgcaacctccgcttcccgggtttgagtgagtctcctgcctctgcctctcgagtagctgggattacagacgcccgccaccaagcccggctaattttctttttttgtatttttagtagagacggggtttcaccatgttggccaggctggtctcgaactcctgaactcaggtgatccacccgcctcccaaagtgttgggattacaggcgtgagccactgtgtccggctgacagcagtgacttttctcatcagtaactgtcaaacagtattaacaaaagtctacattgatgaatcaccacgtgctaggcacatttgcaggtattttacacacattaatttatttgatctcataagaatcctgtgaggtgagagctaatataatctcctgttttatagatgaggaattagaagcatagagaattaaagtagttaacttttggacagtttatcatttatttaataggtaatccatggtttatggattatgagttcttgtaaattgaaatcatgaagcttttgactcatgaatatcttatacttctcttcactttgctggattttagggtgaatcttttgtgtttgtagtcatatcattataaaacaggaataaagaaaggctgtggattgagaagcgctatacgtaaaggagaaaaatgtaaaagccttcttaattttgggttgtaatccttctaaagatggatttttttttttttgagacggagtctcgctcgtttctcaggctggcgtgcaatggcgccgtcctggcccactgcaacggcgccgtcctggctcactgcaacctccacttctcgggttcaagcgattctcctgcctcagccttcccagtagatgggattacaggcatgtgccatcacacccggctaattttgtattttttttttttaatagagccagggtttttccatgttggtcactcaggtcccgacctcaggtgatccgcccgcctcggcctccgagtgctgggattacaagcatgagccaccgcgtccggccaagatggattttttttttaggtgtatttttctgagtcacatacacattctaacattaaattagaaaaatggaattatttttccgatttatagtcaattgtaaaatttattcatttaatttttattaagtacttcataatacgctgcataatctttcagcaggagtagatgagcatagctattctcttatcaatcaggaaatgctgtctatttttatttatttattttttgagatagagtctcactctgtcgcccaggctggagtgcagcggctcaatttcggctcactgcaacctccgcctcccaggttcaagcgattctcctgcctcagcctcctgagtagttgggattacaggcgagcaggcgccaccaggcccggctaatttttgtatttttagtagagacggggtttcactgtgttggccagcctggtcttgaacttctgacctcacgtgatctgcccacctcagcctcccaagctgttgggattacaggtgtgagccactgcgcctggcacaaaatgctttctaatcaatcttctcaaaaccctttgccaaatactgtagtaacgacgccacggatttgcccctttccatcaaact

SEQ ID NO: 684 - DNA, 1200 bp, Homo sapiens
  misc_feature (1)..(1200): DMR4:113246101
gtttttaaagtattatgttttcattttgttgttgttgttgttgttgacatctcaatttcccccagcatttaaattaaccacaaatattctgaatttagtatattctgtcaaggatcttgccttgatcttctcattattttttctcattcataaggtttttattatctagagaatagcaagatctagagaggctttcagataattaagaaacaaatattacccacagttatttcttggctctcatcaccattttggcaatcattgaggcattttccatcttgttggcattctcatcattgactactatctaatgtgaaactctaagacatttgcaccagagccttttactggtatctgaaagacctcatttcaatgtgaaaacgtaaattttatagctagtgaaaatgaaattataaatttaggctttattaagggcattattctttttttgtttttaagcttatttattatttaaatgtggtgataccgcatattaggattatgtttaaaatattaaaaaacatatttcaaagcaaacaataaaaagtgtacaaaaacattaaaggatgatgaacaaaaaacacacagggaaaaggaatcacccttcttacttgttattaggtataataattaaagcagtaacaataatggttttcaattgtcatatgcatatgttgttctaggcaccctgctaagtactctacaaatatcatcttattttatcttcctaacaacttatgaagtgtgtattattttcttgttgagaatatatggaggtcttcatttgagaaatgagactaccaaagggagaaattagtttcagcagaattatgtaacttgacctaggacacagaactttgtaatcagcagagcctacccatgtattcacacaaacttcagaatacattgttgaaagaatgacctaagcagagaggggggaagatatgaaaagataaagaaactacataagtggcatccctccaatgttgattgatctacctttatgaaaattatccacatcatggtgtatagtacatccgtgtgatgaactgattctagagaaaaaaaaaaaaacaacaacagagaaaacacaaggggtctctggaagggggaaaaacccataacctgcaactacaaacttaagaatttaagtaaaaagattttagaatacaaaagcttgaaaagaatttttttggggca

SEQ ID NO: 685 - DNA, 700 bp, Homo sapiens
  misc_feature (1)..(700): DMR4:116237101
ctttggctgcagctaaatcttcatgtcatgtttgtaatccattaaccaatttttattttatgcctcactaaaccatttgtagttcctcatacatatataatactggcatttatgtctatgttttccattccctcacctggtatgtactttttctgaaataactaaaatatattcctcaagaataaacattgctaaatttcttctgaagtcccttcttgatgccaagactgcctcaatccagttacttcttatgtgcatatgtatttcatatggttgtgtattatttttattgttgttttatgtctgtttttttaaaaacggattacaaatttctaaaggccttaacttctctgtttctatagcacagtacatattatttattaactgaaaaattagttgaaaggctagaaaccatcaggtgcaaaccataaagcagcatgatttctctattcaatcccaacttctatattttctattgtcaaaggacaatgcatctatacaaaaaaactaaaaacaaacaaataagaaaaaacacgcagagatcagcttagggacaggaagtggaaacaaagaaacaagtatggataaagaacaatactgaactataaagtgtaaagcagaactaatttaaaaaggaaataaaagctaaaattcttgtgctgtagaagtatgagagcagtctggtacacccaaacagagc

SEQ ID NO: 686 - DNA, 2000 bp, Homo sapiens
  misc_feature (1)..(2000): DMR4:117340101
ttttttttttttctttttttttctagttcttttagttgtgatgttaggctttcaacttgaaattgttctggcattttgatgtgggcattcagtgctataaattttcctcttagcactgcttcagctgtgttatggggattctagtacattgtatctttgttctcattagtttcaaagaacttcttgatttctgccttaatttcattgtttacccaaaagtcattcagaagcaggttgtgcaatttccctgtagtggaatggttttgggtgagttctaatttgattgcattctgatctgagagactgtttatgatttcacttctttcgcatgtttctgaggagtgttttacttcttattatgtgatcaattttacagtgagtgccatgtggtgatgagaaaaatgtatattctgttatttttgtttggagagttgtgtagatatccatcaggttctcttgatccagagctgagttcaggtcctgaatatctttattaattttctatctcaatgatctgtctaatattgtcagtggaatgttaaagtctcccactattattgtgtgggagtctaagtctctttgtagatctctaaaaacttgctttataaatataggtactcttttattatgtgcctatatatttgggataattagctctccttgttgaattgaaccctttaccattatgtaatgcccttctttgtcttttttaatgtttgctggtttaaagtctgttttgtcagaaactaggattccaacccatgctttttttctgtttttcatttgtttgctagattgtcctccatccttttattttgagcctgtgagtgtctttgcctgtgagatgggacttttgaaaacagcatactgatgggtcttgcttctttatccagcctgtcattctgtgtcttttaattgggacatttagcccatttacgtttaagattagcattgctatatgtggatttaatcttgtcatcatgatgctagctagttattttgcagacttgagtatgcggttgtttcacagtgtcactggtctgtgtaacttcaatgtggctttatagtggctagtaatggtttttcctttccttgttgagtgctgtcttcagggctcttgtaaggcaggtctggtggtaatgaattccctcagcatttgcttgtctgaaaaggatcttatttcttctttgtttatgaagcttagtttggcttgatataaaattctggcttggaaattcttttctttaagaattttgaatattggcccccaatcacttctggcttttagggtttctgctgaaacccccccatccctctagggtctccttccaagggagagatcagatctctgtccatagaaaacaggcaggggtggctggaggccccacctgggaggtcagacccagtgaggagggatggatctgggtcctacttaaagaagcagtctggccatgaattggcaaagcagctgtgctgtgctgggtggtggtgggacttccttgttgagaccttttagagtttccaaagctctcagactaaaatggctgagtcaaccaaatggcagagatggtgacctgaccctccactagtggactctgtctcatctcaggctggctcctccaccctattgctggtggctggctggaattccaagccagcaggtcttatcttgtgagatgccatggaattggggcctgcaggatgatgctgtctggctccctggattcagcccccatcctgggggtatgtacagacctcctgccttgcctgagttgcagacacatttgttcgggattctgggggctggagtatgtaaagcttctgggtctctctgtgtgcctgagtagctgctctgccaagaccccaaaaacactgatggcgtgggctcacaaggggatctcctgatccacaggttgcaaagatctgtggaagaagcttggtttcctggggtcacacaatcactcactgcatctcttggctgaggatgggggttccccggg

SEQ ID NO: 687 - DNA, 2100 bp, Homo sapiens
  misc_feature (1)..(2100): DMR4:117823201
tgtattaaatcagtgattttgcctgcctgaaatgacctagagtctaaacaacctcccagtaatgtaacagctatcacttttctatatctatttaacatgaaagtctaataattatcattataactattatctgcactcaggactttcctgtctcgtgtgtgtgcgtgtgtgtgtgtgtgtgtgtgtgtatgtgtgtgtgtattttcattccctatgtttaaaagttcactttcaaaatttgcaagaaaattgtcccacgtctcagcaaagataaaccattgtatttgtttttaaaaacactatacaaagcagaaaactgtctttggtgaagaaataactcattgttgtttttgctcttgattcattaatcatttacttgtatttccaagagcaaacgagtggatgccctctaccaagaataaataaaagacgttggcaaagctacctgtcatatagttataatgtggacaaagactgaatattaaaaatatactttgtaaaattaagatatgatctgcacatttccaattgtgctgtcttccagtatatcttcaaaaactgtattttaaaattcatagccaaacataagcatgtcaaaactaaatcttccttttagtacataaaaaactaatatactattgggaaagacaaaacaatcaggctaacttaaccaatactttttttcctctactaatagtgatagaggtaggaggcagagaaattcaaggcagacaggggtgggtccccagcaaaacgccgccttcaagccaaaacacctgaaacccatggcccaaagtgagaacttccatccctgtgtgcctgccctttcccagttggttctttctgaataatgtctttttacaaataaaatgttgtcttttccaaaactacctatggcccactctgcccccctcgccacccccaacccccaacatcctgtgcctataaagacctcagactcagccaatagaggagagaagctactggacactagggagaggttacttgacttcagagatggcagctagacgtcgaaaagaggcaacttgactttggaagagaggcagagaggaggcttgacttcaggagagcgtgacctgcccttcctatctcctttccagctcccctctccgctgagagccactttcatcactcaataaaattatcctcattcaccatccttcaatttatctgcatgacctcattcctcttgggcaccagacaagaattcaagatgcaccaagcgcaagtacgcaataaggctgtcacagtggccctttgcccttgctggcagagggcagcctccccatgtgatgagaaaagggcccactgagctgataacacactgctgtccatgggcagcggagctaagggaacattgtaacatgccctctggggccttggggtcaccaggcacccccacccggatgatgctgcggggcctgtatagagtttgatcctgccagcactgaagcagtgggccagttctttcactcattcgctctgcttcccatattggttcacctgcacgctgcctcccacgaggggttgagcagggcagctgagtaaatggggcatcactgctgtgagttccacaaaggggtcaagaaaacatcctgcatcaataggaatcattccttttcttatcttcttttactctcaatgagtaaaaatcaggatttctaatgatttttttatatgttcaacaacttcacagcaagaatgaaagacccattgggtagggagattttggctgttttcaaagaggaaaggtgggttgtagtgaaagaattactgccatggccttctcagtggcctccctgtgacacctcccagacatgtcaccattagtgattcatgtgggggccacaaaaaactttatgcataaaactatgcatgatcttgccaaggagacaagagtcccaatgattcttttcctctcatgtgaaagtctgtgtgcattcagtgtggagatgtgggaattatgtcctacgcagctaattttcatctaacagtcactgaaaatctattacatgcaaagacgttcatagtcatttctggaccactagaaaagaaaggtaaagaaaactattataatat

SEQ ID NO: 688 - DNA, 1400 bp, Homo sapiens
  misc_feature (1)..(1400): DMR4:118791101
aattgtttagttttttatttttgtctcacacaattagataaacgatagtgccacttattgatatgtggaaaaataaacaggtttggggtgcagagatcagaagttcatttttggacacgttaagtttgaggtttctatgaagcacccaaggagagatttcagagaggtgtttggatatgtgagtatgggactgaaaatgtaaaaacgaatgaatgaatgagtaacagcgcagtgctttagagcactttagacaccagagtctctgtggttttgcatcctagctttgctatttagcagctgttgaccttaacaagttatctaactctgtgcctcagtttacttatatctaaaatggggataagtaggttaatgtgataattaagtaaataaatatttttaaaatttatagctctccctactccctactccctcctccctcctctctctccctccacggtctccctctgatgccgagccgagactggactgtactgccgccatctcgactcactgcaacctccctgcctgattctcctgcctcagcctgccgagtgcctgggattgcaggcacgcgccgccacgcctgactggttttcgtattttttggtggatacggggtttcgccgtgctggccgggctggtctccagctcctgaccgcgagtgacctgccagcctcggcctcccaaagtgccgggattgcagacggagtctcgctcactcagcgctcaatgttgcccaggctggagtgcagtggcgtgatcttggctcgctacaacctccacctcccaggcgcctgccctggcctcccaaagtgctgagtttgcagcctctgcccgaccgccaccccgtctaggaagtgaggagcgtctctgcctggccgcccattgtctgggaagtgagaagcgcctcttcccggcctcatcccgtctaggaagtgaggagcgtctctgcctggccgcccatcatctgggatgtggggagcgcctctgccccgccgccccgtctgagatgtgaagagcgcctctgcccggccgcgaccccgtctgggaactgaggagtgtctctgccccgccgccaccccgtctgggaggtgaggagcgtctctgaccggccgccccgtctgggaagtaaggagaccctccgcccggcagccgccccgtccgggaggtggggggcagcccccgcccggccagctgccccgtccgggaggtgggggggcgcctctgcccggccaccctgtctaggaagtgaggagcccctctgcccggccgccaccccttctgggaggtgtacccaatagctcattgagaacgggcctaaatgacgatggcgattttgtcgaacagaaaagggggaaatgtggggaaaagaaagagagatcagattgttactgtgtctg

SEQ ID NO: 689 - DNA, 2000 bp, Homo sapiens
  misc_feature (1)..(2000): DMR4:120508101
taaagaacacctctaatagcattgtaagacagaaaattaagcggtataccatgagtggctttaacttgtggctctgatttggggatgagctgagaatgagtctaagcatatggttggtctggctaaaacagaagctaagaggggaaaaaagagagaagagaagaaatcaaagcccagtccattacctagagaatattcacatcacttctgcttatagttccctggcaagaacttagtcacatggccactggtagctgcaaggaatgctggagaatacaatctctagctggcagcccatgtgcctggctaaaactcagggagttttaagttgcattttaactaatgttgttttgtgcatctattgagatgatcatgtaagtgttccctttaatatattcttgaagtgaattgtattattattctagtttaagcaattttgtctacctgaaataagcaccaaggcaatatcaatgttatctcttatatacattcatagatttggcttactaattattttaaatttttacatttttgctgattacattttgctgatcaatgtatttatcaaatacatttttcattctcaataactgcagtagacttttatttataccctctgaactacttctatttacgttaatattctccaaattgcacaaatttccttatgattatccagttcaaaaactctgcatggatatttttcattcctaggcaagatggctgaatagggatagttccagtctgcagctcgcagcgagaccaatgcagaaggcgggtgatttctgcatctccaactgaggtacctggttcacctcactgggactggttagacagtgggtgtagcccgcagagggaaagcagaagcagggtggggcatcgcctcacccgggaagtgcaaggggtcagggaactccctcccctagccaagggaagctttgagggactgtgccctgagggacggtgcactccggcacagatactatgctttccccacagtcttcaaaacccgcagacaaggagattctcttgggtgcctataacaccagggcactgggtttcaagcacaaaactgggcggccatttgggcagacactgagctagctgcaagagttatttttcatgccacagtggtgtctggaatgccagggagacagaaccattcactcccctggaaagggagctgaagccagggagccaagtggtcctgctcagtgaatcccaccagattcactggcacctagatagctaggatccactggcttgaaactcttgctgccagcacagcagtctgaagttgacctgggatgcacgagcttggtggggggaggggcgtccaccgttactgaggcttaagtaggtgattttcccctcacagcataaacaaagccaccaggaagttcaaactgagtggagcccaccacagctcagcaaagctgctgtagccagatcgcctctctagattcctcctctctgggcaggccatctcagaaagaaaggcagcagccccagtcaggggcttatagatcgaactcccatctccctcagacagagcacctggggaaggggtggctgtgggcacagcttcagcagactaaaatgttcctgcctgctgattctgaagagagtagctgatcacccagcacagcactcaagctctgctaagggacagactgcctccccaagtgggcccctgacccccatgccttctaacagggaaacacctcccagcagggttcaatagacacctcatgaaggagagctccagctggcatctcaggtgtgcccctctgggacgaagcttccagaggaatgaggaggcagcagtctttgctgttctgctgcctctgctggagaaacccaggcaaacagggtctggagtggacttccagcaaactccagcagccctgcaaaagagtggcctgatagaaggaaaactaacaaacagaaagcaataacatccacatcaacaaaagaaatgaccacacaaaaactgcacc

SEQ ID NO: 690 - DNA, 500 bp, Homo sapiens
  misc_feature (1)..(500): DMR4:120582201
acagacgtcatgaagggatattaatttgggtataagtggtttgtaatatatattcttaattctcaattctgatactaaggttttctatcaccttttaaatctctatttcctccccaacacacataaaatagttggttttttttttgtttttttttgttttttttgttttttttttgagatggagtctcactgtgtcacccaggatggagtgcagtggcacgatctcagctcactgcagcctccacctcctgggttcaagcgattttcctgccccagcctcccaagtagttcagattacagtcttgtgccaccatctcaggctaatttttgtatttttagtagaaacagggtttcaacatgttggccaggctcgtctcaaactcctgccttcaagtgatccgcccaccttggcctccaaaagtgctgggattacaggtgtgagccaccgcacccaaccatgaaataatttttaataaaacattgaacttttcatacatgtt

SEQ ID NO: 691 - DNA, 300 bp, Homo sapiens
  misc_feature (1)..(300): DMR4:120784201
gatatcctttagtgatataactggacattctgtggtgttgtaaaaagagctctaagtgtaggcgttagactttcatggtgcgtatgtatgaaacttaatcagaaagaaaaagaatgtgactgcaaaaagaagaaatctgagacagtagcaagtaggaaacgcacctcatggtgtgtatgtataaaattaatccaaaagaaaaaaattgcctctgacaaaagaagaaatctcaggcagtggtaagtaggaaaagcacctatcagggacctgtttgctactccttgcgctgtgaaatcttga

SEQ ID NO: 692 - DNA, 1200 bp, Homo sapiens
  misc_feature (1)..(1200): DMR4:122192801
gctataataaaggtaagtaaagggtcttcatgaagaacttagaaaagtactctactagtttgctagggctgccttaataaagcatcacagataatgtggcttaagcaacagaaatgtattttctcacaattctagagtctaagagtcctccaacaaggtggtggcatgattggttccttctgagggctatgagagaaggatgtgatctaggcctctctccttgacttgtagatggctgttgttttccagtatcttcatgtggtctttcccttgtgtacctctgtgtccagatcatactatccagtcatattggattaggacagcatacactaatgacttcattttaacttaattacccttcttaagaccccatctccaaatatagtcacattctgaggtactgggggttaggacttcagcatatgaattttaggggttaggacttcaatgtatgaatttttaggttacttggtattcctagtatatagtatataatttatattaaagattaggggagagaagaaggctgtttggttgaggtaacgtgtaaattaagttttgaaagataattgagagttagccagggaaagaagaggagggtgaatcattgaggcaagggaagagttttataaatgcatgaggatagtggagaattgttctatagttatagtctatagtggttaagaggtatagattttataatgtcattttattttaaagtatttttaatttttaatatattatgaacatttttctacttcttgaagaattttaaacaaagaaggggacatttaccattaaatatgagggagcatctaagtttttatgtacaaaattagacatttcttaaaattagttaaattagtttagtttttctattcatgaactagcttttttgaatagagaaatacaagccaagtcgttcacttgagcagatattacggggccattgatagattagtgaaagagtgctgatactaacttgatgtattgactttttaaatgcttttttaaaaagtgccatctagctagcattattagaattatatattttgtcaagtagtatattcttttttttttgagacggagtctcgctctgtcgcccaggctggagtgcagtggcgggatctcggctcactgcaagctccgcctcccgggttcacgccattctcctgcctcagcctcccaagtagctgggac

SEQ ID NO: 693 - DNA, 1800 bp, Homo sapiens
  misc_feature (1)..(1800): DMR4:123010801
tgtccaatttctcaaggcaagttcttcttccagaattgtcttgtgacatactttgagccaattccctagttggttctgtaccagtaaactcatacccccagctattacatgtagcacattcaacattcagggacaaactttgatgtaagttaaactttttttttcttttctaaatattgcccattaagactgtgttttaaggattgttttctaatactttcttcactctttatcagaggtttgtcctcctaccttttgccttcaaaccaaaacatcagtaacagtcctctttccccaacatctttgttctctggccagcattgattattcttccccatgggggagcttactttctagtctatacctcaggacacagaatctgaactgcttttaaagtttgcttatatgagtttgctgagctttctgacccagagatatcttctgtctttgcctcgcatttaataaacatttggaacatcccttcagccagtcttggcagagtaggctttttatttccatgtatacaaaaactttattatcagctaaccatcaaaggaaatcagagaaaatggtttgaacttatgacccaactatttggacagattagggctaggaaatgtaatgcaaggcatgtatgtatagactttgtacacttttacatattggtttcactcgcgtccctgtgaagagaccaccaaacaaagactagggagggaccgacgtgttaaagaatgcctggacgtcaggcacctcagaccgtttgcccattttatgacaagaattatctagatcttgtaggatggaaaaatcgaaagtgccattttctggctatttggaaccactgtcaagtttatattggggtcaagcggtgttggagaagaaaataaaatgcttagattttagatcaggtgtgagctgaagaggttttaaggtcttgagaacacaggctaagggagaagaaggaggaatggagggtggaaggttgcctatagtgaaggagcaagtccagagaaaagagagggtagagacagagtgaaggggtggggggtgcttgcccccctggaaagtggagagaaaagagagggtagagacacagagagaaggggtgtggggtgcttgcttcccaggaaagtggagaaggggtgggtagagacatggagagaaggggtgggggttgcttgccccccaggaaagtggagaaggggtgggtagagacatggagagaaggggtgaggggtgcttgccccccaggaaagtggagaaggggtgtggggtgcttgccccccaggaaagtggagagaaggaagggtagagacatggagagaagcggtggggatgcttgccccccaggaaagtggagaaggggtgggtagagacatggagagaaggggtggggggcgcttgtcccccaggaaagtggagaaagggtgggaggtgcttgccccccaggaaagtggaaaaggggtagagacacagagagaaggggtgggggtgcttgtcccccaggaaagtggagaaggggtatggggtgcttgccccccaggaaagtggagagaaggaagggtagagacacggagagaaggggtgggggatgcttgccccccaggaaagtggagaaggggtggggagagacacagagagaaggggtgggtgagcagccaaagcaggtgtccccacaattgacttgccaccaagggaatgtgggtgaatgaccaaggcaggcgtccctgcggtgatcagacaccaatgaaatgtgggtgaataatcaggcaggcatccccgcagtgattaaacaccgag

SEQ ID NO: 694 - DNA, 1500 bp, Homo sapiens
  misc_feature (1)..(1500): DMR4:123073901
ttttaatattagtcactgattgcagaagttattttgcatagatgacttttggaataaatcttaaatgtaaatggtggtcacagacagttatctttagttagaagtaattttattgccttcaacatttcagagttttgagtccattcttgatctctttgatttctttcaatagttttgggacattctcagatagtattttttttttttttttgaggcagagtctcgctctgttgcccaggctggagtgcagtggcgcgaacttggctcactgcagcctccacctcccaggttcaagcaattcaccctgcctctgcctcctgaatagctgggattacaggcgcacgccaccatgcctggctaattttcgtattttttaatagagacagagtttcagctgttggccaggctggtcttgaactcctgacctcaggtgatccatccatcttggccttccattctcataaggggactctatactttttttttaggcctttccactggattacatatgtcttttgcactctattctgtttccattctttttttctttttttttttgtcactttgtgtattcatttggatgctttctagtaaccagtcttccattttaagaatcctctgttctgttttcactaatctcccattaagactatcttttgagttcttaatttttattatagtttttaggtttaggatttccctttgatggttttctaatggattccaagtccctggtgaaattcaactttttaaaaattttgctgtagttcatgtggatttttgtttttactatattagcactatctcttgccagattgtattttaacttgtttcacagattgtaattcactaggatctctcctcttcttaagagaaaattaaaagggagatgggattaaagccaaatgatactctagaaagcctttttcaaaaaatttcttctttcatttatagaatttagggtttcgaggaatgggatgaatagagatgtctatgcttttgttgataacatggtattttgggcttttctcaattgttccatctcttttttgggggcggtgggaacggagtcttgctttgtcgcccaggctggagtgcagtggcgacatctcagttcactgcaacctctgcctcctgggttcaagcaattctcctgcctcagcctcccaagtagctgggattacaggtgcatgccaccatgcccggctaatttttgtattttttcagtagagacggggtttcaccatgttggccaggctggtctcgaactcctgactttgtgatccgcccaccttagcctcccaaagtgctgggattacaggcatgagccaccacgcccagcctgttttatcactttataatcattatttttactgtagcttacttaatgccttgtgttgagttgagcgtctaaagcaattaggatattggtaatgtttctgtttgtgaaatgatttacgcaatcttggcttactgtaaccttcgcctcccaggttcaag

SEQ ID NO: 695 - DNA, 700 bp, Homo sapiens
  misc_feature (1)..(700): DMR4:125682501
ttcaatgcctccctgctcacatctgtaggggagcaaacagacagcaggctgtggggctctgaccccaaggcagtgtctaggggtgaatgtttacagctgaagccccagtgggcgtgtgttacagggcgctcttttaggtctataggcggcttgtgttaaccagataagttagaccctctaccttgtcgcaaggacagaaaggctttctgtatctcagggtttcttgccttggtgtactgggagaatccgatcacacgtgggcttggagaatgagtgcaaggttttattgagtggaagtagctctcagaagatggggaagccagaggggagatggttttcacctggagtcgggccacccccgtgcttggcagccccggctctcctccgactgccctggaaatctccgcctcatcccaccggtggatggcctgccagcgtgcccgtgcctgtcggtgtgctcttctgccagcgtgctcctctggatgatcagctgcttgtgtgttggccagcgagggtctcgggtttttataggcccaggattggggcgtggtgggctagagtggtcttaggaaacgcaacaaaaatgcctgtcctcaccttcggtgggggtggagccctagccggggaccacaccctcccttaccaagcacttgccttcccccttctttatcacacttttcccatcccagcactcccgtat

SEQ ID NO: 696 - DNA, 300 bp, Homo sapiens
  misc_feature (1)..(300): DMR4:126859401
tcacagttccacatggctggggaggcctcaggaaactcacaatcagggcagaaggcaaaggagaggcaaagcatagcttcccgtggtagaggaaaagggagagaagagtgaaggaggaagtgccacacacatttaaaccatcagatcttgtgagaattcactcactaccacaagaacagaaagggggaactccacctccacgatccactcacctcccagcaggaccctcctccaattccacatgagatttggtggggacacaaatccaaaccaaataattctgtccctggtccctcccaa

SEQ ID NO: 697 - DNA, 2000 bp, Homo sapiens
  misc_feature (1)..(2000): DMR4:127065701
cttgtgggcatttagtgctataaatttccctctacacactgctttgaatgtgtcccagagattctggtatgttgtgcctttgttcttgttggtttcaaagaacatctttatttctgccttcatttcgttgtgtacccagtagtcattcaggagcaggttgttcagtttccatgtagttgagtggctttgagtgagattcttaatcctgagttctagtttgattgcactgtggtctgagagatagtttgttacaatttctgatcttttacatttgctgaggagagctttacttccaagtatgtggtcaattttggaataggtgtggtgtggtgctgaaaaaaatgtatattctgttgatttggggtggagagttctgtagatgtctattaggtccgcttggtgcagagctgagttcaattcctgggtatccttgttgactttctgtctcgttgatctgtctaatgttgacagtggggtgttaaagtctcccattatcaatgtgtgggagtctaagtctctttgtaggtcactcaggacttgctttatgaatctgggtgctcctatattgggtgcatatatatttaagatagttagcgcttcttgttgaattgatccctttaccattatgtaatggccttctttgtctctttcgatctttgttggtttaaagtctgttttatcagagactaggattgcaacccctgcctttttttgttttccatttgcttggtagatcttcctccatccttttattttgagcctatgtgtatctctgcacgttagatgggtttcctgaatacagcacactgatgggtcttgactctttatccaatttgccagtctgtgtcttttaattggagcattcagtccatttacatttaaagttaatagtgttatgtgtgaatttgatcctgtcattatgatgttagctggttattttgctcgttagttgatgcagtttcttcctagtctcgatggtctttacattttggcatgattttgcagtggctggtaccggttgttcctttccatgttgagcgcttccttcaggagctcttttagggcaggcctggtggtgacaaaatctctcagcatttgcttgtctgtgaagtattttatttctccttcacttatgaagcttagtttggctggatatgaaattctgggttgaaaactcttttctttaagaatgttgaatattggcccccactctcatctggcttgtagggtttctgccgagagatccactgttagtctgatgggcttccctttgagggtaacccgacctttctctctggctgcccttaacattttttccttcatttcaactttggtgaatctgacaattatgtgtcttggagttgctcttctcgaggagtatctttgtggcgttctctgtatttcctgaatccgaatgttggcctgccttggtacattggggaagttctcctggataatatcctgcagagtgttttccaacttggttccattctccccatcactttcaggtacatcaattagacgtagatttggtcttttcacatagtcccatatttcttggaggctttgctcatttctttttattcttttttctctaaactttccttcttgcttcatttcattcatttcatcttccattgctgatgccctttcttccagttgatcgcatcggctcctgaggcttctgcattcttcacgtagttctcgagccttggctttcagctccatcagctcctttaagcacttctctgtattggttattctagttatatattcttctaaatttttttcaaagttttcaacttctttgcctttggtttgaatgtcctcccgtagctcagagtaatttgatcgtctgaagccttcttctctcagctcgtcaaagtcattctccatccagctttgttccgttgctggtgaggaactgtgttcctttggaggaggagaggcactctgctttttagagtttccagtttttctgttctgttttttccccatct

SEQ ID NO: 698 - DNA, 900 bp, Homo sapiens
  misc_feature (1)..(900): DMR4:128188401
acagcctaatacatctagctgaaggtttgttgattttgtttatcttttcaaaaaaccaactttttcatttcattgattttttgtacttgttttagtctcaattttatttatttctgccttgatctttattgtttctttctactaattttgggtttgatttgttcttttctagttcttttaagtacatcgttaggttgcttatttgaaacctacttttttgatgtaggcatttattgctataaaattctctcttagtactgctatgctgtatctcataggttttggaaagttacgtttccatttgcatttgtttgaagacattttgaagttttcttcttaatttctttattaatctgttgatcattcaggagcatgttgtttaatttccacgtttgtgtagattccaaaattcttcatgttattgatttctatttttattctgttgtagccagaaaagatacttgatatgattttgacttttttaaatttgttgagacatgttttgtagcctaacatatgttttatcctggagaatgttccatgtgctaatgagaagaatgtgtattctgcagtagtaggtgaaatgttctataaatgtcactaggtccagttggtctaggtgtagtttaacttcattgtatctttgttgattttctgtctggatgatctgtccattattgagagatgggtgttgaagccccctgctattatttgtattatagtctatctctcctctagatttattaatgtttacttaatatatctgggtgctccagaattgggtgcatatatttttaaattgttacagcctcttgctgaattgatcctttcctttatcatcatacagtgaccttccgtgtcctttttttttttttttttacagactttcacttgttctat

SEQ ID NO: 699 - DNA, 300 bp, Homo sapiens
  misc_feature (1)..(300): DMR4:132386201
ctgggagacaagagcgaaactctgtctcaaaaagaaaaaaaaaaaaagaaattagggggaaattgtaatacagagaatgagaagaagtaatccaaagacacagaaccagaaaagagaaagttaactgatgaaactgagtgaaagtaaaagtcttaagtgaaagctagctgctattaaggggaagactgagctcacagacactgttaccccatctcttcattaactcactcactctaaagtgagacctgctagttgacaagttgaacaatatttggagtaagtctttgtattttctaattt

SEQ ID NO: 700 - DNA, 1100 bp, Homo sapiens
  misc_feature (1)..(1100): DMR4:133560401
agggtgtcacagccctggctcggggagctcctaggtctaggctccctgaagggctgtagctcttctcccttctcttttctcattcttgtggttcaccacgtggcaagcaaggggcatgtttgaggcctgtttgtgtttgtgtgtgacagggggctgtcatgtcaacgctgccccaagcatgcacacgtgagctgggttgcaacagcaccaggcttggcctcaactttgctctaacattggagaggtagccaggagcagggagagggagccaggagcagggagaggccaagcagcaggagcaagcacttccaagcctgcaggggcagggggatgcttcccgggcctctgagagtgcagagatgccccatctgcagccacacagctaggtgactggagttgtgcctctggaatgtgaagctcccaccctgccaacttagaaggggatggggtttctgcctgatcctggctcacaccagctatgcagagggtgtagccccagccacgcctcccccactgcagctggcatcaatgcagtggccactccagatgagccaccactgccatcaatactattttggtatcactctcagacaccgtttcagcttccttaggtagcttgcatgggggagtcatccagatttcaaatcatgagggaccagaggccctagtacttttaccctctggtctggccattcttatgttttaccagacgtggaagcaacaagaagaaccacagtgaatccctcaagtccctgacacacacatatgggtctgctatgtgcatgtggagggcctgctacctacacatgataatcagaatagattatcctctacagtatatgaattatgtactttcctgctggacattgttaaatgacatggtgtatcatctcatgtttcaacttataaacagcatcttgtagcatagacctccaactcttcaaggtgtcattcagaatggtcactgtagctacgtgtttaatgatcacctatgcaggatttcatcactgtaaatcagacactctctatgccctcagatcataaaataatgaatgtttcttatcaaaatctattttcaagtaatattactccacttcaca

SEQ ID NO: 701 - DNA, 200 bp, Homo sapiens
  misc_feature (1)..(200): DMR4:134312901
tgaactcctgggctcaagcaatcctcctgcttcagcctcccaaagtgctaggactacaggcataagtcaccatgcctggccttggagttattttctaagatgagaaatacttaaagtttgtaccgtacaattcaccacctcatcttacattattctgttcaatattttttagtgtatgttagagttatctccccagattg

SEQ ID NO: 702 - DNA, 2200 bp, Homo sapiens
  misc_feature (1)..(2200): DMR4:135995101
cattgtcttggtgattaacaatcagctctttgtacttatgcaaattaaattcatacagtagatttttcatgtcattgtgcctgtaattagcactttgagaagttataatttttctttactttcctaagttttactcatttttttatttcatatttcaaatggggttaatagaatatttttcttttaagcaatcttaatatctatcataatcctttctctctttctctttctttttttttattttaggtattgcaaacctgcctttcatattttaggttttgcaaagaaaatgtacaaacacatttttaatgtgtttttctttctttatctctcctttccttatttccttcctttattcctcctttcctccttttcttcctcccattttttcatctttttttccctcctccatctctctctcattccaggacatataaacactatttttttttttgagatggagtctcgctctgtctcaatcttcactcactgcaacctctgcctccctgcttcaagcaattctcctgcctcagcctcccaagaggctgggaatacaggtgctcaccaccaggcccaggtaatttttgtattttagcagagatggggtttcaccatgttggccaggatggtctcattctcttgacctcatgatctgcccgccttggcctcccaaagtgctgggattacaggcatgagtcaccactcccagcccatataaacacttttgtgtggtgttttttcaaaaacttgtattcagtttttcttaggtattttaatccttgttatattaactttatttgagagttttcgtttttctttattttttctcaggggaaagcgcgaatgcagtcccccactaccacaaattatgcagttgagtttcccacatttggggaaatcgcaggggtcagcacatctggagtgcaatggataagcctcgtcctgggaaaaccacctttgtgatcatggtatctcccctgccaggtaagtatgagttttcttttttaatcaagagttaagataattgtagattcatacacagatccaaaaaatggtgctgagataatcagctagtcatatgcagaaaaataaaactggacctctaaatttttccatatagaaaagttaactgaatatagactaaagattttaatgtaagccctaaaactatgaaaatacttgagaaacacctaggaaatatgattctggacatgaatttggcaaaattttatgaataagtcccctaaaacaattgcaacaaaaacaaaaactggtgtgatctaattaaagagcttctgtacagcaaacgaaactgccaacagagtagacagaaaacctagagagtgggagaaaatattcacaatctctgcatgcaacaaagatctaatatccagaatctataaggaacttaattcaataaacaaaattaaagtaaaataaaatcatcccattacaaaatggtaaaaggacatgaacagacacttctcaaaagaagacatacatgcagaaaacaaatatatgaaaaatgctcaacatcaaaaatctttagagaaatacaaatcaaagccactatgagacactacctcataccagtcagaaggattattattaaaaaatcaaaaaacaacagatatttgggagattgcagagaaaagggagcacttatacacttttcgtgagatggcaaattagttcagccactatgaaaagcagttcagagatttctcaaagaacttagaactaccatttgacccaacacccccactactgggtgtctacctgaaagaaaataaattgttcttccaaaaagacacatgcactggtatgtttatcgcagcactattcacaaaagcaaagacatggaatcaatctagttgcccatcaacagtgagctggatatagaaaatgtggtacatatgcatcattaaatgctaggcagccataaaaaagaacaaaatcatgttgttttcagcaacatgaatgcacttggaggctattatcctaacaaatgacaggaccagaaaattgaaagcacatgttctcacttataggtgggagctaaacattgagtacacatgaacacaaggatgggaaagtcgacagtagggactactggaggggagagggtaggaggaggggtgagaagtgaaaagctacctatcatgtactgtgctcactacctgggtgactggatcatttg

SEQ ID NO: 703 - DNA, 1000 bp, Homo sapiens
  misc_feature (1)..(1000): DMR4:138485201
aatatataaaacactgtgacagtttattcctttcgttaaagggacgctcctttaaacactaataccgtgcatgctgctgagaataattgttcattataatttctccttggtctaagttttggtagaaaggcaacatgaactaacatttaaggtccatgaaatgtgttaagaatagcacatattccgtctcatttaatatcacaaaacagcctacaaaattggtgttatttatctcactttacataggaggaaacaggcttagaaaagtaagttaatttgccagcttagttagtggcaaaccctggattcaaacccaagcctgttcgatgccaaatatcacattcctactctcctatgccgcctcccagagacagagatcctcaaacaataatggaaaataatcttcacttcttgtcccagccatgcagtggctcccttgatcactgaatggagaacaatttctagctacaaccatgcttagcaggaaacaggaccatgataaatgattgacatctgccacagaagtcaaaggcagcagtggctatacaggacactgtatttgtcattattgcactacaacacaacacaggagaccaaaggaacattttcccaacttcacagttatgttcaggaacaaccctaaaaatcagttgatcgataaaatttcactccctaaataaagcctaagaagccaaagttaaaaataaattttgagaaatatagtaaataaaagagagatttatatgtgatatccaaagtataccagtcctgccaacttgacaggctaaatattcagcctctttttgtaataatcaacttggctctagtagtcataggaagttactacctcaaaccaattttccccaggcagaagagagagaagaaactctattccattctagagctatgtatcaaatgaagtacctgaactttgaatcaagctctacgcagatccaccagttctaagaactgggcccctgggtttgtgtgatactcagta

SEQ ID NO: 704 - DNA, 300 bp, Homo sapiens
  misc_feature (1)..(300): DMR4:140884601
gtgctttgtagcaagctgtggtactggagctcccccttgtgtttatgtttgagacacgtgctcaaccaagtcctcttcatcacttttgttttttttggccccctgacctgctgccttgttcctgtctgtgcttagatttcgggaagacagaagccagtcccttaggtaacaccccctccaaaagtcagaatattagacatcccactttacaatcatttttctctttctctgcttgagaagaactctgagttgggagttttctccaatggcaccatgctatactagaggggaggggctctg

SEQ ID NO: 705 - DNA, 100 bp, Homo sapiens
  misc_feature (1)..(100): DMR4:141421201
ctccttcttctttctttccttcctgtcttcttctagtgaagataatttcctctggtgatataatttagtttcttgctttttattttttatgtgtctgttg

SEQ ID NO: 706 - DNA, 1900 bp, Homo sapiens
  misc_feature (1)..(1900): DMR4:141826601
taataaatgtatcatttatctgatacaagtgttaggagcacaaatgggttaataatggaaagtacttgggatggtgtctggcagaaagtaagcactcagttcatcatcatcatcatcatcaagtaagttataaaatgcaagctagaaatgcatgtggaatcttccctgatgtctttaaaattgaaatggtttctctcatttctcaagcttttttaggcacctttcaaggcaatatttgtaaaagcccatgaggcatgagcaaaaatgtgtgtgctatgatcttctatgttctctgcagttcccaccttggttttcttctgctgttgctttgagacctgttatttcaaagaggaaaaagaaaagcaaattccatacaaatactctgagtttcaagtagggttaaagcatcgatggataaaggtatccttctgacagtaacacaagctaatgtgaatttttgtttgaattttttctctctgctcttggacagggacaaacattaaaaggattatccagggcatgatagctcttctccaaaaataagctatttgtgtgacattcctttctggttgtcacttttctttgtgtcagcttggaaaaaactgacagaatcactttgtccatgtaattcaaacaataaaacattgagttgtgtaattttaaggtgccttccagttccaagattctatgatttcagccattgaaggtaatgttggaaaagagtcttttaaatgttatgttcttataatagtttctgtgtcatttttcagtcaatgataattagtgtcacaattaggaaaatagatcctaatgttcattaatgatgaagtctaatattctaaggtgttgtgatattgtaaaataatgtatttggtctgtccccattatgcaactcttaaaatctttggaatctccaaagtgatgtctttttgtgtgccagtgagttaactgatgggtggcagcccctaggtagctgcaggatgggagttagtcacaggaaagaccaagacataattagagggttgaaactttctgctccatccctgaatctctagggagagaagagggcctcaagattgagctaattatcaatagctaagtatttaatcaatcatgtccacataatgagactttcataaaaatctaaaaggactgagttcagagagcttccagatagctgaacacgtggaggttcctgtgggtggttcgcccagagaaggcatggatgctacatgcctcttctcacatgccttgccctatattttccttcatctgtatcctttgtaacatcctttgtaataaaccagtaaacataagtgtttccctgagttctatgtgtcactctaccaaattaataatcccaaggaggggatcatgggaatcacgatctattgctggccagtcagaagtataggtaaaacaacctggggcctgcattgggcctaggaaatggatgggggcagtcttgtgggaccgaactctcaaactgcaggatctgatactgtctccaggtagatcatgtcaaaactgtatttaattagaagacacccagctgatgtccactgcagaattgagtgcttgtttgctattggggagaaattcccatgaatctggtgtcagaagagtgttttgagagtataatgggagaaactgagtttgtttattcctccctacacaggtttcatttagtattatcttttctttgtcatttccttttctaaatgtaagagcaatgtttgatggttatagggggaagatttttgaaggcagttgataatattgaaggtttgaataacaaatacaaatatatatgcatatatgtatgcatatatatatatatgtaagatttaagcagaataaccgtgcatttattactagtcagtcatttactatcttaaga

SEQ ID NO: 707 - DNA, 100 bp, Homo sapiens
  misc_feature (1)..(100): DMR4:141876101
tcagtaggcagcacccaacccctagtccctttcccaccaaactgttcttgaaaaatcctaatcactgactctttggggagactgatttgagtgataacta

SEQ ID NO: 708 - DNA, 200 bp, Homo sapiens
  misc_feature (1)..(200): DMR4:142457001
cataatcaattatttttttacagattcaaaggcaatacaatggatagaaaaaataattatttaaataaatagtgtaacaattgaatatccatgtgcaaaagaacaaaaaaacacatttcagaccttatacaatcaactcactattaataatctaattgtaaaacctaaaactataaagcttatacaggaaaatatagaag

SEQ ID NO: 709 - DNA, 2300 bp, Homo sapiens
  misc_feature (1)..(2300): DMR4:143101301
ggcttcagacgatcaaattactctgagctacgggaggacattcaaaccaaaggcaaagaagttgaaaactttgaaaaaaatttagaagaatgtataactagaataaccaatacagagaagtgcttaaaggagctgatggagctgaaaaccaaggctcgagaactacgtgaagaatgcagaagcctcaggagccgatgcgatcaactggaagaaagggtatcagcaatggaagatgaaatgaatgaaatgaagcgagaagggaagtttagagaaaaaataataaaaagaaatgagcaaagcctccaagaaatatgggactatgtgaaaagaccaaatctacatctgattggtgtacctgaaagtgatgtggagaatggaaccaagttggaaaacactctgcaggatattatccaggagaacttccccaatctagcaaggcaggccaacgttcagattcaggaaatacagagaacgccacaaagatactcctcgagaagagcaactccaagacacataattgtcagattcaccaaagttgaaatgaaggaaaaaatgttaagggcagccagagataaaggtcgggttaccctcaaaggaaagcccatcagactaacagcggatctctcggcagaaaccctacaagccagaagagagtgggggccaatattcaacattcttaaagaaaagaattttcaacccagaatttcatatccagccaaactaagcttcataagtgaaggagaaataaaatactttatagacaagcaaatgctgagagattttgtcaccaccaggcctgccctaaaagagctcctgaaggaagcgctaaacatggaaagggacaaccggtaccagtcgctgcaaaatcatgccaaaatgtaaagaccattgagactaggaagaaactgcatcaactaatgagcaaaatcaccagctaacatcataatgacaggatcaaattcacacataagaatattaactttaaatataaatggactaaattctgcaattaaaagacacagactggcaagttgggtaaagagtcaagacccatcagtgtgctgtattcaggaaacccatctcacgtgcagagacacatataggctcaaaataaaaggatggaggaagatctaccaagcaaatggaaaacaaaaaaaggcaggggttgcaatcctagtctctgataaaacagactttaaaccaacaaagatcaaaagagacaaagaaggccattacataatggtaaagggatcaattcaacaagaggagctaactatcctaaatatttatgcacccaatacaggagcacccagattcataaagcaagtcctgagtgacctacaaagagacttagactcccacacattaataatgggagactttaacaccccactgtcaacattagacagatcaacgagacagaaagtcaacaaggatatccaggaattgaactcagctctgcaccaagcggacctaatagacatctacagaactctccaccccaaatcaacagaatatacatttttttcagcaccacaccacacctattccaaaattgaccacatagttggaagtaaaactctcctcagcaaatgtagaagaacaaaaattataacaaactatctctcagaccacagtgcaatcaaactagaactcaggattaagaatctcactcaaagccgctcaactacatggaaactgaacaacctgctcctgaatgactactgggtacataacgaaatgaaggcagaaataaagatgttctttgaaaccaacgagaacaaagacaccacataccagaatctctgggacgcattcaaagcagtgtgtagagggaaatttatagcactaaatgcctacaagagaaagcaggaaagatccaaaattgacaccctaacatctcaattaaaagaactagaaaagcaagagcaaacacattcaaaagctagcagaaggcaagaaataactaaaatcagagcagaactgaaggaaatagagacacaaaaaacccttcaaaaaatcaatgaatccaggagctggttttttgaaaggatcaacaaaattgatagaccgctagaaagactaataaagaaaaaaagagagaagaatcaaatagacacaataaaaaatgataaaggggatatcaccaccaatcccacagaaatacaaactaccatcagagaatactacaaacatctctatgcaaataaactagaaaatctagaagaaatggatacattcctcgacacatacactctcccaagcctaaaccaggaagaagttgaatctctgaatagacc

SEQ ID NO: 710 - DNA, 1100 bp, Homo sapiens
  misc_feature (1)..(1100): DMR4:143534701
tatgactgtatttgcagggagaagtcctaagaaatcacttgatactcacgcagagaaatttctttttcatgtattttatatacaattctaagatgctgaaatatgaccttatgtgtaatattggtattacctgtttatttttgtcctttttaaggttttgcgtccattcctccttcgtcgaattaaggctgatgttgaaaagagtttgcctccaaagaaggaagtaaaaatctatgtgggcctcagcaaaatgcaaagggaatggtatgtattctcagatgtacttgatagcactattgattcttccctaaatttcatgtgtattttgttttcctaatttgtgtcttcatggaattccaatttgctggattgaactcaacctgaaaagagttttcttgtcacgtagtataggacttgctcattaagttcgttatagaaagttttgaacctgttagatgacagaatcaggatggaaggcttatgaatccaaaattaaaattgggatttaattaaacggggttcatatgaaaccatctacttgggatttttaaaaaggaaactgtgatagcacagtgtgggagatatatggttcacttatagttcataaatactgggtcagtgtaaagtagctgcagaaaaagatactgttggccttaatgtaaatgtagtgttcaaaggagaggaaataaatatagctacccttttctttactggtctcatcatatttcatgtatatttaactgcatacttaaattttgataagtatttgcaagaggccagagttgtttggttaaaggacttaatatcatatagagaactgggcatgttatctgggtaagaggttatctgtagaaggtggttggtcctaaatgtcctcaaaaacttctgaaagggtagcagatattaggcttaccttggatggctctaaaacagaactaagatgagtcaatgctaaggaaagacaaatcttttttagttaaacatttgagtgaactttatatcagaattgagatggaaaggtctgccttgttgtttaagcatagattgcctaggctacttactttgttcaaaggatccaaggctctaaaactttgatgctt

SEQ ID NO: 711 - DNA, 1300 bp, Homo sapiens
  misc_feature (1)..(1300): DMR4:144244101
tttagtgttcctttttattataatatttattattctgaaatctacctttttaaaaattatactttaagttctgggatacatgtgcagaacatgcaggtttgttacataggtatacacctgccatggcggcttgctgcagccatcaacccgttatctacattaggtatgtctcctaatgctatccctccacttgccccccaccccccgacaggccctggtgtgtgatgttcccctccctgtgtccatatgttctcattgttcgactcccacttatgagtgagaacatgcagtgtttggttttctcttcccgtgttagtttgctgagaatgatggtttccagcttcatccatgtccctgcaaaggacatgaactcatccttttttatggctgcatagtattccatggtgtatatgtgccacattttgtttatccagtctatcaatgatgggcatttgggttaattccaggtctttgctattgtgaataatgccacaataaacatatgtgagcatgtgtctttatggtagaatgacttacaatcttttgggtatatacccagtaatgagattgctgggtcaaatggtatttctagttctagatcattgaggaatgaccacactgtcttccacaatggttgaactaatttacactcccaccaacagtgtaaaagcattcctatttctccacatcctctccagtgtctgttgtctcctgactttttaatgattgtcattctaactagcatgagatggtatttcactgtggttttgatttgcattctctaatgaccagtgatgatgagcagttatttcatatgtttgttggccacataaatgtcttctttgacaagtgtccattcatatctttggcccgctttttgatggggttgtttttttcttgtgaatttgtttaagttctttgtagattctggatattagaccttcattagatggatagattgcaaaaattttctcccattctgtaggttgcctgttcactctgatggtagttattttgctgtgcagaagctctttagtttaattagatcccatttgtcaattttggcttttgttgcaattgcttttggtgttttattcatgaagtctttgcccatgcttatgtgctgaatggtattgccttggtttttttctagggtttttatggttttatgtttaaatctttaatttgatgcaataaacttacatgtgcatgtgtccttatagtaaaatgattatagtagaatgacttataatcctttgggtatatacccagtatatgcccaattgcaacaaaagccaaa

SEQ ID NO: 712 - DNA, 900 bp, Homo sapiens
  misc_feature (1)..(900): DMR4:144791601
caaaagacttttctggttccaagatggccgaataggaacagctccagtctacagctcccagcatgagtgacacagaagacgggtgatttctgcatttccaactgagatgctgggttcatctcactggggcttgtcggacagtgggtgcagcccacggagtgtgagctgaagcagggtgaggcatcacctcacccgggaagtgcaaggggtcaggaaattccctttcctagtcaaagaaaggggtgacagatggcacctggaaactcaggacactcccaccctaatactgtgcttttccaatggtcttagcaaacggcacacaaggagattatatcccacgcctggcaccgagggtctcacacccatggagcgttgctcactgctagtgcagcagtctgagatcaaactgcaaggtggcagcgaggctaggggaggggcatccaccattgctgaggcttgagtaggtaaacaaagcagccaggaagctcaaactgggtggagcccaccgcagctcaaggaggcctgcctgcctctgtagtctccacatctgggggcagggcatagctgaacaaaaggcaacagaaaccactgcagacttaaatgtccctgtctgacagctttgaagagagtagcagttctcccagcacgcagctggagatctgagaacggacagactgcctcctcaagtaggtccctgaccgctgagtagcctaactgggaggcaccctccagtaggggcagactgacaccccacacagcctggtacccctctgagatgaagattccagaggaacgatcaggcagcaacatttgctgttgagcaatatttgctgttctgcaggctctgctgctgatatccaggcaaacagggtctggagtggacctccagcaaattccaac

SEQ ID NO: 713 - DNA, 400 bp, Homo sapiens
  misc_feature (1)..(400): DMR4:146592201
tacaaaatccagtctattcttatgccttgaggcatgactgcaactaaaccattaggggatgcaaatggaatcttctctgacaaaaattcagtgtctagcacactgtctgggccacacacaaaaccacccattcgtaaatgggcttttcctctgaacattggtgggcaggctctgcgtaagcatggaggaaagtttgacttctaggcctattgaaagtaaaataacactctaaaattttccttaaagttaacagataatagactgagattgaaatcagttttagtcactgaatttaaaaaatgagacatttcattaacttgagggcttttgaaaagcagcactattgctggggagtagatcatttgtttctaaccttactgttctgtagcctgggattcaa

SEQ ID NO: 714 - DNA, 1100 bp, Homo sapiens
  misc_feature (1)..(1100): DMR4:147024001
ttatattagaaaggttaggaatttgaatcaagtctagtgaaaatctgaaggccagtaaaacaattgggatctccagttttgtgtcttttagaaaggctcaaaaatggccagtgggtatctggtagaccaagaagaacagagcaaggtggattccactaatgtgtatcaccagcaatcatttttaaggtattcaactaaaggtcacacatacttaggcattctattgaaatgtgttaatattgacaatgataaatatgtggagattattttcccttgcactttctcctaggacacttctcaaacgtactatatcatattaaaagtagtctgaaagagtattttaaaacaagtttcattaaggatactacatttcaacctttatactttattatataatacaaagcttacattgtactctccctgcttcctgcccctataaagtattacattaatttattttcccttgattgactatccctatgcagtagagataaatccttttgaagctacaccactgtctaacacaccaatattatggacccttattattctcattcaccattgaaaaagggatgtctaaagaggctagccagatttccaaaaatgtcagaagacaatactggcaaaatccagcataaaatctattcttcattttcaaaccatgagcatttaccacaatgccaatatacattttaacgctggcagtaaacttttgttctacattaaccttggtcagaagtcaaggttcctaaagtctttttgattgaccaagaaaattactctggaatcatgaggcttatgtttttctaatataccaaccaaccaaccaaaaataatatgtgtctcagagctatcctttgaatgaacttggccgtatctcagaatattaataatgaatcgtaaatgtttgataagcaaagaacatgattataggaaggagaaaaaaaactgaggaacacgttagtgacaaataacttttttttttcattttactataatgagaaataccatctagattcctgctgaacagagtaagtctggaaaagggagcattaggaggttgtataagttttctaatgaaatcagacgtcattgcttca

SEQ ID NO: 715 - DNA, 1300 bp, Homo sapiens
  misc_feature (1)..(1300): DMR4:151545201
aaagtaaatgcaatgactttttgcagtttaatctttctttgatattgtgttaattaagccataaaaaactagtagtttcaaggcagaacatacatgttaaattcatatccacccatattgctaataagattgactaaaatttccaaggcaaaatatttccttatccttcttttttttttttttttttttttttttgagacagagtctcgctctatctcccaggctggaatgcaatggcatgatctcggctcactgcaacctctgcctcccgggttcaagcaattctcctgcctcagcctcccgagtagctgggactacaggtgcccactgccacgcccggctaattttttgtatttttagtagagatggggtttcaccatgttagccaggatggtctcgatctcctgacctcgtgatccaccggcctcagcctcccaaagtgctgggattacaggtgtgagccacctcccccagcctccttatccttcttagttttcagaataacctatctatatccctcctcttgtccttaacaaagaacaaaggatgtaactagttgattataagaattattttgaattaaaatttccctattaaaaaaattgaaaaagaaacctgctttgaaaaatgtctcaccttcagggaaaggtgaatgcctgaatgctgttatgctgtttattatgcttttggatgagaaactttattcattcaaatatttcttaagggcccatgtgatggttaattgtaagtgtcaacttgactggattaagagatacctagatagtaaagtgtcacttctgggtgtgtctgtgcggtgttcccagaggagatcagtatgtgggtgggtgggcagactagtggggtacatctgccctgagtgtgggcatggaacatccaatctgctggcggcccaggtagacagaaaaggcagagaaaaggtgatttcctctctctgtctctctctctctcctgaagctgagacactcttcttttcctgccctttgacatcagactccaggctcttcagcctttggactcccggatttataccagcagcccccactacctcactctcaggttctcaggcctttggccttagactaagaattataacattggctttcctggttctgaggctttcggacttggactgagccacactaccggcatccaaggtctccagcttgcagatggactcctgtgggacttcttggcctccataattgcgtgagctaagtcccctggtaaatactctctcgtctatctatctgtctgtctggagaactctcactgatacaga

SEQ ID NO: 716 - DNA, 300 bp, Homo sapiens
  misc_feature (1)..(300): DMR4:151848001
tctcttttccctaccatctaataaaatgctcagaaagtagcatgagtgagtgagagattaattgatcgatttcccagcaccaaataaacaaggaaggaggaacaactttatgccataagtgtcaagaagtagcagctacaaaaagaaacagaagatgctgttggagctgaacagggctcctgacctcacagcccctttccctccctctccccaaagccaagccctttacaggaaggatggccaattaatggaaaccggatgactctcaccaatgctctccagcttcaagagaaacagatt

SEQ ID NO: 717 - DNA, 2200 bp, Homo sapiens
  misc_feature (1)..(2200): DMR4:151968301
caagaaaagaaaaaagaaaaaaaaggaatagaaccaggtctgagtgctaaaaccttggagaaggtatagtagcagctaaacaggcaatgtgttattgttacaacttgacaactacgcaggtccacaaaggaatggaagctgagaaatgtggagtaacatgttcaatgtcacatgggttctaagcagagaggtcagaattcaaactcagatttctgcatctgaaataagtgtttttaacccctctgcctaccatttgattgaaacttaaattgtagatgtttgaacattttgattgacaaggatggattttcaaatggtttgaccgaaaacctctctctaccacacagaaatcaaagtgggaaaaggtagccatgacccacggtgacctgagtctgttttataggaccagaaagagccccaggctgttttttctcttctgccccacacgtttccatgctacacccacccacttttggatgtactctgcacagttgcctttttattcaggaatctttagagggcaccatctgttcaccaggccctgtgtgacgcgctggagttaccaacctgagtacaacttagtccctgaccttgagaagtccgcattattacccttcagggaacaaagcaagagtatagaaattgcatgagcggaaaatcatttcagggatggatccagctgcttttgcacatgtgagaatggccatgccaacttagggtaccccctcaaagagggggtgaaggaagggcacctgagccccactgcctgtccctccccatcctgtgtcctctccaggacatgctgattgccactgtctcttcaccccggcagctaaagaaagttgcatgggacgtggtggggaaggaaatcaaaagtctagaacccacacggaatgctggtcattcttcatctctcatttgtcgctctaacaacatgtcatttcacggctcaagtgaagccacgtttcactgtagtttattctctcagaagctgaagccccacgctctggtttctatcccacgtactgtatttaattttagcaaaatcctagtaaataaaataatttggaaaaatatggaagttaatgagatttagcttatatacccatagactcatgcatttattatggagagtttattaaagtgagttgatatttcatatagctttaaaacaaacacaccaacccagttatttcttccagaatattgcccacagaactgtgggcggcatactcctgcccagtatacatgatttcacacacttctcatagccttgaatgtttgctttcagaagaggatcttttcaaatgttttaggctggacattaaattcagtccgttattgtgtttagttcagagcagaaaacaaactcactttgaacattgcagtggatttttgcttaatagagacacatccttcacttatggccagcccttggcactaagaaaacaaacctcatttatcctgcacgtgaggtgagatgtcattaagttggaaattattaatgacaactaatggttggtagttattaatgacatttgtgagagcaggataaaaacaataattaccataatttgaggtgtcatgaataagcagtaattgtaatagtgattattattataataatgagtgagaaaatgattttaggttattaaatcagcaagaataaaggaagcctgcacatgtatatatgtatatttgattgtggaaagttgccagataaaaacaatagtcactctctcttttttacccgctttggtgtttttattttattttttaaaaaatttgtgtgggtccttagtaggtgtatatatgtatgtggtacatggtacatggtatgttttgatacaggcatgcaatgtgaaataagcacatcatgggaaaagggatatccatccctccaagcacttatcctttgagttaccaacaatctaattactctcttagttatttttaaatgtacaattaaattattattgactatagccaccctgttttgctatcaaatagtaggtcttattctttctattttttgtacccattaagcacccccttctcccctccaatcccctactacgcttcccagcatctaataatcatctttctactctctatgtccatgagttcaattgttttgattttcagatccctcaaataagtgagaacacatgatgtttttctttctgtgcctggcttattt

SEQ ID NO: 718 - DNA, 3700 bp, Homo sapiens
  misc_feature (1)..(3700): DMR4:152011301
gtctggtcagtaacctgcacatcctcatccactagcgaatgcaggccctctcagtttccctccagttctagtgattccatgaactccgagtaaacctacctagtggttgtgcgtgtgtgtaggggtacacatctttagtcatcttagtttttaaactcttaatgtcacttgataattgtttaatttgttgagtcactacgatgcctgcagcgtttccgtgtcataaagtcaaagcttgctggaattcattgtggacttgtattttccaagcaaagccctgagttatctcaatttagtcatttaaactaggaatttaaatgaccagttttaggagtatctactcctggcttcctggatgatgaacacgtggccaccttcttccggagactatgaagaaagcagccgtggcctggcccctcctgactctcacactgagaatgcagaagccccagtgcttttctgcccatggaagagacagagggtgtggccatggttgttatttttagtggttttctcttctaacccttccccaaaaatgccagttggggcagggagtaagtacgtggttctttatcaatgtccaactcttcttggatctgttcacataactgacatgcattttgtgagctaacttcccacctggctccctcttatccttccagtagctcacgttcccgatgtcaccatgtcctcacctaccgaacttgaatttaatctaaattgaaattttactgtcatgacacatttggagttgcctgggatcctatctggggcaaagtggacacaaaacatgaataaatgaactgataattccctggcctttctcccctagttgtaggtacaggtgtgtctaggggtggggaggtaatggaagatggggaaaacagaactgccttggtgacttggggtagaaatgggggtgaagcttttacttgacatttaagtgaaatggggtaacagtgaaaagaagaagtgtgagggcttcagcgtgtctgaaagcagacttgtatgaggagaagcaaagaaccacagagacaatgtgatttctgaagtgacgggtgatgtttttctttagttttcaattcaatattgaggcaccgagtatctagtcaggaagaccctgtcagggaagggccaaatctttattgagtcctccattgggccagtggctggctttcatatgcattatctcattgagtccttgcaatgacccttccacagggattgttcagattttataggtggagaaactgaggcagaaatggggttaagtcaggggtccccaaccccagggccagagactggtagcagtctgtgccctgttaggaaccacgccacacagaagcaggtgagcagtggcaagccagcattaccacctgagccccaccttctgtcagatcagggctggcattagattctcataagagcacaagccctattgtgaactgtgcatggcggggatctaggttgcacattccttatgagaatctaatgcctgataatctgaagtggaacagtttcatccccaaactatctcccaattcctgcctactatctatggaaaaattgtcttccatgaaactggtccctggtggcaaaaaggttggggacttctgggttaagtaatgggcccaaggacacacaccagcaaagtgcaaaaattagtatttcaatacagtttttcctatcaccttcttatatgacatcttgggaccacttagcccattaaaaactttgggccataaaattatgaataatccaatgtctttgaaattgcctttgcaaagattatgacagagagagaagtctagcatgactgactccatcttgcttctagcctcacaggctggctgtctttgctcattcctaggcatagaccaagctaaccatagggggaatttagtttgctgtttaactttgaagcaaggatgataatagtcccacgtaaaactgacttcttcctgttcagaggctggaaacacctttgtaagactaatgaaaggccacaagattaggattatgggaggagctcaaattctgctaaaaggtaggtatatttctataacctcttactgctcaggagtcacgcagctaggggacacaagatttgtgacttctccaattgctcctacagatgacatcactattgtagaacctaagattggtcttttgagatgttttcctggctgacccacccggactcatgacttatcatgattcaacccatcctgttgctcccaacccaagggtggattcagctcatggggaccacgttccatattcctatgattgcatccccaaccaatccacagcacccactccctagtcccctgcacaccacactgtctttgaaaaaccctaatctccaagcctctggggaaactgatttgagcaaaaaccccatctcctgtgtggctggcctcctgtcaataaaactctttctgtactgtgataccacggtctcagtcacctgcttttttctgtgcagagggaaagaagaacccatcagcaattatatcgtctccctcaaggcaagtaaaatctgagagatggagatagaaaatccaggaatggctactgaattaagaaggagcaagaaaggacaaaacaagtgtttttaggaaggtggcaacacctccggttggtctaaaggatctatggggaagcagctgcagacccagttcactgctccagggtcctgccacagccataagtctagaaatgacccagatcctcaaacagagttttcctgtgtcccaggaagagttgcccactggccagtttcctcaccttcagctcatcaggcaaagcggggaagaaggcaggctggagtgcctggaaaggacagagaggaggcatccaggtggagggagaagagatccttacaggtaaaagagacgcatggttgggctgggtgccagagttgatttcccctcctctctccacactaggaactggtaattgagcacacatgtctttgtgtgaagggctcccaaattgaagtgatagtgacaccctcaaaccctgaagaagagcataggggagtaactactgcacccttatctctgcccccagctgggaggctgatggatactattaaacggagcctctgtaagtggcatttgtggtggcaggggcggggctgggggttggagagagaaagaaagagaaagagaaacagagagaagcagactgggaagtgcttgctgctttccttctcaaaatagtccaggtgggaggggtgataactgagaaatgcaaatgcatgatttggaggatttcatggctgttgcccaagatagtgcagggtgggtgccacctgaagaccagggcctaaaacgctcttggttgctaccttagatgcaagaattcagacctatgtctctaaattagaataattgcattaatgcagtctcctccctcaggctcctctttaggtttctaacacagcactggaagagaattcaggaataaaagatgtgagctcaagtctttatcagctatatgaccttaggaactcctcttaacaacctctttagtctagattgctcatcagcaacttcacagggccattactaaaaaacaagcaccagtgaagctgaaagcattttgcacactgtagaatgtcacatgaatagtgtttatttgttacaaccaaggtctagccttgggaggtctaaaacaccacagcccagtttaa

SEQ ID NO: 719 - DNA, 700 bp, Homo sapiens
  misc_feature (1)..(700): DMR4:157065701
gtgagccaccgcgcctggcctgtttcttttttttgtttgagacaggatctcactctgttgctcaggctggagcacagtggcacgatctcagctcattgcaccatctacctccctggctcaagtgatcctcccacctcaacctcctgagtagctagaactaggcatgtgccaccatgcctggctaattttgtttattttttgtagagatgaagtctcactatgttgtccaatggtatatttaccatcaaggattattagctgtagacacatttctatttatagctttgattagcctttcctgggttacctgtgtagccttctgcatttcaacctagggaaatatctaataagtttattaaaaaaattattaagtttctattatgtcaccatgacagtgctaaatgcagaagatacagtgatgattcagataggcataatctctaagagaccttacattttagtggaggagacaaacaagtaaagaaacaaacaagacaattgcaggccgtgataagggctgtaaggagaccaaatagcataatgaggtggaaagtaacatgtgatgctaattagggggacaggaaatgctaagaacacatttcaggtaatgataaatgagaacactctaactgtaggaagaattggtaaaagagcattcctcataaaatgcacaattgtaaaggcctttaggtggagatag

SEQ ID NO: 720 - DNA, 3100 bp, Homo sapiens
  misc_feature (1)..(3100): DMR4:157720001
actaagcagaccctccagcatgtgagagctgtgctgagaacgtcagcatggcattaaagagagagtctagtacaacaaaagcaaattaggaagtggaagaatgaatgaaaatatgaaaagattgggcacgtgtgataagctaagctatggaatgatctaaatatgtaagtatataaaacaaacaaaaaataacaatgataagagccatccaagcccatattttagttaaaaccactaaaatgatttacaataaaatcgtatgtatgaatgtgtatggggtgaggagtttaaaaagagtatgttcgttgttcaaattagactttccgggtattttatttagagttttgagatgttaagcaagatatcaaatttttgcatctttattattggccgatgatcctcatacaaagctaatcaataaatacaaacagaagtttgatttatctgctctgcttcagtcaaacatgcattttccttcatgtatacgtgcatcttctttacctcccatcaacccttcatcctactccaattagtcttctaaatctattgctttaataaaattgctttggctaagaaagtaaactcactggtgctatttttaatagacacttttaaatccccatctgacttgatgcctgagaaacagagtggttgacagtttacaatgtattatcttagtgagaacatcttcagtcatttttagtctatgtggagttaaattgagggtcaccccaggtctagggggcaacaggtagcccaagcctgattaattgaagcatatataacaatatccttagcatctgtagttaatttgtaggaggtcacatgaactaactgaattccattagcattaatgctactgattttgacttagtgaccatgaagcaagaagttccttttctacggacttctgaaaagaatttgtcaacctagagaatggatcaaaatataaaggacaaatgcttcagtaagatcttcattaacttggtttctggcttctgtatccttctgcacacctatttatttctctgtgcactgttacaatggagggtagaactgaaagtcagaaaaggaccaactgatatgtgtgtgtgtgtgtgtgtgtatgtgtgtgtgtttttctgtccctagatatcaccacacttgaagctataatacaaacatttccaaataaatcccctattttcttgaagttgtgttttgtctgttacaaataaaaattttcctaaatataatcactcaccacattggagagttaacataactaagtagttaaggatgagagttgtaaagtcagacttccagtgtctttggtaaaaggactagcttcttgaaatttcaattataccacatgtaaaatggtgataataatgaaaccgacctcacatagttttgtaaggactgagcaagatgaagcctataaagtgattagtaaagggcctgaaacttggtaaatagtgcagtttagtttatattgttgatgttattgcagccattatcattattattattttccatcctgcttaagacattctcttcattttccctttgttgctccacattcacgtggttttcctttgatggcttcttctcagctcttatagagtttattctaacttatttaaaaatgtatattgatatttctcggggctcagtctatcttcccattttatctaactctgtactcttcctaggttacctcgtttatcctcatgatatttaataccgcccatccagatatatgtgtacaaagccaaaccattctgctgactgctggattcatgtatttatctctaccataaggaatttacacttccatatctcacagtgaacaggaacttcttcatacagcacatttgtgatctccctcattcttatctgcttctcttgtaagggtctacatctcagcaagtggtaataccatctacacagctccttagaccaaaaaacgcaagaatcactattgacactttcctttttttttaccctaaatccaattaattgctgagtgctatcaattcttcttttatttgtacatgtattcagttctctgtatctctgctattgtccatatctccactgtctttttataactgtacttaattcctccaattttgatcctatatcgtctattttccatatagacactagaatggcctttcaaaaataaaaattaggtatgttactcttatgcttcaagctgtcaatttcttctcattttccttagaatatagatccatatctttaatgtgatttatactgtgcttcaccagattggcagttttccacatttttattgaccaagttcttttcctgtctcagagactttggcaggacacttattccctatgcctgcatgtctattcctgtcctagccatatatccatccagtcatatcccaagactgactctattgttacaaagtattctgtaactttccatatctatgatatttattggggcccaataaatgttttcaaatagatgaatagcacttatgtaatgatactttgttgcttattatggcaaatataaattggcagaaaacactactgtgactgatgactaccacccacttctacttagagtctgtgatggttaatttaatgtgtcatttttaccaagacagtaggtgtctagatatttggtcaaacaatcttctgagtatttctgtgagaatgtttttagataaaattaacgtttaaattggtagactcaagaaagcagataatgtgggtggggccataaaattagtagaaggcctgaatagaaccaaaaggtgagccttccttaagtaagagagaattctttcctgcctgagtgccttcagactggaacatggacttcttgcctgcctttggactcaaactgaaatatcagctccgatatggtttggctgtgcttccacccaaatctcctcttgaattggagctctcataatttctactttcatgggagtgacctggtgggaggtaattaaatcatgggggcaggtctttcctgtgctgttctcgtgttagtgaataagtctcaagaaatctgagggttttataaaggggagctcccctgtacacgttctcttgcctgccatcatgtaaga

SEQ ID NO: 721 - DNA, 3200 bp, Homo sapiens
  misc_feature (1)..(3200): DMR4:158570501
aagccaattcagaacattctgtccatttccattctacccctaaattacatgtcaaatatgttcacttctctcctctccactggcgccattctagactaagcctcatttgtctattacctggagcactgcaaagtttcctaatcagcagcccagctttccctcctaccctcccctcaagtctcctacccaatggcactccatcccagtagccagaattatatgaccaaaacatacctgtttcctaattggccccttggcttcaaattcttcattgattcccctttgcattttaaataaaacccaaacttcttccctttgcccaaggatacttctctacctcatcaacctcagctcatgtcacttgtccctgctcactgggctccatcaccacaaccctcccagagttccgtaatcctcagcctgaagcctcttcctcaccactttaactaccaccaccacttccccactcctacctcccctactctcatgggtgatttccttttcttcctccagatctcagcttaaatgacaccattttacagcggcctccctctaactaccccttgtacaaagcaccagcacacagttattttccattacatcacctgttttctttctttttggacctctccataaattgtaaatatttattaacttgttcaatgtatcctccctgggagatggtaacctcccctagggcaggaactctgtttcattcaatgatgcatgcataaaatcttgcacagggccttacacttagcaactatccaatatagaaatgatcacatggcacctgctttcctgttatcctctatgtcttcttgtttctccaatactaatacaggagttattaagaaattattttaggcagttagggtaaaagaggctgggcgcggtggctcacacttgtaatcccagcactttgggaggccgagatgggcggatcacctgaggtcaggagttcaagaccagcctgaccaacatggtaaaacctcgtctctactgaaaatataaaattaggcgtggtggtgcatgcctgtaatctcagctactcaggaggctgaggcagaagaatcacttgaacctgggaggcggaggttgcagtgagccaagattgtgccgtggcactccagcctgggcgacaagagtgaaactctgtctcaaaaagaaaaaagaaaaaaaaataagaaatggtaaaacagtcctcggtggaattttcctttaataaaaagcagccccaaaccatttcttttctaacagaagcagcctgaaaagtcaagctgcaagcacagatatgcaagctggaagctttcgtatgtaaatgtcagcagctgtacctggaagccagatacattcaatgtggcgattcccgctcccttttccttatcaccatgtgtgtgggtatcacagcactggccaggtaaagccatgtgtgcaggtgtcagggtgacagccaggtagaagccacatttgcataataaaagattagggtgggagggccagtcttttaggtctttttgcaggctatgtaaatgacacacctggtgaaaccaatcccctgggctctatgtaaatcaatcaccgcctcctcaagcctctgtacaaaatcaatcgtgttctgccccaaaacccggaaaccctctcttgggccaccggctttctcatcatgaggaaactttttctctcttcttttttgtctattaaactttcctctccttaacctactccacgtgtgtgcccgtgtacttaatcatctcagggtgagacaatgaaccacaggttttccacagacaatgaagtcgtttcaataccagaccagccttgattctgagcccatagtaagaatacaacaaattcctgtttttaaaattattggctgaaaattgtttgtagaagacggtaattggattgaactgtgaagtatgggcagacgtttcatagaagagaggaatggagaggcactccgggtgggaaacagcatgaacaaaggcaaagaggaaaatgttggcatcttctggaatcatggaaagaacgtcctaagaggtgaaggttcctagaaaataactggcatcagggttgtatgtagaaaccatgatgagaaagacaaatgattataaaatatcagggagaaactgctctttgccacgcctttgtattaaccaccttcaaactttgtgtcttctccccttttcctcagtttctcatgggggtggacaggatgtcaagtgctcccttggctatttcccctgtgggaacatcacaaagtgcttgcctcagctcctgcactgtaacggtgtggacgactgcgggaatcaggccgatgaggacaactgtggtgagtgaagcccctgcagtcacggtgagagaaaggagcagaaaggactgaaggtgaagtcgctgagacttctctcaacaaaaagacaaaactaaattgaaatacaaaacatatgttgcttaaggaaatcttacacttatttcagtagcttaaaatatccactcttttcttttcttgtttttgtttttttttgagacggagtctcgctctgttgccagtctggagtgcagtggcgtgatctcggctcactgcaacctctgcctcctgggttcaagtgattctcctgcctcagcctcccgagtagctgggactacaggtgcccaccatcacgcccggctaattttttgtatttttagtaaagacagggtttcaccgtgttagccaggatggtctcaatctcctaacctcgtgatccacccacctcttcctcccatagtgccgggattacaggcatgagccaccgtgcccacccttaatatccactcgtttccatgtaatggtatcacagccaatattccaggcgagtggtggttgctcacagagtaagttttaaccaagattgtccaacccgcagcctgcaggctgcatgcggcccgggatggctttgaacgcagcccaacacaaattcataaggattttgaaagcattagattttttttgtgattttttttttaagctcatcagctatcattaatgtaagtgtattttatgtgtggcccaagacaactcttcttccaatgtggtccagggaagcccaaagactggacacccttgttttaacccaacaaacctgcccaagtaaggtgttagaggcagaatacggttgaaattgagaatacgggctctggagccagactgcccaagt

SEQ ID NO: 722 - DNA, 1000 bp, Homo sapiens
  misc_feature (1)..(1000): DMR4:159887701
tactgctattctcaaggccttcttctctgaggactggaaaattaggcttgaccttttcccagcatagtaccacggaatagctagagcatgctatggatttgaaaaataaaaggaagactgagaccaaagaaaggccgttaatacactctacaaaaagaaaaaaaaaaaagcttcctattctcagctatattaactttagataaaaggtttaattagagtagaatctttaatatgcttgtctgatatgtatttttactttttgtcaagaaagtaaatgagagaagctttagaatttcaccaaagtgatctcatggatataatgaggttaacaagctgaaattaggctcttgggcttagaaaaaaaaataattcacgtatgaaaaaaatgtttaattaaatggaagtgcctgcatccaaatagcacaatttgctagtcagagataagaagctgtgatagacctgaggagagaagataataacaatgtaaagctgtatgaggtttaagaatcaaagtgttcattttagtattcttgtatccctcagcctcctggtactgctagagaaaaaagaaacataacacgtagaattagctttgagaaagacaaaaccacactttatacccagtatggagcccaccctgtaaatctgcttgtatttgttttccagaaatgccataaaaaatcacgatgaagtggcttaaaacaacagacatgtattttttcacagttctggaagctagaagcctgaaattgaggtgttggcagggccatgttaatttctgaagactctagggggaggatccctcttcgcttcttcctcgatttcagtggttgtagattgctgttccttgatctgtagcccaagctctgcctccaatgtcaaatggtgttttctctctctctgtgtctctgtctttctgtgtgtatgtgtctatatgttttcccttcaaggacatcagtcattggattacagcacaccctaatctgatatgatctcacct

SEQ ID NO: 723 - DNA, 900 bp, Homo sapiens
  misc_feature (1)..(900): DMR4:161359201
agttctgattcttcagtatgggagaggaggaggtgaaatactatttaatggaaaagccttgaacagacaaagtaaacacaaatataaatgccagtaatgaagaaaataaacgttttagactgatatctaaaaatatatgggagagtagtgacggatagaatcccattatatgtaaggagggaaggaaatgtcacaagattgaagagttgaggaatatttgggctacggtaaacagagcagttcatgttctcattttataacctaaagttaagtgattcaccaggatcatcaacatggcataaaaactaaagtttctggatacttaaagcaaggactgctccactgtttgactgtgatagttagaaaggctgagcttgtccaactgcttttgttatgaaacacagtgtgatgcagaggtcaggagtgcaggctctggagcaagactccctgaaccccatctcagctccttatcagtactgagactttgacaacttactaatctctgcagttttgtttcctcatctgtaaaagggatgtacctaacaataccacacacctcacagggtttttactggtagcttatttatgcataaacagtgcacagaactgtacttaatacataataaggacagattagtttcctgtggctgctgtaccaaagaacctcaaacgcggtggcttaaaacagaaatttattctcacagttgcagagtctagacgtctgaaatatgacaggactgccttctctcaggtagctgtaagggaaagtctgttccttgtctcctccatcttctggtgctgcccattgttcctgggcttgcagccacatcactccaatctctgcctccatcctcacatcacctcctcctttgtgtttctctgtgtaaaatcttcctctga

SEQ ID NO: 724 - DNA, 700 bp, Homo sapiens
  misc_feature (1)..(700): DMR4:161560201
taaacatataaaaggtgaagtaaaagtaagatataatataaaagatggtactcctgtatagcgcacttaccacgaatgaagcttataggatgagatgttgctgagtcagtgagtatgtggtgagtgaatatagaggcctaagacattattatacaccactgtacactataaacactgaacactcaggctatattagatttataaaaaaactttctttcttcaataataaattttccttagcttactgtaactttgttactttttaagctttttaattttttcaactttttgactctgtaataacacttagcttcaaatatacattgtacaaatgtacaaattttttatatttttattttataagattttttttctgtttatacaattttttaattttaatttttcctttttaaacatttttgttaaaaattaagacacaaactcacacattagttgagccctacacagggtcaggggacctgtgtaggtcctgtctttatctatatcactgtcttccgcctccacgtcttgtctcactggaaggtctttcaggggcaataacacacatggagttgtcatctcctgtgacaacaatgccttcttctagaatacctactgaactacctgcctaaggctgttttaccgttaacatttttttaattaatagaggaagtacactctaaaatgacactaaaatgcg

SEQ ID NO: 725 - DNA, 200 bp, Homo sapiens
  misc_feature (1)..(200): DMR4:163021001
taaagacatggatgaagctggaaaccatcattctcagcaaactatcacaagaacaaaaaaaccaaacaccgcatgttctcactcataggtgggaattgaacaatgagaacacatggacacaggaaggggaacatcacactctggggactgttgtggggtggggggaggggggagggatagcattgggagatatacctaat

SEQ ID NO: 726 - DNA, 300 bp, Homo sapiens
  misc_feature (1)..(300): DMR4:163683601
tacactgatagggaacaaggctcatattttctgttaacttaaatagtccttaacaaaatcaggtcttcctgctggggtaaagggacctgcttggaaaaggtccatgcatgtgttcgacttatgatagctgagaaacacattatttcaaaacttagtggcttaaaatgatgacaatttattttgctcacaactctgcattctggacatggctcagcaaagataatccttggggctctgcttggtatcagctaaaaaggattgaaggctcaaggcagacatcatgtggaggctcactcactc

SEQ ID NO: 727 - DNA, 4300 bp, Homo sapiens
  misc_feature (1)..(4300): DMR4:166756901
gacgagctgagagaagaaggcttcagacgatcaaattactctgagctacgggaggacattcaaaccaaaggcaaagaagttgaaaactttgaaaaaaatttagaagaatgtataactagaataaccaatacagagaagtgcttaaaggagctgatggagctgaaaaccaaggctcgagaactacgtgaagaatgcagaagcctcaggagccgatgcgatcaactggaagaaagggtatcagcaatggaagatgaaatgaatgaaatgaagcgagaagggaagtttagagaaaaaagaataaaaagaaatgagcaaagcctccaagaaatatgggactatgtgaaaagaccaaatctacgtctgattggtgtacctgaaagtgatgtggagaatggaaccaagttggaaaacactctgcaggatattatccaggagaacttccccaatctagcaaggcaggccaacgttcagattcaggaaatacagagaacgccacaaagatactcctcgagaagagcaactccaagacacataattgtcagattcaccaaagttgaaatgaaggaaaaaatgttaagggcagccagagagaaaggtcgggttaccctcaaaggaaagcccatcagactaacagcggatctctcggcagaaaccctacaagccagaagagagtgggggccaatattcaacattcttaaagaaaagaattttcaacccagaatttcatatccagccaaactaagcttcataagtgaaggagaaataaaatactttatagacaagcaaatgctgagagattttgtcaccaccaggcctgccctaaaagagctcctgaaggaagcgctaaacatggaaaggaacaaccggtaccagccgctgcaaaatcatgccaaaatgtaaagaccatcgagactaggaagaaactgcatcaactaatgagcaaaatcaccagctaacatcataatgacaggatcaaattcacacataacaatattaactttaaatataaatggactaaattctgcaattaaaagacacagactggcaagttggataaagagtcaagacccatcagtgtgctgtattcaggaaacccatctcacgtgcagagacacacataggctcaaaataaaaggatggaggaagatctaccaagccaatggaaaacaaaaaaaggcaggggttgcaatcctagtctctgataaaacagactttaaaccaacaaagatcaaaagagacaaagaaggccattacataatggtaaagggatcaattcaacaagaggagctaactatcctaaatatttatgcacccaatacaggagcacccagattcataaagcaagtcctcagtgacctacaaagagacttagactcccacacattaataatgggagactttaacaccccactgtcaacattagacagatcaacgagacagaaagtcaacaaggatacccaggaattgaactcagctctgcaccaagcagacctaatagacatctacagaactctccaccccaaatcaacagaatatacatttttttcagcaccacaccacacctattccaaaattgaccacatagttggaagtaaagctctcctcagcaaatgtaaaagaacagaaattataacaaactatctctcagaccacagtgcaatcaaactagaactcaggattaagaatctcactcaaagccgctcaactacatggaaactgaacaacctgctcctgaatgactactgggtacataacgaaatgaacgcagaaataaagatgttctttgaaaccaacaagaacaaagacaccacataccagaatctctgggacgcattcaaagcagtgtgtagagggaaatttatagcactaaatgcctacaagagaaagcaggaaagatccaaaattgacaccctaacatcacaattaaaagaactagaaaagcaagagcaaacacattcaaaagctagcagaaggcaagaaataactaaaatcagagcagaactgaaggaaatagagacacaaaaaacccttcaaaaaatcaatgaatccaggagctggttttttgaaaggatcaacaaaattgatagaccgctagcaagactaataaagaaaaaaagagagaagaatcaaatagacacaataaaaaatgataaaggggatatcaccaccgatcccacagaaatacaaactaccatcagagaatactacaaacacctctacgcaaataaactagaaaatctagaagaaatggatacattcctcgacacatacactctcccaagactaaaccaggaagaagttgaatctctgaatagaccaataacaggctctgaaattgtggcaataatcaatagtttaccaaccaaaaagagtccaggaccagatggattcacagccgaattctaccagaggtacatggaggaactggtaccattccttctgaaactattccaatcaatagaaaaagagggaatcctccctaactcattttatgaggccagcatcattctgataccaaagccgggcagagacacaaccaaaaaagagaattttagaccaatatccttgatgaacattgatgcaaaaatcctcaataaaatactggcaaaccgaatccagcagcacatcaaaaagcttatccaccatgatcaagtgggcttcatccctgggatgcaaggctggttcaatatacgcaaatcaataaatgtaatccagcatataaacagagccaaagacaaaaaccacatgattatctcaatagatgcagaaaaagcctttgacaaaattcaacaacccttcatgctaaaaactctcaataaattaggtattgatgggacgtatttcaaaataataagagctatctatgacaaacccacagccaatatcatactgaatgggcaaaaactggaagcattccctttgaaaaccggcacaagacagggatgccctctctcaccgctcctattcaacatagtgttggaagttctggccagggcaatcaggcaggagaaggaaataaagggtattcaattaggaaaagaggaagtcaaattgtccctgtttgcagacgacatgattgtatatctagaaaaccccatcgtctcagcccaaaatctccttaagctgataagcaacttcagcaaagtctcaggatacaaaatcaatgtacaaaaatcacaagcattcttatacaccaacaacagacaaacagagagccaaatcatgggtgaactcccattcacaattgcttcaaagagaataaaatacctaggaatccaacttacaagggatgtgaaggacctcttcaaggagaactacaaaccactgctcaaggaaataaaagaggagacaaacaaatggaagaacattccatgctcatgggtaggaagaatcaatatcgtgaaaatggccatactgcccaaggtaatttacagattcaatgccatccccatcaagctaccaatgactttcttcacagaattggaaaaaactactttaaagttcatatggaaccaaaaaagagcccgcattgccaagtcaatcctaagccaaaagaacaaagctggaggcatcacactacctgacttcaaactatactacaaggctacagtaaccaaaacagcatggtactggtaccaaaacagagatatagatcaatggaacagaacagagccctcagaaataatgccgcatatctacaactatctgatctttgacaaacctgagaaaaacaagcaatggggaaaggattccctatttaataaatggtgctgggaaaactggctagccatatgtagaaagctgaaactggatcccttccttacaccttatacaaaaatcaattcaagatggattaaagatttaaacgttaaacctaaaaccataaaaaccctagaagaaaacctaggcattaccattcaggacataggcatgggcaaggacttcatgtccaaaacaccaaaagcaatgcaacaaaagacaaaattgacaaatgggatctaattaaactaaagagcttctgcacagcaaaagaaactaccatcagagtgaacaggcaacctacatcatgggagaaaattttcgcaacctactcatctgacaaagggctaatatccagaatctacaatgaactcaaacaaatttacaagaaaaaaacaaacaaccccatcaaaaagtgggcgaaggacatgaacagacacttctcaaaagaagacatttatgcagccaaaaaacacatgaagaaatgctcatcatcactggccatcagagaaatgcaaatcaaaaccactatgagatatca

SEQ ID NO: 728 - DNA, 300 bp, Homo sapiens
  misc_feature (1)..(300): DMR4:166895301
atacaagtgttgttaaaaataataaaaaataagatgagaatagaaggtcatgagtatagcatttcagaagaaattaactatacagatataaatgagagtcaattttttaaaagaatgggagtaagcaagaagggatgcattgtaaaaaaagaatgcaagtagcggaaagattcagggcagaaggttaagtttagctaacaaagaaaagactttgaatacttcaaagtagtagatgatttcaatggttacccaaacataaaaatactgaagtgtgatagcttgtacatacatttcaatgtc

SEQ ID NO: 729 - DNA, 1900 bp, Homo sapiens
  misc_feature (1)..(1900): DMR4:167243201
tagtgaggtttttatttcagttattatattttccagttctataatttccatatttccacctggttctttttttttttttttttttggcggagtctcgctctgtcgcccaggctggagtgcagtggcgtgatcttggctcactgcaagctccgcctcccggcttcacgccattctcctgcctcagtctcccaagtagctgggactacaggcgcccgccaccaggcccggctaatttttttgtattttttagtagagatggggtttcgctgtgttagccaagatggtctcgatctcctgacctcgtgatccacccgcctcagcctcccaaagtgctggaattacaggcgtgagccaccgcgcctggctgttctttttatatttttctatttgcttgctaatatttcttatttttttcatttttaaagagaatttgtaactgcttgttgaagcagcattttaatgcttcaataatctttgtcagctaactcaaacaactgatttcaccttagtactaatgtgtgtcaattgcctttctcaatttggatattctgttatgactggattctatttcatcttttttttttaagtatgtaccccttattgaattatataaccagagttaggtgggtaagttcagctttccaactgggtcctgccaaccctactgctggcaaaagtggaacaatatattgcctttggaagatgcttgagatggacattcagctactgccaacatcttcccagcaaaagtgggatacctccttgcctttgagttggggagcaaggcagggaactgagctccctacttagccacagtggcatctgggaggtgggaattagaagagtgacccacacctctttgttgcttagcatgaggggaaaacctcaactactctggagccacctgacattaaaggatgggatggaggcagaaatgccaactagcttttactcccaatacctcagtcacccttgttaataactggtgagtatggaagtttgactcctcagtggactccagtaacactaataactgggaaaaaatggagtgctgattttctgggactcacactgccttattcaatctctcaatgactagtaagggtggaggctcagctctgcctccctggttcacgccattctcctgcttcagcctcccgagtagctgagactacaggcgcccaccaccaagcccggctaattttttatattttttactagagacggggtttcactgtattagccaggatggtctcgatctcctgacctcgtgatctgcctgcctcggcctcccaaagtgctgggattacaggtgcccctgtataaaattgcagtttattcactgacatttggctggagtagagtggttattgccaaaaacaggtttcactgtaaggctacccttttccaagtcctttgctaaagaaaaccagatttttttctgaggatttttgtctgttccccttgccacttccaggttggagccttctgcgttaccttgtctgggatatacggataagaataaggagcccagtgaactcacctccctgttgtttctcaactcttgaggtccctaagcagttcatttccttctttccagcctttcagagtcttcctatactgattttttgaattgtgttcagggtttttttttctgctgtaagaaggagattttgggtaaaatgggatactccgtcgttttcaccaaaaccaggaatctcttgactgttttttgtttgtttgttttgatgtgttttgtagagtcagggtcttactctgtttcccaggctggagtgcagtggtgcaaccatagcctccatctcttctcttcacctcaccagcggctcacacacccccatcatcccagcacaagtacagcctcgaacgcctgggctcaagt

SEQ ID NO: 730 - DNA, 200 bp, Homo sapiens
  misc_feature (1)..(200): DMR4:168870001
atggagtgggtgagcccactgtcagaggctgcagagataccaagaatgaaggcagagaaaagccatgggactgctgagcatagcacaaccctatcttcatatttgaatgaaatgtcaaagccaaaacatccaaaagagtagtggcagaaagaggggaaagggttattaacagaaccttggccacttaccactgaaatagt

SEQ ID NO: 731 - DNA, 1300 bp, Homo sapiens
  misc_feature (1)..(1300): DMR4:169644201
aagtgaaacaggcttttgttttctgcaaattcatgttgatgaaaaatataacaactgcttttttttttcttttttttttttttgagatggagtctccctctgttgcccaggccggagcacgatcttggctcactgcaacctccgcctcccgggttcaagcaattctcgtgctttggccttctgagtagctgggattacagatgtacaccaccacgcctggctaatttttgtctttttagtagagatggccaggctagtcttgaactcctgatttcaagtgatccgcccgcctcagcctcccaaagtgttgggattacaggcgtgagccaccgtgcctggccaatacaacaagttctagtaaattttggtgccactgttttgatttatgctagatatcaagctgtcttcctcactattgcttttgtactataaatgaaaggccaatacaatgaacaagacaaagaatgttatggtctgcttaataatggccatccccacacccgaattcccaaaacctgtaaatatgttacctttcatgttaaaatggactttgtgattaaatatctagagatggagtgattatcctggattatctgggtatctctgatgtaatcacaagggtccttaaaagagggaggcaggaggatcagagttagtggtagcagacatgataatggaaacaagaagtcatgtgagaaaaaggccataatccgaggaatgaaagtggcctttggaagctagaaaaggcgaggaaacagattctcccctgaagcctccaaaaggaacactgccctgctgacacaccttgatcttagacttctggtctccagaactataagaaaataaatttgtgttgttttaagctactaagtttatggcagtgtgttacgataacagtaggaaacggacacggatatcttagtattatcgaaagtgttgtttttaaccttgtggacccctgagaaagatttttggggtctctcgacaattcttgaccacactttgagaattctaagataagctagctgccaaatgcacactgggtacatgaataaggtgacttgttatattgtattaaaaactttaagagtgaagggtttatataaaaagggtaaaatctacatatatgatttcccaattctcttcaaatattatatacacacacagaaaaaacattggaggaaaatacaccaaaataatgtgctttttcttcatgatggaatttggggatttataatttttctttatactttcagtattttccaaattgtcagcaatttggctgcagaattagaaaact

SEQ ID NO: 732 - DNA, 200 bp, Homo sapiens
  misc_feature (1)..(200): DMR4:171517101
tctatttcaaataatctgtgtttgttattttgtgtcatgcatagtgagcatatgaaccagaaaactcatattttttgtttgttttttgaaagtaagtctttattagcctgctgtgggaaacacactacattctacattcttttttttttttttttttttttttttggaacaaggtctcatactgttgcccaggctggagt

SEQ ID NO: 733 - DNA, 1400 bp, Homo sapiens
  misc_feature (1)..(1400): DMR4:174510401
gattctgttagtttctgcagaaggcttcagcatgtctgaacagaatttctgttcatgcgtattggcactacgcttttattctcaggtattacagctttgctgacaccccactgttgtgttttcgacatgaacaagatgaagccagatagaaaatttgagattttttaagatttatttttaattttttagaaaagcaatatttatctttaggtctttggtggagaaaggcaagggattatttttctcatccattatcaggttaagaactgggtaatttttcaaatgaaagagttcaaaggatgaatctacaagacagggtctaatgctttggctgtgtagaaatgacatttttcacttttcctcctttactataacaacgtagtccttattctagattatatacgcatgtgcacgtgtgtctatatattatatatttcaccatgttggccaggctggtctcgaactcctgacctcaactaatccgcccacctcagcctcccaaagtgctgggattacaggcctgagccaccgtgcctggccagaaaatgtagattttgatgctctggaagggaagtgtaatttattgaataaattctatgcagtggcactgtgctggatattcacataaactatggtttatttaagcgtaacagtccttagagatagggagtttaccttcctccctgggaagctcaatatgagagaaataaaataacagtttataaattatagagtcaagactggattctaattttgactaatcccaaagaaatgtatttcccagggcaaatctttagtcaataagtgcatttcagaaaaaaaaaaaaaatgactagcaacattcatttattttgtttaaatcttatttgaatatattgacccacttatgcctagtgttccattattggaatactaagcacgtgagagttatttatatcctactgttcaaggtcattgccaaggtctaatttttaactcatgcaaaaattcaaaatattgcaacctctggcataaatgggttaaggaattcaacatatattagttaaatgtcaaaattagactgtaagttccacatcagtggggatgaacatatttaggtttacagaaacttcagaaagttacaaaactacatgacagaattaccattccaatcaatattcaaagttaagtttacctctgcccaattgccagcatgagtgttgatagttttgcaaagactcattctttcctgaacatttcttttttttaattttattttgtttttgagacagagtctcgctctgtcgcccaggctggagtgcagtggcgcaatctcggctcactgcaagctccgcctcccgggttcacgccattcgcctgcctcagcctcctgaataactgggactacaggcgtccgccac

SEQ ID NO: 734 - DNA, 700 bp, Homo sapiens
  misc_feature (1)..(700): DMR4:175332201
aagcggacttcttaatagtcatgggcatcataggatcctgaaataaacaagctggtgcaattatcacaatgacagcaagttttgagtggtagccaagtagcataaaccttagggaccctagaggaaaatggaaggacagatattcagagtattgctcaatcaatatgtctaaaataaatcaaggattgatgatcaggaggttgagggcagctgccccaagaagtaatgatgcctttctcaatgtccagatcagagccagtttttcaaacctggaacacagtgatgcacggagagactgggtccacagacgaacacatacacttcaacaaatatttgtggtcctgatttttcccatacttccccaaaagaacctgtggtcatttacttaagtaacaatacactacaaaggaaagaagaatactcagacaattcaaggaaagttgaacataggatttgagttgacaaggacactagccattcattctgaagggtcatcaagcttcctctcagctggaaaacgggcatattagggccgcataactaataaatcctggtccagttctggcttccagtgtggccacaggccaaaccaggggtcatttcttcaacctataaatgtataattttaatgagtatacttggaaatggacagtcccaccatatttttttccttggactatggagtaagggctatcacagt

SEQ ID NO: 735 - DNA, 300 bp, Homo sapiens
  misc_feature (1)..(300): DMR4:176587201
gtggggaatgtgccagaaacttttccattcaatctcctggagtttatgccactgtagataaaaccactggccatacataatgacaaggtctacagcagaagttctttggatcaaagcgcattctcctaatttccttctcataggatattctctaccctcaagtcaccccacctatatcaatgaccccaacccctcccacattctctgcttttctatactaaaacatgttctctggaaggattcaagaccagccatttataaattaatatgaaattaataagccatattttccaggttagt

SEQ ID NO: 736 - DNA, 1700 bp, Homo sapiens
  misc_feature (1)..(1700): DMR4:176844701
tattcagcatccctaagtgaataaagaccctcccagcctttttcagctgcaatatatcttgtcttcacacacccagattccccgatgcaagcacgcctacaaagggtaatagaatggcacacgtgcagaccatacatgtcaatggcaggttctctgtaatgccccaagtagcgctaagctctatgtgcatttctcattgtgttttttgcgtattcgttctgcagtgtaaaggcactgttgaaaacaccaaaaatggccgagggcagtggctcatgcctgtaatcccagcactttgggaggccgatgcaggtggatcacgaggtcaggagatcgaggccatcctggcgaacacagtgaaagcccgtctctactaaaaatacaaaaagaattagctgggcgaggtggtgggcgcctgtagtcccagctactcgggaggctgaggcaggagaatggcatgaacccaggaggcagagcttgcagtgagccaagatcgcaccactgcactccagcctgggcgacagagcaagactccatctccaaaaaaaaaaaaagctaaaaacacttacagataccctacaggtaacactgataagaaaaacagggaacatttatgtttatctatagcacaggaagtcaacctattggagaaactggaaagtaatgtaggtatgaaacatcttacggaagagtatggtgttagaatgaccaccctatattgacctgaagaaacagaaggatagactgttgaaattctatgctgaaagcaatgccagaaaaatagaaaaatactgcataaagctgaaagtgaagatcctgattgtgcattgaaagaggagatccatcagcatcacagtaatacatgccacttaatggtatgctgatgatgaaacaagcaaagatctatacattggatggaactgtgattcaacagtttcattgcagaaatttaagtgaagacacagcatcaaatttttaaagatttttggtaataaagcactgctgataatgaagcagtggagaaattccttgaagagtttgccggggtcactgctgatgaaaatctgatgccagaagaagtctgtaatactgatgaaacatcactaatttggtgttacagctgatgagacagcctttacaggaattaaggataccaaggacagtaaaactgggatgtgctaatgcggcaggcatgcataaccataaacttgttatgataggcaaaagcttgcactctcactgttttcaagaaataaattgcttactagtttattatgctaacaaaaaggaatggatccccagagctatctttactgattgttttcacaaatgctttgtactagtggctcatgctcaatgtagggaagcagaactggatgacaactgcaaggttgtgctattctttcacaactattcttctcatcttccagctgaaagtctcataaaaataatattgatgccatgaaatttcccccaaatttgacttcatgaattcagccatgcaacctggtatccttatatcaatgaagagtaaatatacaagtactttcttgaacagcaggctaacagcagtgaacaaaggcatggatgcagaaggttttcaaaaggtgtttagcatgaaggatgcaatatatgctgttaccaatgcttagaactcagtgactaaagacacttattccggtttattcctggtacagcctcgg

SEQ ID NO: 737 - DNA, 1400 bp, Homo sapiens
  misc_feature (1)..(1400): DMR4:181683401
aaatgtcttgcttaagagcttacactttatattagactcacttggcaagtttattgaaacaaagattgcggggctcactcccagattttcttattcttcagtaagtctagtgggggggccaagaatttgtgcttctataagctcccagctgatgctgatgcgactggtccttgggccaccctttgagaacctatgcactagaaaataaaagcagatgaagcgacttcatcgaaagatgagatgtgtcagacgaagctttcagttactcgtgcaaggcgatggtctaggagaggcgaagagggtatggatgatcccaaaccgtggctgcaggaatggagcagagtcctcatagagagtggtgaaatctgtactacccgatgacggaccctgtgctgtctgagacaggggacagaaggtgggggttcagagcccttgttttgagatcaggaactccaccacctgagcagccttcgagcacacagcttgacttggtcctcttttctttaagctgaggttaacatggaagtcttccttatgaagtcttcatgagaatccaatgggttaaacccataaagaaattaacctaatacccaccacggggaagcatttaacaaatagtagttattattgtaggtgggagaaggacggctctgggatcacttgaggcagtttttagctgaaaagtccaagtggactgctttgctttgcttagcgttcctggcgtcctccacacaggttgacacctccaggtgcttatttaacctgcgtcccagatccgattgattccggttcctatgcagtgttattcacgagtgcatgtgggaggagaatgggccgtgacaacagtgaaggccgaaagccctaattttttaccaatcattttacagatacaaaagtaggcttaggaatccattattttgaatgtgatctatggacacctcctctttctgctgccttcctactatcccattcctcatccttcacaatatgtaaagaaaataaaccctgtgactttgaatctaatgttttcacatcccattcacttaaatcatctcttgagaatatgtttgtgtgaaaatgtgagaaatgtgtttttaaagtaaaggaatgtgatgatgtaactggccacattagatttcttaggcaatccctaaatgcattaaaatacacactgtgcatcaagagctggattgaaccacggatgctgattccgatggggcaacccttattctgtatagactgatgtcagtgatgttttaagattaagactgagataaataaaaagtggtgtatgcaataccctttcctctttgggaaattaagaacttacattagtgtctgttttttgtttgtttgttgtttgttttgttttgaggtggagtctcactctactgactggg

SEQ ID NO: 738 - DNA, 400 bp, Homo sapiens
  misc_feature (1)..(400): DMR4:182421001
aaatccagttattccagagattgagatggtttcatcactgaacagcttgcagatagccttcagaaagtaatttctgaaatgtatgcaatgtcatcagagatgtgacattttaaaaataaaattgcactgatagactaatcaaaatccacatttctctgagccattgtatctgtcttcattgtcctcaccccctcttcatcttcatcttcaccctcgtcatcaccctttattatctcaccttcttctcattgccaaccacactgagaaaagtagatagagaggacactatctccaaagtaagtgagggcttagagagattaaggatcatccaacgtcactcaagtaagctaatggccaagagagcaataaccacagccctgacaatatatatactctttcc

SEQ ID NO: 739 - DNA, 500 bp, Homo sapiens
  misc_feature (1)..(500): DMR4:183982601
ctagtattctaccctgggcactactccaaatgtcaggctactgctatagcacagatagtcttttcgatagattctggggaggtagtgttaggtgcgttgtgaaactcatgcatttctgatagcattgcagtatttcatgttggaaatgttggatagtacttttgtgaaacagaaaagttatctcacgtctctctgcttctctctgttccctggttaagcactctttacattttgttcactctctcacagtaggcttttaccttgcctcagtaattatcttttcctttggatgcatcctataccctgttgcctgcataacctaaacattcagcatgaggaacatctcccctgtagaaacctttaatgccattctccaggtatttaatgttatctttatcccagcctgactgactctttggccttgttgctaccaatctccttcatagatccctccaacccagccatgctgaatctaccaccagccattctccaaaacatct

SEQ ID NO: 740 - DNA, 4900 bp, Homo sapiens
  misc_feature (1)..(4900): DMR4:184858101
actcacgttttgcacccacggagtccaggactggggtgttagaagtggggtagatttagtggacacagcagatcaagtgcatgtgaagagcgccgcagcagctctgcatctcccaaaggtcccagctggtcctctgaagacccgggatcacaactccacatcgtcacctcggggtcccaaaggtcccagctggtcctctgaagacccgggatcacaactccacatcgtcacctcggggtcccaaaggtcccagctggtcctctgaagacccgggatcacaactccacatcgtcacctcggggtcccaaaggtcccagctggtcctctgaagacccgggatcacaactccacatcgtcacctcggggtcccaaaggtcccagctgatcctctgaagacccgggatcacaactccacatcgtcacctcggggtcccaaaggtcccagctggtcctctgaagacccgggatcacaactccacatcgtcacctcggggtcccaaaggtcccagctggtcctctgaagacccgggatcacaactccacatcgtcacctcggggtcccaaaggtcccagctggtcctctgaagacccgggatcacaactccacatcgtcacctcggggtcccaaaggtcccagctggtcctctgaagacctgggatcacaactccacatcgtcacctcggggtcccaaaggtcccagctggtcctctgaagacctgggatcacaactccacatcgtcaccttggggtcccaaaggtcccagctggtcctctgaagacctgggatcacaactccacattgtcaccttggggttgtagacccaggcaagttgtttgtactcatgacggtgcagctcctttttttgaaaggggggaataagacagctgatcagtaggccagacctcagtgagctcactgtgtgcaaagttcacacctggagcagatggcagagttgctggaggctcaaaggctctgaggcacgtggaagtggcttcagggcagggcaagagaggctgttacactttccagtcacctcctctctggcaccagcaacccattcttccagatttttcctcacagttccattatacattttctccccatatgataaagtgttgggttagactgaggccattaagaaagggctacctacctagataatatcataacctctatctatttaagtaaaatgttactgaaatgttactaacagtcaacattattgaatctttcatcagttgccaggttctatgatagatgctctttttttaccttcattacccctccttcggtaaccccacaacctggtgtctatgactagcaccagtttacaaatggggacactgagacgcacagaggttacaaccatcaaatggtggaattgggacttgaactcaggaagcctgagctttataacctccaaactacatagccttccttagagaaaactactagatcatgaacaagtcagaacagagagtagagaagaaattttccatggaagagctgataattggagattttggggagagggagatgaaaagaattgaaatggagaagaaaaatccgtttttgtgggggaaaatatagaaagtaagatttgtcttggaatgagattaaaatgaaaccatcagagctggttttatttattcatcatatactcataaattaaacatccattcattagctaaaattaaacatcctatcagccttgaggggactcacagtccaaaaaccagatgttcctacacttccaaaatctagctcaatgatgagagaggtttctgacagagagggagtggaagttactgcctaaaatagatccctaggccaagggatatagaagaataacagtagccaaagatgccagggaccatcgtgtggatctctttcatctcatactcctggggcgcaggctgccagagatgagagagagctgtggggtctgagggattcctcctatctccgcacagaggaggtggggcgtggggcggtgtccctttgcagccatgatcaaggaagcagagtttcattcatctgggttagactgcctctcctaatatcagccaagatcagacaagaatgaacaaaaactcagggtcaattagttgggtatggagaggaaatgtagaaatgaggccactggggactttttgcattgcaaagccctgaaattctcggttttgctatgttgcaagaggagccccaaattagcaacgatttcttggaggaaaggtgcccagccctttcatttattaacctctgcctgatattttcagacagcttttcgaatctctaggagggttatggcctggtataagcagaggaggggtcaagacaattatccaagagctattgcaggactattgttaaaagaataaaaatcctagcaccaaaaaaagagaagctctggatcttttgaacaccgatgtaaacacccactgggtggagtgagggggactgacagatcactagagtccggatgcctctggaagccagaaagcccaaagcatagtcgggagacagcaggatggcggactgagcaggcgccactctcttgctccgtaagttccgatcctcctgcatccctccctcatcatcatcggacctggtcctctctgtattgatgaggtgtgtgctcacggcataagcccaggaggaagaggaaaattaacaatcatctcaggccaacattgatttcataattgcctcccttcttccatttatattttccccatacataaaaatacaatgcccattggaaagatttggaaaatatataaaggggcaaaaaagaaagaatcttcttataaccccagtgtgcgttacaccctccactagagcaaggggctgtttgtcttgttgaccaagctctgtccccagaaccagaagagtaactggcacaagtaggggctcaatagaattatcttttttcaatgaatcaatgaatcaatgaatactctgagattacatcttaatatctcattacacattgtcctatatctcaaagcatgtgtttttaaaaaaatcactcacacggtttttttctacgcattttctattgtggtaaaatatactaacataaaagttaccattttagccactttcaagtgtaaattcagtggcagtgtttcttcacaatgtggttcaaccattaccacatccagttccagaactttttctggaaaaagaaaccgaaactctgtacccaccagagaataattctccattggtccttcccctcagcccctgataacctctattctacttgctgtctctaataattcgcctattctaggtaactcctataagtggaatcatagaggatttgtcgttttgtgtctggcctatttcagttagataatgttcccaaggtttactcatgttgtcacatatagtgccatttaattccttttaaaggctaaaaaatggctggacgtggtggctcatgcctgtaatcccagcactttgggagttgaccaggtgactctaaagtttatgggaaaattaaaaggaccacaaacattctacgcatgtttgtgcgtggatcatctgaggtgggtggatcatctgaggtcaggagatcgagaccagtctggccaacgtggcgaaaccccatctatgctaataatacaaaaattagccaggcatggtggcgcatgcctgtagtcccagctacttgggaggctgagtcagggagaatctcttgaacccaggaagcagaggttgcagtgagccaagattgcaccactgcactccaacctgggcgacaagagcgacactctatctcaaaaaaataaaataaaaaataaaggctaaagaatatgccattgcatgtatgtcaatgctacgtgttgtttctcatccatctgctgctggtaagcgtttgggctgtttccagtgtatccagtttgcatctccttctttcactttataattactagcatttcttcattttattaaattgccttcaggaaacatttcctctgattgactgccagtctcactataggtggacatggtaatctaatcattttggtgtgtgtgtgtgtgtgtgtgtgtgaacatttaggtgatttcatacttttgccacggcaaataaggctgcagcaccctcagacataaaactttagccaagtgtgtgatcaatattattttcaaaggatagattcctagaaggtgaaacaccgtgatggaggatatgaaattctaaacatctccatgttttctttccaattggcttgtcaaatggctttccagataggttgtacctgtgtgcactcttccaggtgtgcataaaaaaatcagtttattacactctcgccagcatggagtgttatcatttatgatgtctttgctaatttgattgatggaaagtggtgttctgttgatttaatgtgctttagattggttacttgaccttcctctgggataactccttctgtttgtggtccttttaattttcccataaactttacagtcacctggtcaactgccacaaaaaataaacctgaaacttcttttgtttttgtttctgtttcttttgagacggagtcttgcactgtcgcccaggctggagtgcagtggcgtgatcttggctcactgcaacctccacctcccgggttcaagtgattctcttgcttcagcctccagagtagctgggattacaggcgtccaccaacacgctcagctaatttttgtatttttagtaaagacagggtttcaccatgttggccaggctggtctcgaactcctgacctcaagtgatctgccggccttggcctcccaaagtgctgggattacaagtgtgagccgctgtgcccaacctggaacttcttttgactctatagattaattcatggagactgacatattctatattacaatatagaagctac

SEQ ID NO: 741 - DNA, 600 bp, Homo sapiens
  misc_feature (1)..(600): DMR4:185119001
ttattatttatcagtgtgaaggcagaggggaaataaccaataagtcacgcctatagccgtgtctgagataaaagccgtctgtgaaagacatttagccctatgagttccaacagaagctgctggacattcagaatcagcctgcaattcctttttttgaaaaagacatgcagtgatttactcgttaggtcaaaagcagaaaggtgtctcccttgtttgggcttctccgttgaggtttatatggatctgcgaggctgccatcagtgtccccgccttctgttaaaagggtcaaacccagcaagaattccgagggaacgggttcctgtccccaaactgctgcatagaactcttcaaactttattgtgctcttggcttggagtttcagcctataagaaattaagaatatagggaaaaggaaaagggatttgcaaacagaacagatttgcaaatagaacagagttgtattccaggaaacacagtaaccagatcccttcccaaaacgtttaccctttttagctcagatattaagtttgttgttgttgttttgtttttgctttttttttgttgttttttgaaacagggtcccactctgtcacccaggct

SEQ ID NO: 742 - DNA, 1100 bp, Homo sapiens
  misc_feature (1)..(1100): DMR4:185162701
aaaacggtattctagatgtttacacagagaattataggaatatgcacgagcacttcaagaaaagttgtgtgaacaatgtttaaagtaaaaaagtgttttataaccaagctgtacggacattagggggtttaggtcttcttcgagggtggccactggaggggtcaaccgctgatcgctcactcctacaactgagaccactcgtagcactggatgtcctggaagctcctgaaaatataaaaagaagaaatatctgagaaacttctcctcacttgaagtccagactagtttttcttccacattctatgtgtgtctaatagtctaatgctatgattctcgactaggatgcacttcagaattccctgtggaagttaaaaaatataataacaaacatatccagatgccacaccaggggattttgattcactggattggcgtggaaaacaaacatttttaaaagcttctcaaataattcacgtgaaaaaaatgactttgtataaccatttatatatctaatcaacaaataacttactacatttagggacaatgctaagtatgagttactaaaataagaccctttcttagtcactataccacggaagcaaggtttggagaaggaataaatggaactactagtcttgagagttgaagactcacgagggcgggcgctgggaagttgtggcatcgggcggtttggtattcccttctatttattatatggtttagaatgcatacatgaagtacagcagagacttctgtaaaggacactggcctttctagatgttgcacactccagcactaaatggtcactccattcctgtactctctggggcacacagctggctaggtctgtaactgatcacacaacaagccttactgcttactgtaaagcggtaaggcttgttgtgtgatcagcttgctaatttttgttttagttatccagtaagtaagaaaaagcacatataagggctggaggctattagcaatgattcttaactacctaaggagaatgttttagcagcttttaaacagcacacctatgtatttcttccttcaataaactttgaaattaacagtccttcctcaattacctaagaacctac

SEQ ID NO: 743 - DNA, 300 bp, Homo sapiens
  misc_feature (1)..(300): DMR4:185648701
gaccctggcttggacataacgagctgcatgagctgagtaagttcctaccattttctaaactgcagtttcttcctctttaaaatagaaagtatctcactgggttgttctcggaatcaaatgatatgacacagaaaaagcacttagcctagtgcttggcttgtaatgagcgctcaatgaaggttacctataagtagaagtattagtcataatcccagtaaaaataacacaataaaaaagtgtttataaatttttattttcatgtagatagtttgtataaaaatatttcagtggagaaaggaa

SEQ ID NO: 744 - DNA, 5000 bp, Homo sapiens
  misc_feature (1)..(5000): DMR4:186175701
caataagtgctatgaagaaacaaagcgaggcaaggtgacggagtggaaggagctgcaactttccatcgagcggctggggaaggctgtgttgcagaggtgatatttgagcaaaccccaaagaagatgagaaaagaagcctgggagatatctggggagaaagaactgtagacagagcagaaagcatgtgcctaaacaagagtccacctggaatgtctgaagaacagcagagaggccagttcatgggatgcgcttggcaagggagtgaataatgggagctcagtgagctaacaggagctgagggactgaggtcccttttggactatgggaaatatgaaataagaagccactggagcagttgagttttggggatagaatgatataatcgacaagagatgatcctgtttcagtcagatgatagtggtaaggctgatgagaatcccaggactttgcatgtgttttgaaatttgagccaaaagatgtgctgttggatgagaggtggagtgtgtctaccaaaagaatcgagaatgcctccaggcttttggcttcacacttggaaggatggtgttgacactcactgaaattggaaagactgcaaggggaacacgtttggcagcatgaggggcaagttatgtgtgagatgccaattagatgcctaagtggagatattgagatatttggatatccacacttgggtgtggaggtgaggtatagactggatgtataaatttggggattgtcagcacgtagatggtatttaagaactgaaatggatgaggcaaccaagaaaatgagtgtagagaaatggaggaaaaagaagtactgagccttgtgccttttaacatctaaaggcctgggatgtgaaggaaaaccagcaaagcagactgagaaagaatggctggtgaagggaaataagagtcaggagaatgtggcgtcctcaaagtatgtgtgtgtttgtgcgggggaagtgtttcaaggaagtgatagggactcaagtatgttgaatgctgttgatgagtcaattacgatgaggtctgagaatcagactaaaggtctagccacatggaagttactggtggccttgacaagatctgctaggtgaatggacaaggcgaaagtaggcttgcagtgggtttgggagaaaagaagaagagagaaatccaagacagtagtcatgggcaagtcttccagggaatttttctgtacaggggagtagagtatgtgtgtgtgtgtgtgtgtgtgtgtgtgtgtgtgcatgcacgtgtgtttcctagtaaggttcatcttgatgaatgtcattattcagtataaaaatgttgatccaaaaaggaagatagctctagtgttctctggaggacatgcagagtgtattcccactggaaaattaaagaaaaagctgacagagctgagtgaatagtaagttataactcagaagcaacattcagagaaggctacaccttgtgaaggatgtcttcagagttcacaaaaagaacattgtgggggtgaaagttttagcttagaaggcaaaagatttcaaaaatatacagaatcaaaatgatgttaaaaataaacatggaggcattccactactgtttatgaaagaatagttcatgagcaaactgacctactgagaacaactataaaagctataaatggacaagaaacagctctttggaggcacgcgtggacacccacatccacacccacccagccccccaagacaaagcagcacaacttcaggaaacaaattgggagacaacaggaataatacattgagatgaaccccatatttgctactgttttctttccctgtatcaatatattttagattagtaatggggcatagaggccaagaaaaagggataccctcaaaatttgtgacaagctcactaggctgccaaaaggaatgatgttgggaaatgtctcagactttgaattgataatcttgaaggactacactctaggagtaagggcaagcttaatacagacaagtcctcaaaacactagaagcagaacctagaatcaatgaaacctctgtttagatccaggttatatgcctgtactttatatgaccaccagaaaaagtatcctctttaaagaaatatagcatcacctagaatttctattatttttatatacaatgtacagcattcaatctaaaattaagagacagcccaggatatagggccaagtgactgaaagccaagagagaaaacaaaattataatggacccacacgtgattaaaatagtagcactatcaggtacaagctaagaaacaatttgatttgcacattcaaaaatatattgaaaaacaatttcaagagagaactgtaatctgaaaaataatcaaactgatatcctagaaatgaataatacaatgactcaataattcactagctgtgttgaactgcagattacacatagcagacaagaggcttagtaaactggaaggcaggtcaatacacagtattcactttgaacaagcataaaaaatagatattccttaaaaattgtgaggccatgtgaaaaaatctcatatccgtgtaatgatagtcatagaggagaaagagaatagaacaatgcagtattgaacagataccatgaaagaatcttccaaaaatagatagaagacatcgatgcagtcatttaagaagctataagaaacacaagatagaaagcaaaacatactcaggtccatcacaaactgctagaaaccccaaatcaaaaagaaccaaacagcagtcagagggaggggggaaagactcattatcttcaaagaagcaacaataagactaatatttgacttttcaacacaagtgatggaagctgaaagacaatataaaaagcatctttaaagtgctgaaaaaaataattgccaacccagaattttatacgtagtaaacatatacctcaaaaatgagggcaaaagagcagtattttcagataaaccaaaattgggaatttatcaccggcaaatctgtactaaaggaaatacaaacgagagctcttcacagagtaggaaaattatcccagaaggaagtacaatgataaaagaagaagtaataaagatcagaatgtatacatacgtgggaaaatagaaaagaatacttactgtataaaataatgagtaatacagaattcagtatatatttgggattaaaatattatagaaatagcttaaaattgggaagggtttatttgctgttaaagtgttatagattcatcattgtccaggattactgttctaaggtagagttttataaagcagtgcgtgtgatatagcgagatgaaggcacaaaatactatcaggaatgaaaataggcataccactgctgattctatagatgtgaaaaaagataagcattatactatgaataacttgatttggtaatttagatgaaaattaaaactttgaaaaaatcacatcactcaagaagaaatagaaaatttgaaaagggttatgtctattataagacttaaatgtattattaaaagccttctcacaaagacaactccaagtcctgctgacttcattggttaatccttccaaatatttaaggaaaaactaataccactagtagcaatatcaaaaagctcttcaggcctgggcatagtggctcatgcctataatcccagcactttgggaggctgaagcaggaggattgcttgagcccagaggctcgaggttacagtgagttatgatcacgccactgcactccagcctgggtaacagagtgagactttgtctctctaaaaaactaacaaaaaagttattcaagatgattgtcattttgtaaggctaccacaaccctgatacaaaacctaacaaggacattacaaaaaaaaaaagtaaattacaataaagtaactgagaattataaaaaaaaaaaaaaaagcgaattataggccaatatcatccctgaactcccaagcaaaatcaaatcagtaatatatgaaatagataatacgtaccatccaaattaaatttatttcagaaatgcaagtttgatgtaccatgtgaaaatcattcagtgcaacaaatgatgtaaggaaacaagcatgggatcttctcgaaagatgaagaaaatgtctttataaaaattcttagtcaaccaggaagataagaatatcactgttatctcttcatgagtatctaggggaaaaaaacaactgcaaactgcatacttagtggtaattttattctgattttacttactgaagaagctatacttcctgagatcagataatacgaagtgtcagctaccgccactgttattcatgatacagaatatattttccaccccagcagggcaagattaaattattaaagggtcttaagatttaggaagaaagaaacaatttggtttttcacagaaaacatgattgtgtacatagaaaatccaaaataattacaaacacacttaaaaatgtgatttaacaacatcattgaaaacagtcaatataaaaattacgtgcatttctatataacaacagataatacaatttataaaaatacaatataatagattcaaaaatcaaatacctaggaataaatttaataaaaatgagtatattagagttcttcagagcaacaaaattattaggagatattagattatgtaatataatgtatatctggagggagagagtttttcttttttttgatttgagtgtattttattttattttattttttattatactaagttctagggtacatgtgcacaatgtgcaggtttgttacatatgtatacatgtgccatgttggtgtgctgcacccattaattcgtcatttacattaggtatatctcctaatgctatccctcccctctccccacaccctatgacaggccctggtgtgtgatgttccccatcctgtgtccaagtgttcttattgttcaattcccacctatgagtgagaacatgtggtgtttgggtttctgtccttgcgacagtttgctcagaatgatggtttccagcttcatccatgtccctacaaagg

SEQ ID NO: 745 - DNA, 200 bp, Homo sapiens
  misc_feature (1)..(200): DMR4:186315601
ccttaaaattggagaggcagacagacaaacccagagaattatagcttaattcaaacacagcccaggagcagcaatcgccactggagccagtactggggtaggaaaacttagactgcaattgacaaatttctgaaggctcttgtagataagcttgagcattaaaaatgccagaagggggcctggtctggggtgggggcaca

SEQ ID NO: 746 - DNA, 1900 bp, Homo sapiens
  misc_feature (1)..(1900): DMR4:186476501
cagaccccattcatcgatcacagctctccttccaccactcattgatcacagctctccttccaccactcatcgatcacagctctccttccaccattcatcgatcacagctctccttccaccattcagtgatcacagctctccttccaccattcagtgatcacagctctccttccaccattcagtgatcacagctctccttccaccattcagtgatcacagctctccttccaccattcagtgatcacagctctccttcccccattcagtgatcacagctctccttcttccattcattgatcacagctctccttctcccattcatcgatcacagctctccttccaccattcatcgatcacagctctccttcccccattcatcgatcaaagctctccttccaccattcattgatcacagctctccttccaccatgcagtgatcacagctctccttcccccatgcagtgatcacagctctccttcccccattcatcgatcacagctctccttccaccactcattgatcacagctctccttccaccactcattgatcacagctctccttccaccattcagtgatcacagctctccttcccccactcattgatcacagctctccttccaccattcagtgatcacagctctccttccaccattcagtgatcacagctctccttccaccattcagtgatcacagctctccttcccccattcattgatcacagctctccttccaccattcagtgatcacagctctccttcccccattcattgatcacagctctccttccaccactcagtgatcacagctctccttccaccattcagtgatcacagctctccttcccccattcagtgatcacagctctccttccaccattcagtgatcacagctctccttcccccattcattgatcacagctctccttccaccattcattgatcacagctctccttccaccattcattgatcacagctctccttcccccattcattgatcacagctctccttccaccattcagtgatcacagctctccttcccccattcatcgatcacagctctccttccaccattcagtgatcacagctctccttccaccattcagtgatcacagctctccttccaccatgcagtgatcacagctctccttccaccattcagtgatcacagctctccttcccccattcattgatcacagctctccttcccccattcatcgatcacagctctccttccaccattcagtgatcacagctctccttcccccattcatcgatcacagctctccttccaccattcagtgatcacagctctccttccaccattcagtgatcacagctctccttccaccattcagtgatcacagctctccttccaccattcagtgatcacagctctccttcccccattcattgatcacagctctccttcttccattcattgatcacagctctccttctcccattcattgatcacagctctccttcccccattcatcgatcacagctgtccttcccccattcatcgatcacagctctccttccaccattcattgatcacagctctccttccaccatgcagtgatcacagctctccttcccccattcattgatcacagctctccttccaccattcatcgatcacagctgtccttcccccattcattgatcacagctctccttccaccattcatcgatcacagctctccttccaccattcatcgatcacagctgtccttcccccattcattgatcacagctctccttccaccattcagtgatcacagctctccttcccccattcatcgatcacagctctccttccaccattcagtgatcacagctctccttccaccattcagtgatcacagctctccttcccccattcatcgatcacagc

SEQ ID NO: 747 - DNA, 200 bp, Homo sapiens
  misc_feature (1)..(200): DMR4:187181101
catattaagtgatttttccacaagggcttctctttctcctctttagtgaactggactgtaaatatgtgaatatggtagctgttttgctagccttttgtttttttctgaaactcagcgaataaagttgaactttggacatttccttatgtatttttcttcagcatatgaaaaacttcctggcacagttttctgtccgggga

SEQ ID NO: 748 - DNA, 700 bp, Homo sapiens
  misc_feature (1)..(700): DMR4:187313901
tctaccagattactttagatcatagccttctttagatttctctaaattatatgtctttggacctcagatatacatggtcttcttttgagaaatgtctattcaaattttttgctcatttttaaattggattgtttggtttcttcctattgagttgtttcttgtatatttcagatgttaatcccttattaaatgtagggtttgcaaatattttcttctattccacaggttctctcttcacttggatgattgtttcctcagatgtgcagaagcatttaaagttgatataatctcatttgtctatttttttttattttcttgcttgtgcttttgggttcatgtaaaagaaattattgctcagaccaaagttatagagcttttcccccatattttgcttcagcaggtttatagtttcaggccttacatttaggtctttaatctgctttgagtttacttctgtatgtggtgtgagatagcataagacatacaaaaggccagcaagtatacggaaaaagaagacttgcaaataaccaacaggcatatgaagagatgctcagcatcactaatcagcagagaaatgcaaatgaaagccacaacaaaatagcagctcacacctgttagaatggcttttatcaaagagatgaaagttaaatgttggcaaggatgtagaaaagacgaaggccttgcatactgctggtgggaa

SEQ ID NO: 749 - DNA, 1600 bp, Homo sapiens
  misc_feature (1)..(1600): DMR4:187432401
cctactgcgaagctgctccccacttcccacctcttctgttatccctacactccagcaggagcatttacctactgcgaagctgctccccacctcccacctcttcttctgtatccctacactccagcaggagcacttggctactgggaagttgctccccacctcccacctcttcttctgtatccctacactccagcaaagctgttgtggctcacctaagtattttatgttcccccaacttgatcgagatctctcttttctcctccatttccgcgcatccaaattctagaccctatccaaaccccacatcttccaagttctttcctaattccccaaccagaagtaatgtttggattccagcagcattttacttgtatcttcagaggatacacgatcactttctacctgggattagaagttttatgtgcataccttgctctttttactgggatgtggtattcctgagagcaggactgatactgctttatctctttaactcttttaatagttgtcatagtttatatgtttagaaagaaaatcaatattcatggataaggtagcaaggattcatttagaatacaaaagacagaagcttagatcagacaaaatctaatgctaactatataactgagtcaaatatttcaatgtgaaaggatgctaaaagatgatttggtctattcattttaaaaattagaaaattaagaagcagaatattaacagacttttttttgcaattctatattgtgtacccccagataggatgaaattttaaataattttcaaaatgtgatcacttttatttcactgtcttaactcattcccacaaacatatcctaaatcatcagctgaaatgacctcaccagaaccagccctcttgttcttctccttcatgcgcctaaccagcacaatgatctgattgtttttctaattttattttgacccgtatacatggcaacaatatggtgacgtggaaaagaacatgtactttggcatcaggtatctccgggttttattccctgctctgttactttcataatttgtagccctcaggctctctgagcttcagtttgctgatttgtaaatttaggatattgaaaagattacaatagctaatattattgagaccttgctaaatatatactgttctgaatgctttacatttattgtctgaaatctcaaaacaactctatgaagtaggcactattattaaccacacacttatagatgaagtagatactataattatccccatatgatagacggagaagtgacggcttagagaagttagctggcgtctagagtcacacagttactgaagagtggagctagaaccgaaaccccgttcttccgacttgcgagcccatgaacaaatgattattgtgaggatgatttgcaaaggccagtcctactgtttgctataaagagtgtttctcaggactcaggttgaatgctgttattttaagtatgtatgagttaattttactccaattacagaaactctctagttgtggggtttaaggaacaaatgttacattctctatcatgagcactccccatctgttgacattaggaatcttagctaatttttcttttactgttgcaa

SEQ ID NO: 750 - DNA, 2300 bp, Homo sapiens
  misc_feature (1)..(2300): DMR4:187898701
gaaagagaatttttttcattagttcacttggatattttgtgctgctctattttctttcttaaaaaaaaaaaacatctagaggataaggaaaataaaactttgcagatttttgtcaaatactattcagtagaaggattattttcttaaggaaataaaaaatgaaacttagattcctgggcttagtctcttggaattcattatttcaattattttgttcatgctaccaaagaaaccttcttttttttttttttttttttttgaaacagagtctcgctctgtcacccaggctggagtgcagtgacacaatatcggcttattgcgacctccgcctcccagattcaagtgattctcctgcctcagcctcccgagtagctaagattacaggcgcacgcccccatgcccagctaatttttgtatttttcatagaaatgaggtttcactatgttggccaggctggtcttgaactcctgacctcagggaatctgcccacctcggcctcccagagtgctgggattacaggcatgagccactgtgcccggtctcaaataaaccttcttgaaaaaattatattctcataggaagcgcattagactaattatattttgtagataaataacactaaacatagcttacatataaaaatttctttgcttaagaattaaatgaaataattctctggaaaacattcaattactagatattttagcataattgctcaattttgtgaaagaatcaaatgcacatttgtccttaataatatgaagaatggaaattcagttttctaaactatctatattttaattaaaagaaattcactctctttgtaataagataataatgcggtattaaaataaaagcattctcaatagtaaaatgtttttgctgactagctttgttaataaaactatgttttgaacaatcactggattaatcctagtgacaatgtgtagagttttcaaaacaggaacattaacagactcttgtcccatagtcttggtacaatggtaggagcctggcttaaggtagatgggctagagagaaagagagggaaataggagattgtaatgaaatagagccaaccaaacgtgttaaattttacacaggagatgaggaaaacttcaagatggtgccataatttcttgcttgagtgactgcccgtggaagacagaatttatcaacatagaagatggggaggaattaagatcttttcttactgaaaagatcctaagtttggagcgttttgccctgtagctatttaactctcaaccaggtatttggatatacaagtttattgttcagagtaatagaagctagagaaaaatattggaaatggtcagtataaaacttgtggatagcagaaattctggttgaaatcacccaaagtgtttaaagaaaatagaaggtggttaaggacaaaactgatagaaagagaaggaaggaagggaaggacaaatggagacctgaaagtttctgaacaaaacagggaaatcggagaaaacccaaaagactgatgtggcaaaaaccaaagaactcaagttttaaaacagagcactggttaacagaaatgaatgaagcagaaatattcaatataagcaggactgagaggtgaatattggaattgcctatctggatatcactagaagaaaggtttcagcagcaagggagatgctaagccagcagttagacgcttgaggccaatgctgctaagctgaaaatgtgcacttagaactgattagtatgtagacagtatttggagccattaaatcagtgtgagatgacttggggatgagtgtgggtaaagagaagagaacctagaactaagaaagagacagagggggaaccagcaaactgagaaggagaggccagggagacgagagggacaccaacagcttgtggggccctgataggctttatgaacttgagtcaaagaggaccgggtggtcggctgtgtgaagtgctgccaccagatgagatgggcagttccactggaattcatactgcggaggttattggccatgctagggaaatgcctaacaggagccactcaaaaacatgtcaaagtcaacaaaggtaaagaaagcctaaggaatggttccagattaaaggctactaacaggacatgataattacatgtgacatatgaccctggactgcattgagatcactggcaaaatgtgaatgtagactacatattggatagtaatgtggtatcaatgtttagttttctgattttgataactttactgcagttatgagagagaatactctttttcttcggaaatatacaataatgtgcttca

SEQ ID NO: 751 - DNA, 300 bp, Homo sapiens
  misc_feature (1)..(300): DMR4:188342801
ctctttctcttttggccacaccagacaggagaagggaatttaaggaaatgtggagcatagtagttacagggaagatggaaaaagacatgtgttgtttgagtttgtttcaacattgatgaggtgtgttgggcagtatgaagagggagaagagagtgagagcaagaaggaactgtagggaacacaaataggacagaggacagggagaaaaagaagacatgcgtgagattaaaagaaactggccgggcaccgtggctcatgcctgtaaccccagcactttgggaggctgaggtgggcggatca

SEQ ID NO: 752 - DNA, 6600 bp, Homo sapiens
  misc_feature (1)..(6600): DMR4:188443001
tggctaacatctgcccattatctggaagtgatatctaacatccccccattatccggaagtgatatctaacatcccccattatctggaagtgttatctgacatcccccattatccggaagtgaatatctaacatctccccattatctggaagtgttatctaacatcccccccattatctggagtgatatctaacatccccccattatctggaagtgatatctaacatccccccattatctggaagtgatagctaacatccccccattatctggaagtgatagctaacatcccattatctggaagtgaatatctaacatcccccattatctggaagtgttatctaacgtcaccccattatctggaagtgatatctaacatccacccattatctggaagtgatatctaacatcccccccattatctggaagtgatagctaacatccccctattatctggaactgatagctaacatccccccattatctggaagtgatatctaatttccaccattagtgacactcctccatgtttcaaggtatgtatttcaagaaagcccttgttagaataacaggaatttattggggagaatagcacaatgtcttcttttttttgagacagagtttcgctctgtcgcccaggctccggtgcaatggcgtgatcttggctcactgcaacctctgcctcccgggttcaagcgattctcctgcctcagcctcctgagtagctgggactacaggcatgtgtcaccaaccctggctaattttgtatttttagtagagacgggggttctccatgttggtcaggctggtctcgaactcccaatctcaggtgatccgcctgcctcggccacccaaagtgctgggattacaggcgtgagccaccgcgcccggccacaatgtctttatcaatctacacgtaaggaattttctggtaaaatagtgctgggcagattgcaagtgggagcagtgacattgggtttgaacaacaaacttaaaagaaaagaaacaaagaaaagaacacataatctgtaggctgggtttctgtctgtctggttttgggatgcaaagagaagaaaaaatgaggtagtaggcatttagttattttctagcctaagattaaagtgctttttgctcctgcctaactttaggaaagtgaggaaacaacattcacagacaaaggacaattgagcatgagctccaggggaccatcagcaaaacattttcagaagatgtgaagagtaggatgcgtaagtcatggagcagatcagaggcctgtggataaggtaccaaggacaaggaagactctgtcggttgatgatcttgagcagtgctgctaggtcacttcaaaatggagacgtgatttatgggcatgttattgtctacatgtaatcaacacatggaatctttataatacgtatctatatttctatgaattaaagttttcctatggcctatagttaagtgttcttgcgaggtgtgtgagcaggtgcacctatgctgtacatgggggaggatgctagataaagaatattatctactctgtcttacagatcattcccagacggggtggtagaaacataccatacgaatgtaaggaggttcctaaaaatgttcacttgggccataagcaccatacaattgagcaaggttgcacatttatgaagctctacaaagcacaggttggtttagcattatctgctgagccattgggcaataccccgtgaggggcacagagagatgggacaaggcgcacagagggcatctggggagtcaggaaacagcatgaggacagggggcccctgggaatagaaggagacttgttcaagggaagaaactgaaaaacaaaacacaagggagatgatagggaaaatcagggtctctgtgtagttatctgtgtgactcagcatggggagacgatagggaaaatcagggtctctgtgtagttatctgtgtgactcagcatggggagacgatagggaaaatcagggtctctgtgtagttatctgtgtgactcagcatggggagacgatagggaaaatcagggtctctgtgtagttaatctctgtgactcagcatggggagacgatagggaaaatcagggtctctgtgtagttatctgtgtgactcagcatggggagacgatagggaaaatcagggtctctgtgtagttaatctctgtgactcagcatggggagacgatagggaaaatcagggtctctgtgtagttaatctctgtgactcagcatggggagacgatagggaaaatcagggtctctgtgtagttaatctgtgtgactcagcatggggagacgatagggaaaatcagggtctctgtgtagttatctgtgtgactcagcatggggagacgatagggaaaatcagggtctctgtgtagttatctgtgtgactcagcatggggagacgatagggaaaatcagggtctctgtgtagttatctgtgtgactcagcatggggagacgatagggaaaatcagggtctctgtgtagttatctgtgtgactcagtatggggagacgatagggaaaatcagggtctctgtgtagttatctgtgtgactcagcatggggagacgatagggaaaatcagggtctctgtgtagttaatctgtgtgactcagcatggggagaccatagggaaaatcagggtctctgtgtagttaatctctgtgactcagcatggggagatgatagggaaaatcagggtctctgtgtagttatctgtgtgactcaccatggggagacgatagggaaaatcagggtctctgtgtagttatctgtgtgactcaacatggggagatgatagggaaaatcggggtctctgtgtagttaatctgtgtgactcagcatggggagacgatagggaaaatcagggtctctgtgtagttaatctctgtgactcagcatggggagacgatagggaaaatcagggtctctgtgtagttatctgtgtgactcagcatggggagacgatagggaaaatcagggtctctgtgtagttatctgtgtgactcagcatggggagacgatagggaaaatcagggtctctgtgtagttatctgtgtgactcagcatggggagacgatagggaaaatcagggtctctgtgtagttatctgtgtgactcagcatggggagacgatagggaaaatcagggtctctgtgtagttatctgtgtgactcagcatggggagacgatagggaaaatcagggtctctgtgtagttatctgtgtgactcagcatggggagacgatagggaaaatcagggtctctgtgcagttatctgtgtgactcagcatggggagacgatagggaaaatcagggtctctgtgtagttatctgtgtgactcagcatggggagacgatagggaaaatcagggtctctgtgtagttatctgtgtgactcagcatggggagacgatagggaaaatcagggtctctgtgtagttatctgtgtgactcagcatggggagacgatagggaaaatcagggtctctgtgtagttatctgtgtgactcagcatggggagacgatagggaaaatcagggtctctgtgtagttatctgtgtgactcagcatggggagacgatagggaaaatcagggtctctgtgtagttaatctctgtgactcagcatggggagacgatagggaaaatcagggtctctgtgtagttaatctgtgtgactcagcatggggagacgatagggaaaatcagggtctctgtgtagttaatctctgtgactcagcatggggagacgatagggaaaatcagggtctctgtgtagttatctgtgtgactcagcatggggagacgatagggaaaatcagggtctctgtgtagttatctgtgtgactcagcatggggagacgatagggaaaatcagggtctctgtgtagttatctgtgtgactcagcatggggagacgatagggaaaatcagggtctctgtgtagttaatctctgtgactcagcatggggagacgatagggaaaatcagggtctctgtgtagttaatctgtgtgactcagcatggggagacgatagggaaaatcagggtctctgtgtagttaatctctgtgactcagcatggggagacgatagggaaaatcagggtctctgtgtagttatctgtgtgactcagcatggggagacgatagggaaaatcagggtctctgtgtagttaatctgtgtgactcagcatggggagatgatagggaaaatcagggtctctgtgtagttaatctgtgtgactcagcatggggagacgatagggaaaatcagggtctctgtgtagttaatctgtgtgactcagcatggggagacgatagggaaaatcagggtctctgtgtagttatctgtgtgactcagcatggggagacgatagggaaaatcagggtctctgtgtagttatctgtgtgactcagcatggggagatgatagggaaaatcagggtctctgtgtagttaatctctgtgactcagcatggggagacgatagggaaaatcagggtctctgtgtagttaatctctgtgactcagcatggggagacgatagggaaaatcagggtctctgtgtagttaatctgtgtgactcagcatggggagacgatagggaaaatcagggtctctgtgtagttaatctctgtgactcagcatggggagacgatagggaaaatcagggtctctgtgtagttatctgtgtgactcagcatggggagacgatagggaaaatcagggtctctgtgtagttatctgtgtgactcagcatggggagacgatagggaaaatcagggtctctgtgtagttatctgtgtgactcagcatggggagacgatagggaaaatcagggtctctgtgtagttatctgtgtgactcagcatggggagacgatagggaaaatcagggtctctgtgtagttatctgtgtgactcagcatggggagacgatagggaaaatcagggtctctgtgtagttaatctgtgtgactcagcatggggagacgatagggaaaatcagggtctctgtgtagttaatctctgtgactcagcatggggagacgatagggaaaatcagggtctctgtgtagttatctgtgtgactcagcatggggagacgatagggaaaatcagggtctctgtgtagttatctgtgtgactcagcatggggagacgatagggaaaatcagggtctctgtgtagttatctgtgtgactcagcatggggagacgatagggaaaatcagggtctctgtgtagttaatctctgtgactcagcatggggagatgatagggaaaatcagggtctctgtgtagttatctgtgtgactcagcatggggagacgatagggaaaatcagggtctctgtgtagttatctgtgtgactcagcatggggagacgatagggaaaatcagggtctctgtgtagttatctgtgtgactcagcatggggagacgatagggaaaatcagggtctctgtgtagttatctgtgtgactcagcatggggagacgatagggaaaatcagggtctctgtgtagttaatctctgtgactcagcatggggagacgatagggaaaatcagggtctctgtgtagttatctgtgtgactcagcatggggagacgatagggaaaatcagggtctctgtgtagttaatctctgtgactcagcatggggagacgatagggaaaatcagggtctctgtgtagttatctgtgtgactcagcatggggagacgatagggaaaatcagggtctctgtgtagttatctgtgtgactcagcatggtgagacgatagggaaaatcagggtctctgtgtagttatctgtgtgactcagcatggggagacgatagggaaaatcagggtctctgtgtagttatctgtgtgactcagcatggggagacgatagggaaaatcagggtctctgtgtagttatctgtgtgactcagcatggggagacaatagggaaaatcagggtctctgtgtagttaatctgtgtgactcagcatggggagacgatagggaaaatcagggtctctgtgtagttaatctgtgtgactcagcatggggagacgatagggaaaatcagtctctgtgtagttatctgtgtgactcagcatggggagacgatagggaaaatcagggtctctgtgcagttatctgtgtgactcagcatacatgggtaccgcatggatagaaaagcatgataaagtttgaaaaagtatttttaagtgttgatgatgatgatgattttgaatgcaaacatactttgattgtgatgatctcttcaattatgatgttgtacaaaaccaaaaaaataaaaaacaaactgatgttcatcttcaatttgaggttaagaaaactcattatattcccagcataccttcttgttgattgaatgattgaagagtaatcagcaaacaacctaatttctaaatccttgacagccataatgataatgtgaatctcacttggagaaattctcatcccaaattgtgttccattgcttcataggaatgtactgaatccgtttcaaagatcaatgaaaataatggcatgctcatatattggatttaaacatcttatat

SEQ ID NO: 753 - DNA, 1300 bp, Homo sapiens
  misc_feature (1)..(1300): DMR4:188904601
gaccttcggactggataaatgctcctgggatgatttagcctaggcgaggaagcagaaagatagaggttcaaagattttacttcctgctactgtggcaacgtgggatttgagagtcactgtcatccagtgtcacgtgaatagggtgagacggtggcccttgctgggccagccccagcccctctgccctcctgctgctgtgagttggctggcaatttacagctgcccccgttatcccgaggggaccctctgggctgcgggaccctctggtctgcgggacactctggactgggggacactctggactgggggacactctggactgggggaccctcagggctgcgggacactctggtctgcgggacactctggactgggggacactctgggctgggggaccctcagggctgcgggacgctctggtctgcgggacactctgggctgggggacactctggactgggggaccctcagggttgcgggacgctctggtctgcgggaccctcgggactgggggacactctggactgggggaccctcagggctgcgggacgctctggtctgcgggacactctggactgggggacactctggactgggggaccctcagggttgcgggacgctctggactgggggaccctcagggttgcgggacactctggactgggggacactctgggctgggggaccctcagggttgcgggacgctctggtctgcgggaccctcgggactgggggacactctggactgggggaccctcagggctgcgggacgctctggactgggggacgctctgggctgtgggaccttcagggctgggggaccctcagggctgcgggacgctctggactgctgacccctcacccacacccagccttttctgccccatccgccctctgtgcataacctgggggtacaacaggctcgcgctgtggcttcagttgtgcttccgtgtcccgggggcttccaactgggtcctgcaggagctgagacaatctccctgcttcgctttcatcctccgggcgtgtcctgcttcttcccgagagaagcctctaagatatgacttgtacaggaatcatacgctctctcctctctctgtctcccaggctggagtgcaggcgcgatctgggctcactgcagcctccaccccctggctcaagcctcccaccccagcctcccaagtagctgggattacaggtgcgtgtcacccagctaatttctgtattttcttttagagacagggtcttgctatgttgctcaggctggcctggatctctgcagttcaagcaatcggccagtctcc

SEQ ID NO: 754 - DNA, 4900 bp, Homo sapiens
  misc_feature (1)..(4900): DMR4:190078801
ggcagctccacctccccagcccgcgcccccggacgcctccgcctccgcgcggcaggggcagatgcaaggcatcccggcgccctcccaggcgctccaggagccggcgccctggtctgcactcccctgcggcctgctgctggatgagctcctggcgagcccggagtttctgcagcaggcgcaacctctcctagaaacggaggccccgggggagctggaggcctcggaagaggccgcctcgctggaagcacccctcagcgaggaagaataccgggctctgctggaggagctttaggacgcggggttgggacggggtcgggtggttcggggcagggcggtggcctctctttcgcggggaacacctggctggctacggaggggcgtgtctccgccccgccccctccaccgggctgaccggcctgggattcctgccttctaggtccaggcccggtgagagactccacaccgcggagaactgccattctttcctgggcatcccggggatcccagagccggcccaggtaccagcaggtgggccgcctactgcgcacgcgcgggtttgcgggcagccgcctgggctgtgggagcagcccgggcagagctctcctgcctctccaccagcccaccccgccgcctgaccgccccctccccacccccaccccccacccccggaaaacgcgtcgtcccctgggctgggtggagacccccgtcccgcgaaacaccgggccccgcgcagcgtccgggcctgacaccgctccggcggctcgcctcctctgcgcccccgcgccaccgtcgcccgcccgcccgggcccctgcagccgcccagctgccagcacggagcgcctggcggcggaacgcagaccccaggcccggcgcacaccggggacgctgagcgttccaggcgggagggaaggcgggcagagatggagagaggaacgggagacctagaggggcggaaggatgggcggagggacgttaggagggagggagggaggcagggaggcagggaggaacggagggagagacagagcgacgcagggactgggggcgggcgggagggagccggggacggacggggggaggaaggcagggaggaaaagcggtcctcggcctccgggagtagcgggacccccgccctccgggaaaacggtcagcgtccggcgcgggctgagggctgggcccacagccgccgcgccggccggcggggcaccacccattcgccccggttccggggcccagggagtgggcggtttcctccgggacaaaagaccgggactcgggttgccgtcgggtcttcacccgcgcggttcacagaccgcacatccccaggctgagccctgcaacgcggcgcgaggccgacagacccggccacggaggagccacacgcaggacgacggaggcgtgattttggtttccgcgtggctttgccctccgcaaggcggcctgttgctcacgtctctccggcccccgaaaggctggccatgccgactgtttgctcccggagctctgcgggcacccggaaacatgcagggaagggtgcaagcccggcatggtgccttcgctctccttgccaggttccaaaccggccacactgcagactccccacgttgccgcacgcgggaatccatcgtcaggccatcacgccggggaggcatctcctctctggggtctcgctctggtcttctacgtggaaatgaacgagagccacacgcctgcgtgtgcgagaccgtcccggcaacggcgacgcccacaggcattgcctccttcacggagagagggcctggcacactcaagactcccacggaggttcagttccacactcccctccaccctcccaggctggtttctccctgctgccgacgcgtgggagcccagagagcggcttcccgttcccgcgggatccctggagaggtcagaagagccggcccccgaaacgcgcccccctcccccctcccccctctcccccttcctcttcgtctctccggccccaccaccaccaccgccaccacgccctccccccccaccccccccccccaccaccaccaccaccaccaccccgccggccggccccaggcctcgacgccctgggtcccttccggggtggggcgggctgtcccaggggggctcaccgccattcatgaaggggtggagcctgcctgcctgtgggcctttacaagggcggctggctggctggctggctgtccgggcaggcctcctggctgcacctgccgcagtgcacagtccggctgaggtgcacgggagcccgccggcctctctctgcccgcgtccgtccgtgaaattccggccggggctcaccgcgatggccctcccgacaccttcggacagcaccctccccgcggaagcccggggacgaggacggcgacggagactcgtttggaccccgagccaaagcgaggccctgcgagcctgctttgagcggaacccgtacccgggcatcgccaccagagaacggctggcccaggccatcggcattccggagcccagggtccagatttggtttcagaatgagaggtcacgccagctgaggcagcaccggcgggaatctcggccctggcccgggagacgcggcccgccagaaggccggcgaaagcggaccgccgtcaccggatcccagaccgccctgctcctccgagcctttgagaaggatcgctttccaggcatcgccgcccgggaggagctggccagagagacgggcctcccggagtccaggattcagatctggtttcagaatcgaagggccaggcacccgggacagggtggcagggcgcccgcgcaggcaggcggcctgtgcagcgcggcccccggcgggggtcaccctgctccctcgtgggtcgccttcgcccacaccggcgcgtggggaacggggcttcccgcaccccacgtgccctgcgcgcctggggctctcccacagggggctttcgtgagccaggcagcgagggccgcccccgcgctgcagcccagccaggccgcgccggcagagggggtctcccaacctgccccggcgcgcggggatttcgcctacgccgccccggctcctccggacggggcgctctcccaccctcaggctcctcggtggcctccgcacccgggcaaaagccgggaggaccgggacccgcagcgcgacggcctgccgggcccctgcgcggtggcacagcctgggcccgctcaagcggggccgcagggccaaggggtgcttgcgccacccacgtcccaggggagtccgtggtggggctggggccggggtccccaggtcgctggggcggcgtgggaaccccaagccggggaagctccacctccccagcccgcgcccccggacgcctccgcgcggcaggggcagatgcaaggcatcccggcgccctcccaggcgctccaggagccggcgccctggtctgcactcccctgcggcctgctgctggatgagctcctggcgagcccggagtttctgcagcaggcgcaacctctcctagaaacggaggccccgggggagctggaggcctcggaagaggccgcctcgctggaagcacccctcagcgaggaagaataccgggctctgctggaggagctttaggacgcggggttgggacggggtcgggtggttcggggcagggcggtggcctctctttcgcggggaacacctggctggctacggaggggcgtgtctccgccccgccccctccaccgggctgaccggcctgggattcctgccttctaggtctaggcccggtgagagactccacaccgcggagaactgccattctttcctgggcatcccggggatcccagagccggcccaggtaccagcaggtgggccgcctactgcgcacgcgcgggtttgcgggcagccgcctgggctgtgggagcagcccgggcagagctctcctgcctctccaccagcccaccccgccgcctgaccgccccctccccacccccaccccccacccccggaaaacgcgtcgtcccctgggctgggtggagacccccgtcccgcgaaacaccgggccccgcgcagcgtccgggcctgacaccgctccggcggctcgcctcctctgcgcccccgcgccaccgtcgcccgcccgcccgggcccctgcagccgcccagctgccagcacggagcgcctggcggcggaacgcagaccccaggcccggcgcacaccggggacgctgagcgttccaggcgggagggaaggcgggcagagatggagagaggaacgggagacctagaggggcggaaggacgggcggagggacgttaggagggaggcagggaggcagggaggcagggaggaacggagggagagacagagcgacgcagggactgggggcgggcgggagggagccggggacggacggggggaggaaggcagggaggaaaagcggtcctcggcctccgggagtagcgggacccccgccctccgggaaaacggtcagcgtccggcgcgggctgagggctgggcccacagccgccgcgccggccggcggggcaccacccattcgccccggttccggggcccagggagtgggcggtttcctccgggacaaaagaccgggactcgggttgccgtcgggtcttcacccgcgcggttcacagaccgcacatccccaggctgagccctgcaacgcggcgcgaggccgacagacccggccacggaggagccacacgcaggacgacggaggcgtgattttggtttccgcgtggctttgccctccgcaaggcggcctgttgctcacgtctctccggcccccgaaaggctggccatgccgactgtttgctcccggagctctgcgggcacccggaaacatgcagggaagggtgcaagcccggcatggtgccttcgctctccttgccaggttccaaaccggccacactgcagactccccacgtt

SEQ ID NO: 755 - DNA, 1500 bp, Homo sapiens
  misc_feature (1)..(1500): DMR4:190120901
tcactgcgcctgcgccgcgcccccctccccgcgcctggcggagtgcatctccgcgcctgcgcctcgcccccgcgctggcgtgcgtctccgcgcctgcgccttgtcctcggcgccgcgctcgcgttcttctctgcgtctgcgccacgcagccgtgcgtctctgcgcgtgcatcgcgcccccacctcggcgacgcgccagcgcccgactctgcgcctgcgcccgtctttgcgccggcgccgcgctggcgtttttctctgcgcctgcgccgcgacccccggcgctggcgcttttctcggcgcctgcgctgcgccgccattttttttctgcgtctgcgccgcgccagcgtccttttctgcccctgcgcggagctcccgccccggtgccgcgccggcgtgcgtctctgggcctgcgccgcgcccccgccccggcgtgcgtctctgcgcctgcgccgcgcccccgccccggcgtgggtctctgcgcctgcgccgcgcccccgctccggcgccgcgccggcgtttttctctgcgcctgcgccccgacccccgccccggcgccgcgccggcgtgcgtctctgggcctccgccgcgcccatcggggacgcgccggcgtttttctctgcgcctgcgccacgcagccgtgcatctctccgcgtgactcttgcccccgccacggcgccgcggcggcgtccgtctctgcgcctgcgccgcggcggcgtccgtctctgcgcctgcgcggcggcggcgtccgtctctgcgcctgcgccgcggcggcgtccgtctctgcgcctgcgccgcggcggcgtccgtctctgcgcctgcgccgcggcggcgtccgtctctgcgcctgcgccgcggcggcgtccgtctctgcgcctgcgccgcgcccgcctccgtctctgcgcctgcgccgcgcccgcctccgtctctgcgcctgtgcctgcgccacgccccccgccccgcgctggcgtttttctctgcgcctgcgccgcgccaccatccgtctctgcgcctgcgcggggccccatcatggcgccgcgccgccgtgtgtctctgggcctgcgtcgcgcctcgggccaggcgccacgctgccgtccgtgtctgcgcctgggccgcgctcccatcccggcgccgcgccggcgtgcgtctctgcgtctgcgccgcgccccacgccccggcgccacggtggcatgcctctctcggcctgcgccgcgccccccagggacgcgccgtcgtttttctctgcgcctgcgctgcaccgacgtttttttctgcgcctgcgatggctctatgcctttgcgagggcggagctgcgttcccctcagcgcagacctggagagcatcgcgaaggaggagctccgttttcctctgcagagacttcggggggaacgcgatgacggagctgcattctgctcagcacagacgcgggggacatcgcgaaggtggagcagcgcatgcctctccacagacgttgggggcactgcttcattttgggacaactggg

SEQ ID NO: 756 - DNA, 2200 bp, Homo sapiens
  misc_feature (1)..(2200): DMR5:164501
agggggcggagctcacacagtaatgctgtgacagggggcggagctcacacagtaatgctctgacagggggcggagctcacacagtaatgctgtgacggagcggagctcacagtaatgctgtgacggagcggagctcacactaatgctctgacgggcggagctcacactaatactctgacagggggcggagctcacactaatgctctgacggggcggagctcacactaatactctgacggggcggggctcacagtaatcctctgacggggcggagctcacactaatgctctgacggggcggagctcacacactaatgctgtgacggagcggagctcacactaatgctgtgacagggggcggggctcacagtaatgctctgacggggcggagctcacacagtaatgctgtgacggggcggagctcacactaatgctgtgacggggcggggcttacacactaatgctctgacggggcggagctcacactaatgctctgacggggcagggctcacagtaatgctctgacagggcggagctcacactaatgctctgacggggcggagctcacactaatgctctgacggggcggggctcacactaatgctgtgacggggcggagctcacacagtaatgctgtgacggggcggagctcacactaatgctctgacggggcggggctcacagtactcctctgacggggcggagctcacactaatgctctgacggggcggagctcacactaatgctctgacggggcggggctcactaatgctctgacggggcggggctcacactaacgctctgacggggcggggctcacagtaatcctctgacggggcggagctcacactaatgctctgacggggcggggctcacagtaatcctctgacggggcggagctcacactaatgctctgacggggcggggctcacactaatgctctgatggggcggggctcacactaatgctctgacggggcggagctcacactaatgctctgacggggcggggctcacactaatgctctgacggggcggggctcacactaatgctctgacggggcggggctcacagtaatcctctgacggggcggggctcacactaatgctctgacggggcggagctcacactaatgctctgatgtggcggagctcacactaatgctctgacggggcggggctcacactaatgctctgacggggcggagctcacactaatgctctgacggggcggggctcacactaatgctctgacggggcggggctcacagtaatcctctgacggggcggagctcacactaatgctctgatgggacggggctcacactaatgctctgacggggcggggctcacagtaatcctctgacggggcggagctcacactaatgctctgacggggcggagctcacactaatgctctgacggggcggggctcacagtaatcctctgacggggcggagctcacactaatgctctgacggggcggggctcacagtaatcctctgacggggcggggctcacactaatgctctgacggggcagggctcacactaatgctctgacggggcggggctcacagtaatcctctgacggggcggagctcacactaatgctctgacgggacggggctcacactaatgctctgacggggcggggctcacagtaatcctctgacggggcggagctcacactaatgctctgacggggcggggctcacagtaatcctctgacggggcggggctcacactaatgctctgacggggcggggctcacactaatgctctgacggggcggggctcacagtaatcctctgacggggcggagctcacactaatgctctgacggggcggggctcacactaatgctctgacggggcggggctcacagtaatcctctgacggggcggagctcacactaatgctctgacggggcggagctcacactaatgctctgacggggcggagctcacactaatgctctgacggggcggggctcacagtaatcttctgacggggcggagctcacactaatgctctgacggggcggggctcacactaatgctctgacggggcggggctcacactaatgctctggcaggaggcggagctcaggtggcaacactccctcgcctgccactcacctcctgctgggcggcctggttcctaataggccacagatgggtaccagtcggtggccctgggg

SEQ ID NO: 757 - DNA, 3900 bp, Homo sapiens
  misc_feature (1)..(3900): DMR5:561701
ccctcccaacacggacgaccggacagcaccaacacaggcccccgcagaggggcgcagctgacgggacggcgccgacacaggcccccgcagaggggctcagctgacgggagggcgacaacacaggcccccgcagaggggcgcagctgacgggacggcgccgacacaggcccccgcagaggggttcagctcaggggacggcgccgacacaggcccccgcagaggggctcagctcaggggacggcgccgacacaggcccccgcagaggggttcagctcaggggacggcgacgacacaggcccccgcagaggggttcagctcaggggacggcgacgacacaggcccccgcagaggggttcagctcaggggacggcgccgacacaggcccccgcagaggggctcagctcaggggacggcgccgacacaggcccccgcagaggggcgcagctgacgggagggcgacaacacaggcccccgcagaggggctcagctcaggggacggcgacgacacaggcccccgcagaggggcgcagctgacgggacggcgccgacacaggcccccgcagaggggcgcagctgacgggacggcgccgacacaggcccccgcagaggggttcagctcagggaacggcgacaacacaggcccccgcagaggggttcagctcaggggacggcgacgacacaggcccccgcagaggggcgcagctgacgggacggcgccgacacaggcccccgcagaggggcgcagctgacgggacggcgccgacacaggcccccgcagaggggttcagctcagggaacggcgacaacacaggcccccgcagaggggttcagctcaggggacggcgacgacacaggcccccgcagaggggttcagctcaggggacggcgacgacacaggcccccgcagaggggttcagctcaggggagggcgacaacacaggctccccgcagaggggttcagctcaggggacggcgacaacacaggcccccgcagaggggcgcagctgacgggacggcgccgacacaggcccccgcagaggggcgcagctgacgggacggcgccgacacaggcccccgcagaggggttcagctcagggaacggcgacaacacaggcccccgcagaggggttcagctcaggggacggcgacgacacaggcccccgcagaggggttcagctcaggggacggcgacgacacaggcccccgcagaggggttcagctcaggggagggcgacaacacaggctccccgcagaggggttcagctcaggggacggcgacaacacaggcccccgcagaggggcgcagctgacgggacggcgccgacacaggcccccgcagaggggcgcagctgacgggacggcgccgacacaggcccccgcagaggggttcagctcagggaacggcgacaacacaggcccccgcagaggggttcagctcaggggacggcgacgacacaggcccccgcagaggggttcagctcaggggacggcgacgacacaggcccccgcagaggggttcagctcaggggagggcgacaacacaggctccccgcagaggggttcagctcaggggacggcgccgacacaggcccccgcagaggggttcagctcaggggacggcgacaacacaggcccccgcagaggggcgcagctgacgggacggcgccgacacaggcccccgcagaggggcgcagctgacgggacggcgccgacacaggcccccgcagaggggttcagctcagggaacggcgacaacacaggcccccgcagaggggttcagctcaggggacggcgacgacacaggcccccgcagaggggcgcagctgacgggacggcgccgacacaggcccccgcagaggggcgcagctgacgggacggcgccgacacaggcccccgcagaggggttcagctcaggggacggcgccgacacaggcccccgcagaggggctcagctcaggggacggcgccgacacaggcccccgcagaggggttcagctcaggggacggcgccgacacaggcccccgcagaggggttcagctcaggggacggcgccgacacaggcccccgcagaggggctcagctcaggggacggcgccgacacaggcccccgcagaggggttcagctgacgggacggcgccgacacaggcccccgcagaggggctcagctcaggggacagcgccgacacaggcccccgcagaggggctcagctcaggggacggcgccgacacaggcccccgcagaggggttcagctcaggggacggcgccgacacaggcccccgcagaggggttcagctcaggggacggcgccgacacaggcccccgcagaggggttcagctcaggggacggcgccgacacaggcccccgcagaggggttcagctcaggggacggcgacgacacaggcccccgcagaggggttcagctcaggggacggcgccgacacaggcccccgcagaggggctcagctgacgggacggcgccgacacaggcccccgcagaggggctcagctcaggggacagcgccgacacaggcccccgcagaggggctcagctcaggggacggcgacgacacaggcccccgcagaggggttcagctcaggggacggcgccgacacaggcccccgcagaggggctcagctcaggggacggcgccgacacaggcccccgcagaggggttcagctcaggggacggcgccgacacaggcccccgcagaggggctcagctcaggggacggcgccgacacaggcccccgcagaggggttcagctcaggggacggcgccgacacaggcccccgcagaggggctcagctcaggggacggcgccgacacaggcccccgcagaggggttcagctcaggggacggcgccgacacaggcccccgcagaggggctcagctcaggggacggcgccgacacaggcccccgcagaggggctcagctcaggggacggcgacgacacaggcccccgcagaggggctcagctcaggggacggcgacgacacaggcccccgcagaggggctcagctcaggggacggcgccgacacaggcccccgcagaggggcgcagctgacgggacggcgccgacacaggcccccgcagaggggttcagctcaggggacggcgacgacacaggcccccgcagaggggttcagctcaggggacggcgacgacacaggcccccgcagaggggttcagctcaggggacggcgacgacacaggcccccgcagaggggttcagctcaggggacggcgccgacacaggcccccgcagaggggttcagctgacgggacggcgccgacacaggcccccgcagaggggttcagctgacgggacggcgccgacacaggcccccgcagaggggttcagctgacgggacggcgccgacacaggctccccgcagaggggcgcggctcaggggacggcgacgacacaggcccccgcagaggggctcggctgacgggacggcgacgacacaggcccccgcagaggggttcagctcaggggacggcgacgacacaggctccccgcagaggggctcggctgacgggacggcgacgacacaggcccccgcagaggggcgcggctgacgggacggcgacgacacaggcccccgcagaggggttcagctgaggggacggcgccgacacaggctccccgcagaggggcgcggctcaggggacggcgacgacacaggcccccgcagaggggctcggctgacgggacggcgacgacacaggcccccgcagaggggttcagctcaggggacggcgacgacacaggctccccgcagaggggctcggctgacgggacggcgacgacacaggcccccgcagaggggcgcggctgacgggacggcgccgacacaggcccccgcagaggggttcagctcagggga

SEQ ID NO: 758 - DNA, 300 bp, Homo sapiens
  misc_feature (1)..(300): DMR5:682101
ccaaacttacagaaaacctgccagaacagaattgacagggctggggaaacagcagccccagcctctgatcacagagctgtccaggggctggaaacccgggtgtccatgtggcatcagtaagcggggccaggcactaggactgactgggctctgtcactaggaacaggggtctcgcacttgggccagggggttctcactaggaccaggggcctgtcagtcactagggccggggcctgtcccttgggcctggagcctgttactagggcctggggtctgccccttgggcctggagcctgttac

SEQ ID NO: 759 - DNA, 10000 bp, Homo sapiens
  misc_feature (1)..(10000): DMR5:769701
ctggacaggcctagtgcgcgccatccttcaacactgtcctggacataatcatctaacagctcttctttttctaagactgctttccagattcaaggagcagggtgggccagcactctggtctttgctgaagactgagctcgggatgtgaacccttcctgatgctagtgaggtttggccttaaaggcctctcggcagcttttcaggaacgtggctcgagtcccgctgctcccaaggagccctgaccgaggtctgaccagcaccacagccccgcgagacggccgtccacaccactcggtgcacatgtcctccaactccagcgacagcttcttggctgcccagtccttcgaggggtcccccggggacttggggggcgtcctgttggcagctttggcaggcttggccttgtcagccatgttgctatggaggaaggagaggagaaaggtgtcacccgggccatgtcccagctgagccgggtgcagcccaggaaaccccgccataccaatgagcaccaggacgtggcgagggctgagatgggcaggccctcctggggctgggcgtgaggcccctcagacccttggagccagctgccccgcaggcacgcatgtccagccccgggcagagtggagccaagcgaggccttgcccactgccatcattgggccaaggaccccctaagccaaataaagccagcagcacgcagagcccagggtgggagctgagctgggtgccaggggctccaggcctaggaggctcagtgtgtgactggcagcatcagagcctattccgggtcccctccccgccgcagttccactgtccctcctgtggacgcccgctctgcagctctggaggacacctcgggatcacgcactccccagggtctgtgacgtgctgccttcctctgggaaggtccacagcagtcgtgcgacagccgctccctccccactgcagagcctctgaccttagatggagctttaggctggggagggtgtgtggtggccctgggggtgcctcaggatgctcttcccaggagccctgggcctggccccagccaggggaggggactgccagtgtgcagggctgaggcagtgctgggggcaccggtgtcagggtgcagggatgccctctggacttggtaaggcgcccgcccccagagcaggtggctgggctgtggggctaagattgaggggtgccacccaggcagggcttggggacgcagggctacgccacagggcagggctgccgaggccacctccctaccatgcatgggcttcggtaagacccagtcaggccctgaaggactcaaggctgaggtgctggactcagggcatgaaagctgcttcccaaaggggcctggacaccaggtgggccgtcagcactgcactgagagctgaacatggcctctgcccacagacacaagagccggtgggagggtccgtgccgaggacacatgtgcgtgtcccaaccctgggactcacgaagccctctcagatctggagttctcagcgccagtcatggccaaagtgtggctctgtcatcgtgggggtcctgagtgtggcccctgctgaacttgagatcccacaaattcccccaaaacagccggaaaaaaatccaggggcactccctacactgaagaccttaagggcctcaggccccacccactcacccctttccctggaagacaccaaaaatgcagatgccaacccagcggaggatgcaggggcaggatcctggtgggggctgggccgcatgggggcagggtctcatgggggcaggaccgcgtgggggcaggatcctggtgggggcaggatcctgggggtggaagggccgtctgggggcaggatcctgggggtggaaaggctgggtcaggtgtcgagccaggaaccgtttccagttttatcgctgacaacatttctttgaaacaggagcttctcacaggcctggcctgtgtttcccctgggcctctgcagcaggggtcgctggacaggaggagcagctgagaaattaccagaagcaatggtgggttttgtgagcacccagaacagtggtgggcgtgcgggtcagagagaaagaaccttctgggatgcttcaaactcagggctgcgttctgtggtctcatctcctgtggggatgcgcctgaacagagacccttattcacacacctcagagagtcatctgagaacctgcaccccgtggggcccgcctgggagcaaagggatgagggaagcccctcagagccaccttcagggctcacgcaggacttcccagcccatcagcacgtgctttgcatgaggttttgataagcttggaggttggccttggagggctgagcgggacataaaacgtcctgccctcgtgaggccttcagttgggacaagtgataaacaaataagcaatgacacatcaggcagcgaggagtgaagaggagaaactgaggcaggtcagagggaggccagcaggcgatttcagacctggcggaagagaatgtgcgtgagcagagatgcggacgggtgggagtcacgacgcgtgagaacggtccggcccgcggcccctgcgcccctgctgggcaggcaccacctgtgctaggctcagcccctctcagcacagcaagcagcatgagatggcacgcatgagagcacggtgggggccgtgggggagagggcagaaaggaacaggggtcagaccatcgccggatctactgaagacagacactgccttcaaacgttctgaggaaaaatgcttcgggctgggacttggatacccacgtccactgtcccactcaggctgaggggagcaaggccacctgcagtgggtgtgacctcagagacgtggccacaccccctgcggaggtgcttggtgactgggcttcccaggaagacgagggtgacagccgtcaacagccgagaagaagtagtagatgcaggaacccatggccgtcacacgggagtgagtccacgggcgcttgggagggctgagaaccaggcccaggcagttctggagggaaaagtggaacccgtcccaactcagccccagcctttctgcaccaaggggtggagcagtgccgacctcagacgccagctgccagaaatgcttccaaagcccgcctctgcgtggggtgtgtgctgaggggtctcacgtggggactcgcctcagagcccatctgagcttcactgttctaggttcttgtagttttgttttacctcaaacatgtattagtttaacaaaatatttttaaaaaagtttttaaactaaaaatgacagaatgaattaggcacgatgtgccgctgtgggaagacagccaggctgctgctgggtctggaggagcaggacacgggccacacacacagatcaggagcggagaagatgggagatgcactgtctggatcgcttcattagacccacgtgctgtttccacaatgacggtaataagaatacatttagttttaagagaatgaggaggtgtcagacggacaacgagcctgggcgggcgcctctaccttggcgctctccaccgagcatggcatgctgctgtgccagctgcttctccttggatgggcagaggccaggtgtcctccactttcccagtttctgggtgcagtgcacctgagccctgggtgcagaccctcacaccatttcccccagaggctctgctctttcaccgtgagggaaaagaaggttgtgtagcagaagagactccaggaagacaaactgctcacatggggtccaaggacaagctcccaggcgtgtacccaccatctccacgtgtgtgccctgaacctccagggggtcgctcttcactcccagacctgtgcccaccatcccacatgtgccctgcactcccaggcctgtgcccaccatctcagctgtgccctgtactcccaggcctgtggcttgcatccaggtgtgcacctgcaccctctcccactggccagcacctccctggtaggagggacgtgcccagccctgccccgacccaggtgcctgctcacagcacatgccccttccctggccaaaccccacgggagcccaagtggggcctggccaggaactgcttggaggctgagcccaccccacttgcgccccaacccccagggccaggacctgcttggagactgagcccaccccactcccacacacctgcagcacctccccagggagtcaggaggatggtgcctacgggctcacccacaggtgtgggcaagactgtgttgtccaactggcatcttcaaaacaggcttgaagaggacagaagatgagggcagaggtggcaccacagacctcagagtggggcaggcaaaggcagaccccagagggtggctgtccgaagcatcctcgctggccagggaatgcctgtcccaggtgtgtcaccagctccaaggactcggccacctaggcggggcttcgtcccagacaccgcaggccaccttggccccaaccccacaggctgttcctgttcccaagaggccccacggaaaatcacctgggccccatttgtcagaatgaatctcctgggaaatgccttcagactggacactggactgcccaaagccaaacttacagaaaacctgccagaacagaattgacagggctggggaaacagcagccccagcctctgatcacagagctgtccaggggctggaaacccgggtgtccatgtggcatcagtaagcggggccaggcactaggactgaccgggctctgtcactaggaacaggggtctcgcacttgggccagggggttctcactaggaccaggggcctgtcagtcactagggccgggacctgtcccttgggcctggagcctgttactaggacctggggtctgtcactacagccaggggtctgccccttgagcctggagcctgtaactacggcctggggtctgtcactagggccaggggtctgccccttgggcctggagcctgttactaggacctggggtctgtcactagggctaggggtctgccccttgggcctggagcctgtaactaggacctggggtctgtcactagggccaggggtctgccccttgggcctggagcctattactaggacctggggtctgtcactagcgccaggggtctgccccttgggcctggagcctgtaactagggcctggggtctctctcactagggccagctgctgttttaaagatagcagcagcctcggtgctcccttgttcactgcccacgcccacgcgggggtggcgccgacagagcctacaccactgctcttcacgtggatggctgtggggtggctgagccttgctggcagaggaggctggtggacaggccatgctcacatcatcagcagtgccgggtcaaagctggaggcaggagccatggagtcagtgggagctactacccctcagctcatcacccctccctgggacctgagacctcagagccagccctcggccctgctcaggctctggcctccctgagaacctctgtcctggtcacaagtgtcctgcaggccccctgggttgtgctgggctggaccaggccagggcgtgacctctgacagctccacctgctctggagaagccaccagcagcttctccagctgcacccgctgacccccagagctcgctcccaggcaggtgcccatggtgggacagttgcttgcgcctcagtctcctcatccttgaaggggtgcagccgctccccatctccctcgcacccgatggcctcatgcaggcacagcctgagggagaacctgtctctgcggagaaagactctgtgatggcagccaactggattccaccagaacccgaaggcaagcattccttgggaagggaccaggctgggaacatcaggcacgcacgccacacactcaacccaaaccttctgttaactcaggttcccaggagccccgcgtgcttctgcctggcaggagccgatgctcgtgccctggagaactccctgttcagggatgacaatgggttccctggtgatttggaggcctggggcctgggtgggagctgctccctctaaccctggagacgccgcccaggagtccaacgtgctgtgactgcaggatgcccctggcaggggccatgctggctcagatgcctctctccaaccccttccttccatgccctcggggcactggcatccagggagctgtgaaggacacgctgtgttgcaagctgactgggaaacaggttggaggggtgggggccgaggcgctcagcagtattcaggcatctctcagctggtgacaggagctgtcccaggccctgcaggtgggagtgcatgccaggaacccctgggggtccctggtcctctctccatgggcagattcccatgcagataccctggcctccgcaggctcagctgggtgtactgccgctgggctcttcagaacctttacgcccaagtcctgtccagggggagcaccctccaccccaggctggctgccatcacagccctcaatcctgcccagagtccctggagactgttgtcattaaaccccactcctgtttaggaaaccctagggccagaccccactgctggaacgggaccctctcgtgcctgcaggtggcaaagctcctgagggcctgatggaccctccaatgtcccacggccacaggtcccaccttggcaccgaagccctgggatggcccctctgcaacgcccagtgctccatcatgacctggacccaggtcgctgactgagggagtggaggggatcaggaccagggagaagcaaccccccagtaaatccgaagcacaggaatggcacagccccaagggagaccgggtaggcccctggccagcagggctgaggggaaagtctccactgcaaggcgcctgctgggcccacgcagtgtgctcctggcctcaaactgcccactgggcattcagcctggacagctctcagctcgagaccctcgctggtgaatgggacagcaacatcaaagaccacagcgacccgaagccccagaagcaaaagccaccctcacagcggaaggagtggacagagcccctgtggagctcacccagccctcctgtcccaccaaggggccttctaggacctgggagccctgccctcctgccgaggaggtgcttccccattaaacagggccaaggaacaaggcggctcaggtcccattccttatttcagagcccatttgggtgcagcacagccctttggcagatggttcttgtttttcactatcatcgcacggccctcctgctccgcgggactctccctgtgaaccgccccactcttctcagcccaggccgcctgtcaggcaggcagagctcccaatcagaacaaagctggcagttttgagtccgtgcctttccccctgcagcacaggacgcagtgtgtctggaattggtgggttattggtctcgctgacgtcaggaatgaagctgcggagccccgcagtgagtgtcacagttcttaaagatggcgaccctggagtttcttccttcagatgttcagatgcgtctggagtttcttccttctggtgggttcgtggtctcgctgactttaggagtgaagccgcggactctcgcagtgagtgttacagctcttcaaggtgacgcctctggagtcattcattccttcccgtgggttcctagtctcgccggcttcaattcagacctcagtggtgagtgttacttacgcctctcagagacagcgcgtctggagctgttcgctccctccggtgggctcgtggtctggctggcctcaagagcaaagctgcagaccttcgctgcagacctccctggtgagtgctacagctcacaaaagcggcgcgcacccagactgagcggcaagatttattgctaagagcaaaagaacaaactttccacagcggagaagagaatggagtcaggttgcggcagggcgttccggctacccgcttttattccgttatctgaccccacccacatcctgctgattggcccattgtacagggagctaattggtccgttttacagagcgttgattggtccattttgacagagtgctgattggtgcattgacaagcctttagctagacataaaagttctccaagcccccactccactcaggagtctagctagctttctctatcggatcctgagccccgcagcaggcggagctgcccgccagtactgcgccacgcgcccgcactcctcagcccttgggcggtccatgggacccggcgggggcggcgcccttccgggaggccccagcaccgagggagcccggggcgggggagggggggcgtggcctcggcatggcggtcggcgggtcccgagccctgcccagcagggaggcggctgaggccccgcgagaatttgagcatggcgcaggcgggctggcagtgctgggggacccggcgcacctccgcagccaccgtaggacagaggggcaagggggctcccagactctgcaaaggacgctgcggcggagactgatacgggtctgagatggctgtccaaggcccaagtgagaattaaaccacatgcccagccagtgcccaccacccgggccaacaccatttctctaaagcacgacacaggacattccaccaacagagcatcccaaaagggaatagagatcccggctggctcatcccatcaaccatgtcggagactcggcggctgcagatgcggtgggacctgcctccattaaaggcaccttctgtggggacagcaaggactctcacgcggggcacaccaggttagaggacacagccgcggctctcaagggaggcacaatgggttacaggagaaaacagccgaggctctcaagggggcagagcaggttacagaacactgcagaaccaggggctggtccctcatccagcgcagcttcactgagtgccagactcacgaggaccctgccctgccccgccccagcccactcactgcccttgggttacccttggggctcagggtccagggcacctgcaggcagctgggaccaggccagctctgggccaatggtggccccatctaatccccagaacctgtgaacgcgaccttgtttggagaaaggatctggaaatgagatcatcttggattatccacagctgagccctaaatccaatggtgagtgtctctacctagaagaggcagaagagaagacacagagagaagagaagaaggtgctacaggctgaattcgtcccctccaaaatccacgctggaacctaatccccattgtggtggcattaacagagcctttgggggatgagattcagctatgggggccaggctcctgggaatgaccgagtgccttatcaaagggctggggcatgaggacatggcaaccaggccctgtcttggaagcagggaagggcccttgtcggacgccaagcctgcaggtgccttgatcttggactctccagcctccagaactgtgagaagtgaacatatcatttcataaattaccatgcctggtgctgttacagcaacacacacagactaacacagtcgccctgaggctggggctgcagtgatgcagccacacgcccaggacaactggagccaccagaagctagaagaggcagggagcgtcccaccaagcctccagaggaagctgactcatgagatgcctggacgctgggcttctggtctccaggatgatgggggaatgcgtccctgttgtgttaaccccggactgtgtcaattgtcagaagcctctggacacagtgacacagcgggtgggaccagaggctcagcacccctcatggggaacaaagtctttgaggccctcaggtggcactgagagaccacagggggctccagaggcccttgggggtccacctaagccaggatgggtgttaggccagggctgccaacagcacctgccttctgagacacatccagcctctggttgcccatttttaggtggagaaaatgaaggctgcatacgtggctggtgtgaggaagtcagctgacgggaatttgctgatttaagggaaggttcagctgcgtctgcatgctaaagggctgtcctccagatcagatctagaagctttgggaaggtaatgcaaaa

SEQ ID NO: 760 - DNA, 400 bp, Homo sapiens
  misc_feature (1)..(400): DMR5:1414001
tcggagacaactccaggcgtgcagggacactcagcgtcatgcgtcggcctggggagcgggcagggacaccctgtgctggaggccccagggatctcccggctgctctgtggccaagctgatgtttgcggcatcccagcctgcctccaggtgttgctggaacagctcattcctccccttccctgagctgcatgttcccacaccgcgtggcaagcaaacatctagagggccctcagtgacagcatctacgccagaccctggtggggcagcctcatgtggcatctgcagggagcagtcgagggactgaggcaccaactatgctgctcagctgcatttgggcttgaggttccccagcccagggtggaggccccgagaggcacaaggcaggaaaggcactgggtgg

SEQ ID NO: 761 - DNA, 600 bp, Homo sapiens
  misc_feature (1)..(600): DMR5:1473001
ctccaaccagggagtccttcctttgcctctgggtgctcctctctcctctctcctgctcctcctgctctctggccagagtcctccccctgtcctgagtgctcctcacctgctctctggccagagaggcctcctgccagcccgggttccacccaggactgcactgcagctgctccgtgttggtgcaaaacatatatggtgctgtcacacgggacatctcatgctgtcacgggacagtcatggctgaaggagccttctacacacaccctggcgtatcaccagctcctccaggaccacagtgtaagtgtccatgctgtgacactaacacccagaaaagaccaggattggctgacctgtggctcgccgtggcagcctgtcccgcccctgcgtgccacctcgcaccttcctaaaaccccgaggctgcccgccatgttcagggccacctggtgtgaccgtggatgcctcatcaattacgacgaggacctggggatgacgtgcggagggcagaggggagtgggcggctgcaccaggaggaagccctcccacacccacaggctggcggggagcctctaagccgatcatagaggacgggcgtgttattag

SEQ ID NO: 762 - DNA, 1600 bp, Homo sapiens
  misc_feature (1)..(1600): DMR5:1722201
ctgggattataggtgtgagtcctatacttagctgccattttcttttttttttttttttttttgagagtaaaaactgatttttagttgtgcttgattcagttctcgataacatgaaagatcctatagtaatagaaaatttcacatttctaatatccatttttatggttccatttaaattgaatattggtagtttttattattgaaactttatatcatgcttaatcaacttttattctaactcttttgacactaatttttaccaacttttatgtcctggttttgtaattctttacttatttgctgtttttaaatgacttatattggatgagcctttctaactttaaccttttagaacctttataactttaacctaattggcatctcttgtattaagtttgtttattggtttaggcagaaactgccttttattttttttatttttattttattttatttattattattatactttaagttttagggtacatgtgcacaatgtgcaggttagttacctatgtatacatgtgccatgctggtgtgctgcacccactaactcgtcatctagcattaggtatatctcccaatgctctccctccccccaccattttctttttgaattaagatgttctgggagtgattaagccacctgtgctcatatgtaagtaaatccctcattgctcacctagcatcagaagtgcgaggcaggaccacacacgtgccacgcaggcactggccttcaacagtcacgccaacgtcctccgccacagacacctcaaatccaagtcttcatttcttcacgttttgctgacatgccacatggagggaagtccatgttggtctcgttaccacctaatgggatgagtgtctcatctcaaaagagcaggcccttcccgggtcccgtggggctcagccctggacagacgtgcagctcagatcccctggacagggtgccggtggctcccctcatctctgccttttcccctcccattttaacttaccccctagagaattatgttaagataaagtgacatacacctgtgttccttgccccctcccaatggcacactgcgctaggcccatcagaactagaggaaggaaacagaatgtttgggaaactcgtgctggtgactggaggagttctgtccagcctcgccttccctctccctccctccctcccttcctccctctctccctccctgcctctgtctcttcctctgtctctctctccctcctcctttctcttttcctcactccctctctctcctctctcttctcctcccttcctctctccctttcccctcctctccctctccctctttctccttccctccttctctctccctgtctccccctctccttccctccctccttccttccacccctcttcccctgtctctccctcccacaccccctctgggtggcgtcaggttggaatcacacagctcacctggtttgcctgctgggcaccaggctggcgggcatagtgtggttctcccatggtgaccaggcccagcgcgtctctttactgcgtgaaaggccttcctctatccagaggtttatagaccccgcctgacactgcagaaatgtaatacgagccacc

SEQ ID NO: 763 - DNA, 2700 bp, Homo sapiens
  misc_feature (1)..(2700): DMR5:3879101
tccaaaaatgtgaaactatgccacccgtctcactcactatttcctgtattgtttcggaaaacatctattttcattaaaatattatatatgttaacatgccatggattcatatttaaaagatcacatacatagctagcatttttctcaattttagtttctaatatgataaatattgatggattaaatccacatgaacaaaagctctttcaggttcttcaataatttttgagaccatgaagggggcactgagataaaaaatcagtgagaaccatcaggttagcaaatgtgtatcgttttattattaacctaactcaaacaacaaattctataaagcaaatcaaatgaaatgagaataggtttattgttattattattattattattttgtgattatttttagagtcagggactttctgtatcacccaggatgaagtgcagtggtatgatcgtagctcactgcagcctcaacttcctccctcctcagtctcccgagtagctgggactacaagcactcatcaccacacctgactaatttttcaaatatttttttcaatgacagtgtctcaccatgttgctcaggctggtgttgaactcctgggctcaagcacccacctcagcctcccaaagccctgggatgacaggtgtgagttgtagtcccttattagcatgtcctacatcactgatgaataatccttctcccccaactctccttctcctcctcttctgttcttcttctcgcctttcctccccatgcctttctccctagcccatggctggtgtcgtccctcagttttctggtgggtaagcagaagctcaccccatcttctcctgtgctttcagccttacctcagtctcctgaatcccaagccctcagaggcagccccatctcccttgggccgctcctggtcctaagagtgacctgccctgggggtgctgcacccatcacctgggcttgaggatctctaataaggcttttgtctcttagcaaacctcctgcagggtcggtgcatgtcacacattaaagacagctctgtacatggttctgggcagcatggtgctggtggggggattctcagtagctccatgaagagggcattgctgcaccctgatgctaccctggcttgtcggagaggtccaggcgagtctgcagggcagcatgcacagtgaagaaaggagtgaaaagctcctgccttgtctgatgcacacaggacagactgctggcagcagtgggttcccactgagccccaagagaaagaatggccactgttagggaaacccttgtagaaatagtgggcataatattcaatgcagtctaaagaaaaaatggattaaaaaatatttgatgatcaaggacttggtctgaggtcagctcccccttccccgctttcccctcagccagggactccgctctgctccaggtgtgttggtcggatatggggcatcctctcttttccttttctcatttccatggcccccgtccctccctctcttcttctgtcccttcctacctccatcttctctattccttttcctctctgcctgtttttcactctactttcttcctttccttcctttctttcttttctccatttccatggctttatactcaagcctctgtggttgtgaagaacataaagacgctgtgtaaattgtgggagcccagaggttctcgtaatttggggtctgaggacccttttatactcttaaaaggagctatgcaaattaggactgagatttattgaccttccacagaggggacatccagaaccagtgacagaggcacagctggagctcgggccggctccggactcagaccctggttctctccgggtctctgccccctctctcttgcagcccctccctcctgccttcctcagacccctagggcccctcctgtccttgtcatttttgtttttgttttatgctctttcctgcagactggccgcctgctccctgttcctgtgtcctctgctctgtgggttccacgtggctttagtttgctccactttgactcatctgcagggagctttcagctgaaggccctgggggtgcatgaaacctgaaatcataatttcatgattgatcctgcctcctgtctttacccctttgatgacactgctctcatcagtggaccagtgactgctctgtccctgcagggtagtggggatatgcttgtgcccgggctcaagaccagctcagggctcactcgggattcaggtgcatggccacccaagcatccctttcttatgtgcagagcccaggttgggccgtctggctcagtggaggcctcggctgcctcctgactctgccaccctccccagcctttgctgccctctggatccagtcccaggtggccctgcctgagctcctgcaggactcttggtgcctggggtgtacgttttcatcctgcccagagagaggaagcatgattgggttctgaaatctgccttggtaagtccttctccttccctgggatgggaagaggacttgcaaccacacagcaaggcctgggacttacgatgcagaaacgggtcctttcctctccacggggaaggaagcatgggaggcagatgctcaggttccccctcagcttctgctgcaaaacaaacagcccccagcctgcctgcccttccaccaggctctctcctggcctgcaccaggcctccccttttctctaggccttcacgggccttctctcag

SEQ ID NO: 764 - DNA, 200 bp, Homo sapiens
  misc_feature (1)..(200): DMR5:3892101
ttcccaactccaaatactattccactggggattagagcttcaacatacaaactcaagggaaacatgacaattccatccagagccaatgtataccacaaaaatgcactcgaatacagaagacaatgggaaggagagggctttttgctaaggatatgcaaatcgacagagctggccatggtggtgagagaagtcatcccggc

SEQ ID NO: 765 - DNA, 700 bp, Homo sapiens
  misc_feature (1)..(700): DMR5:4311001
gaaatgtggatttttgtcagtgaaacaaaggctcctgatgacctcacccatgcagggcaaccttggacgcctgtcccgtctccatgacaggagacaggacagtgcctggtacatgggatacacttaccgcacacctccagccctgttctgcctccagaagagcgcccggtgcgcagagctgatgaaaggcagaaactgtgctccatcaggaagaagagatcggtgctgatggagcgaagtgactcatcaaatcctcaagaggcatgatactggcacaatcagcctaaacacacagcgttctattcagaaaattacttttaagcaccctcacaattgtccattaaattaaggaggaaaatgtgctttttagccaaaggttcctaaaagattggaaaggcaaatacaagttaataaatggcaagcacatgagcacgccgtttggggcttcatgataggggcttgtgtgtgtgttgtttcctagagaagtagaaggacgcttcctggtcccaagcctctttgctcctcagccaggaattgcaccgttagaaatgcacgttgacttcagtgcggcccactctcttggtacaatgcagatattcgtgggagatgtgtgttgattatgaattcgctcatgattttctctgagttcatttttcaggtttcccgtttcccttgtagggagcaagggccacgtcttgag

SEQ ID NO: 766 - DNA, 200 bp, Homo sapiens
  misc_feature (1)..(200): DMR5:6906901
caccgtttctattaaaaattttaaaaattagccgggtgtggtggtgcacagctgtaatcctagctatttgggaggctgaggcacgggaatcacttgaacctgggagatggggattgcagtgagctgagatggtgtcactgcactccaacctaggtgatggagtgagactctgtctcaaaaaaaaaaaaaaaagatatgct

SEQ ID NO: 767 - DNA, 300 bp, Homo sapiens
  misc_feature (1)..(300): DMR5:7729101
taatggagtccccagacctgcacttgctgtaacagcctcaggcttcttgttctgtgacttcttcatttttctttcatgttaatatcttcatttttttctttttctttaaaaaaaatcttgctaggaaatatttcaaagatacagaaaagtacagagtatgatataataaacacacacgtgtccacaatccagacttttgcaaatgtttaccctgtgtgctctttactgtagatacaattttccaccctctagattgttattatttgggtatgcttcctttaaacaatacctgtttttatt

SEQ ID NO: 768 - DNA, 700 bp, Homo sapiens
  misc_feature (1)..(700): DMR5:9122501
ttgcaaaaatcatgtaagttttaaatggtgaatgtccctggtgtttcaccacagttctctccaaaagggagttatattataaatgatgtcccaaactcctcgagaatctgagtttaatacacagcagcacaactggcgtgttctgagcggcacacctggaacagttggcgatctccatgccagggccctcgcactgccagccaccacactgcggggccgggctgtcgcaggagcgggttcgacagaggcaggatcccacggcgctgccatctgtgtgcgtgcaaggcgtccacggagaccacacaccaaagtgcccatccacggtgagattcctggtctaggaagcaaaaccaagcagaggtgtcagaaaaggttaaagctgaacacataatggagtaaaaattaaaaatccctcataagacaatcaaaactcctctagaatttgttgttgttgttgctgcagttagaaaaagggccaggcgcggtggttcacgcctgcatcccagcacttcaggaggccgagacgggcagatcacgaggtcagaagatcgagaccatcctggctaacacggtgaaaccccgtctccactaaaaatacaaaaaattagcctggcatggtggcgggtgcctgtagtcccagctactcaggaggctgaggcaggagaatggtgtggtgtgaacccgggaggtggagcttgca

SEQ ID NO: 769 - DNA, 1900 bp, Homo sapiens
  misc_feature (1)..(1900): DMR5:9349101
tcaggagacaagacagggtcatgcaaggaaggcttcttgcttgaagagaggtctaataagtcccaaggtggcctctttgccgaagtacagattctatctacacatcggaactagaacatatttgccaagtcagaccaaggtttttccaggaactttagggttaagcattaggtggatgtgcaccaaaaatactggggcagcacaataattcatgtacgtagtcaagtaatatttatttattgagtacctgctacatagaagaaccaactgtaggtactgcctggaatacaaagttatataagacagacctctgccttcaagacatttataatttagctaagaagatgagatacacacaaaagagagttaaactgaagaagataaatactatctgatcccagggaaaagcataaagatgataaatgctctaaagcagcaccatccaatgaaaatgtaatgtaagctgcacatgtaattttgtatgtcccagtagccatgttaaaatgctgttaaagagggttgggcacggtggctcacgtctgtaatcccagcattttgggaggctgaggagggtggttcacttgaggtcaggagatcaagaccatcctggctaacacagtgaatccctgtccccactaaaaatacaaaaaaattagtcaggcatggtggcatgcacctgtaatcccagctactcgggaagctgaggcaggagaattgcttgaacccaggaggcagaggttgcagtgtgccgagattgcgccactgcactccagcccgggcaactgagcaagattccatctcaaaaaaacaaaacaaacaaacaaacaaaaaaaaaacatgctatcaaaataaaattcattgaggtatctttgtgtatgtgtattctaagtcttcgaaatccttacacttactgcactggacacctttcaagtactttgaagccatacctggagagtggctacacgattggacagcacatacccaagatattaagaacaggcttccttggtaacatggagcctttgttggatggaaaaacaaattaacttgtcttcttagaaccagctgccatagaggtcagcgcaacctaatcaggcactgattccaacaaaactaccctgcatttaccaaatatactgatgaaagtaacacagtccttggaatttggttgatttaggttggaatctcacaggcagaacttttttctcgggaaccgtattcataagtgagtagtttaataatgggttgactcagcaggtctgcggtattcaagccaagcatgttccaagagagtgtctggtctttgactggctgctgggaaataatatctaagcccttacaatattctgcctgataggagtgtctctctctcttgacctgagatctttgatccatgccagatagtctacactaacaatgcagtttacagtggggacctgtggccaggctgcatctggttgacttcaggaagggctggagtctgagtaactaaggtcagccatgcaagcattccatgcttttgtgatcaaccctcaataaatccctggacaccaaggctacattgcatttctttggttggcaatattccattcattttgccaaatgtcatttctgggagaatacagtgctgtccttatgactgcaccgggagagaacaatctttcccaagcttttctgagctcaggatttatacacagtctttcctaagctttgccccacatgccttttatgggtgctaactttaatctacatctaccccatcactgtaatcaaccctaactgcaagtataaatgcttttctgagttctgtgagtccttctagaaaatcattgaacctgacagtggtactggagaccaccaactcaaagcttctccctcttgtgatgataagcacagtaaa

SEQ ID NO: 770 - DNA, 300 bp, Homo sapiens
  misc_feature (1)..(300): DMR5:10002601
aggaagcacaaggggtcagggaattccctttcctagccaaggaaaggggtgacagacagcacctggaaaatcaggtcactcccaccctaatactgtgcttttccaacggtcagcaaatagcacaccaggagattatatcctgtgcctggctcagagggtcctatgctcacggagcctcactcattgctagcacagcagtctgagatcaaactgcaagggggcagcgaggctgggggagagacgcccaccactgctgaggcttgagtaggtaaacaaagcggccaagaagatcaaactggg

SEQ ID NO: 771 - DNA, 2200 bp, Homo sapiens
  misc_feature (1)..(2200): DMR5:10065201
gttactttgtaaacattatgtaaattcccaataaccagccaggttgtcatcagtactaacctttgaactcacgtgaacgagactcttcttaaacttctgagaggtgacagcgtgctggcagcccccacagccctcgctcgctctgggcacctccttggcctcggcgctcactctggccacacttgaggagcccttcagcccaccgctgcactgtgggagcccctttctgggctggccaaggccggagctggctccctcggcttgaggggaggtgtggagggagaggccacgggcgggaaccatggctgcgcagggcgcttgcgggccagtgcaagttccgggtgggcgtgggctccgtcggcccctcaggccccccactctgagcggccggccggccccagcgggccggggcagtgagaggcttagcaccctggccagcagctgtggagggtgcactgggttccccaacagtgccggcccaccagcgctgcgctcaatttctggctgggccttagctgcctcccctccgggcagggctccggacctgcagcctgtcatgcctgagcctcccctccccgccccccacgccctgccgtgggctcctgcacggcctgagcctccccgaggagcgctgccccctgctccgcgccgcccagtcccatagactgtccaagggctgaggagtgcgggcacaaggtgcaggactggcaggcagctccacctgcggcccgggtgcgggatccagtgggtgaagccagctgggctcctgagtctggtggggacttggataatctttatgtctagctaagggattgtaaatacaccaatcagcactctgtatctagctcaaggtttgtaaatgcacgaattagcaccctgtgtctagctcaatgtttgtaaatgcaccaatcagcactctgtgtctagctgatctggtggggacttggagaacatttatgtctagctaagggattgtaaatacaccaatcagcactctgtatctagctcaaggtttgtaaatgtaccaatcagtgctctgtgtctggctaatctagtggggacttggagaacttttgtgtctacctcaaggattgtaaatgcaccaatcagcaccctgtcaaaacggaccaatcagctctctgtaaaacagaccaatcagctctctgtaaaatggaccaatcagcaggatgtgggtggggccagttaagggaataaaagcaggctgcccaagccagcaggggcaacctgctcacatccccttccacgcagtggaagctgtgttctttagctccgcaataaatcttgctgctgctcagtttctgggtctacgctgcctttatgagatgtaacactcactgcaaaggtctgcagcttcactcctgaagccagcgagaccgtgaacccactggaagaaacaactccagacgcgcgccttaagagctgtaacactcactgcgaatgtctgtagcttcattcctgaagccagcgagaccatgaacccacaagaaggaagaaacttcgaacacatctgaacatcagaaggagcaaactccggacacgctgactttaagaactgtaacactccccacgagtgtccacggcttcattcttgaagtcagtgagaccaagaacccaccaattctggacacacttccagcacattctttttgtttcagctactttgccaagccagctgctcttcttatattgtgaatcttctcatttcattttctacaacattaatttatatttcagctaaggtactatggtgcctgaacgccaaataaaaagaaaaatgagtgatcccgaaatataacattttgttgatgtgaggtcataggtttacaaagcattctgatttagagaatcaaaaggaaaaattacagaaaacaaggaagtgagggaaaatgtaaggaaattataaatggatggcttcttcacccactgatcctcattaaaaaggaaaattgagctgccgtcgattgatggttctgttaaaattcaaaacagtggttctcaaactatagcccccagacctatgtggtctgggagaggttctcaaagtgtggtccccaaattcctctggcttcgtcatctgcacctgcacatcatccatctttccccaaccattctctcaagaaagccatttccatcaatagccaattctcgggcttctccccaacccaactaaatcagcaca

SEQ ID NO: 772 - DNA, 300 bp, Homo sapiens
  misc_feature (1)..(300): DMR5:10387201
ttatagctgcagtagaagtagctgataaatgtaaatgacacttcttttaaaacatacctgttttatgggactgttttgtaatgatgggatgacttttctttctttcttttttttttttttgagatggagtcttgttctgttgtccaggctggagtataatggtgcgatctcggctcactgcaacctccgcctcctgagttcaagcgattctcttgcctcagcctccagagtagctgggattacaggcactcgccagcatgcctggctaatttttgtatttttagtagagacagggtttca

SEQ ID NO: 773 - DNA, 1800 bp, Homo sapiens
  misc_feature (1)..(1800): DMR5:10531901
aaaaataagtaaaataaaaagaacaatgtgtgtgcaaaccatggtatgtggtggactgagggtggtgattacaactctgtccatctgaggtccaaaggataacttaaaatacgtgtatggctggttgggcgtggtggctcacccctgtaatcccagcactttgggaggctgaggcgggtgaatcaccagaggtcaggagtttgagaccaatctggccaacatggtgaaacctcatctctactaaaaatacaaaaattagctggatgtggtggcccgcgcctgtcatcccagctactcaggaggttgaggcaggagaatcgattgaacctgggaagtggaggttgcagtgagctgtgatcttgccactgcactccagcctgggcagcagagtgagactcttgtctcaaaaaatacatatatggctaaaaagaggttcactaaaatgctgagagtggtgggatcatagaccgtatgtgtaagttggcaatttgtcctagttttgcacaaggagcacatgtgatataatcatttaatgtcatttaaaggagggaggagttctgaaggtgggcgctctaactcttgggataggaccaagggaatgaagcccccaggggcttggggaaaggcgtggtcatcacagagagtcagggaggactgcctggggtggagagaggctgctgaagggcctgtccccatcaacacccattaggtgactcagctttcatgacaccttcactccttccaatctaaaggggaggctttttcttggcacaacctgcctcttagacacagtgagagggaatcagccgggctttctgtctgggcttgtgggtggtcctgacactggatgtgctgggttgaataatgtccccccaaaactcatatccattcatatctcagaatgtggccttatttggaaatagggtctttgcagatggggttggttaaaatgagaccattctggagcaggggggtcctcatccttatgactggcgtccgtatgagaaggggcactttgaagacaggcacaggggagaaggccctgtggcagtggaggcagagacaggagctgtgtggccacagccaggagcgccaaggctggcctggccaccagcagtgggcagagaggctggaagaggtcctcccttagagcctccagaaggaaccagtgttgctgacacctggagtttggatttctggcccccagaacggtgagaaacacacatttctgtttttaagctacccaatttgtaatgtttggttatgggggccccaggatatgaacacactgggcccaggccaggaagccccctagggtcccccccgcaggcccccaactctttaccttcgatcccttcctgccctccctatcctggggtcctccttgaagccacctccactcgaagccacctccacttgacgccatccccagcacccttggtcctctccccctaactgtagttctctccccgccaccccttcccccagccctccgtctcctccgacccgcgccctgggtcccctcctcgccccgcccccgacgtccccgggtcccctcccctcctctgccagcgtctccaccccgctggctaacgcagggctgagtcctcacccagcagcttagggcccctcagaactagagcggcaggagattaagggttgctaatttggaagcagggactgatgttctataaaaagcagggaggctttgggatctgtttggtttttaagtttctaagccattttagaaactcatcctacacacaaaatggtgaggtccgggggatctgtctctgcctc

SEQ ID NO: 774 - DNA, 1800 bp, Homo sapiens
  misc_feature (1)..(1800): DMR5:10792801
taacggaagaatcgtggaaaaggggcagcctataaggccctagcatcaaggttaaacaccgcacttgttcttcaagtcacccgcttgggtttcttccaagcctactttcctttctttcctgttctaaagtcttttaaaataaacttacactcctgctccaaaacttccttggtctctttttctaccttatgcctctcagtcaaattctttcttctttttttttttttttttagatggagtcttgctctgtcttcaggctggggtgcagtgacgtgatctcggctcactgcaacctctgcctcccgggttcaagcaattctcctgcctcagcctcctgagtacctgggactataggcatgtgccaccacgtccagctaatttttgtatttttagtagagatggggtttcaccacgttggtgagaatggtcttggtctcctgacctcatgatccacctgcttgggcctcccaaagtgctgggattacaggtgtgagcgaccgtgcccggctaaattctttcttctgtggaggcaagaattgaggttgctgcaggcccatatggattcgccagtaactcagacatcttccaccagggtaacaccatcatcatttgtaaaagtctcatgccgggatcagacctgccccgtattctattcaggtgtgcactcagttgccttcctatttgacttgctcacctttcagcgtgtcatctaggaggactagacaagtagcacattttcacaaacacgaatggaatgaacatgacaggccagattggaaaataggatcaaaaataagtcaaaaaatgaaaattatgtctatggaaaaaaagaaataggaaacacgactcaaattgtgtcaaccctaggatgacctgcaggaagttgaaaccctgggtgggagaagtactgaatagaagagagaatgctgctcccctgacactgcagctatatcggaaaatacattctaagtctacttaagatagaattccggttgaatattctgaaatgtgttcttacatggaagacatttgacccctggagacaactcaacagaagctttgccttggaaagctggttggatggagaggttttgtgaggtctttttactctggaatctgagatgcctggtggaacttgagcagcactgttcagcagggggcaggccaccaagagcacacatatacccttaaaaaccatctgctctgcaaacatgcagaaatcattaatacattgcaagcgtggttttgcccagacctgctgcaaaatgatcacaggcaaagtggtttgcgtactctccccctcactgatggctctttgggccgtcagttgaacaaggaacccacacggagctaaaatgtacaaacgacaaataaaatgttgcctctctctccagactctcacaaaatcaggaaaaacaaaaaaaacctttctttccatttctgcaagaaagaaatgagagctaaaactgttagccatgtgaaatctagtggggaaacctgttttttttttcctatgagtcttaaagcagcaataatttgttttcctttcttttcctttcttttttctcccctctgccacattagagaggcttgctgacaaagacttgagtaggttctataaggagccccaggcatccccagatgtggtgcacattgagatggatggagaagttgtgtatggcggaggaaactaggagtgccgcaggatagaaatccactgggagtaagacgggttggtgtccctctggaatccgtgttgctgccactgctcggtagagaagggtgggtggagtcatgtcc

SEQ ID NO: 775 - DNA, 1600 bp, Homo sapiens
  misc_feature (1)..(1600): DMR5:10916701
aaaggctggattcagaagtgggctggaaagaaaagggaggatggaggcaaaggcagcttgaaggatctcagactagagatgttgggtttagagaaaggaggaagattaacaactgaatttcctaatttttgtgcttttaaagctctggctgccccccacttggcattgtgcaaagacgtataaagttacacatctctggaaagttccttttggacaaagtttgtgaaaaatacattattattatgttaaaatcacacatatattagaagcaggaaatgttaatataaaaaagtaaactaccaacaatttcattttagagttgggtttttctgtgttccaaactcagactacccaggctataaactcactgtatctgctgtaaggacctagtgggggcagtgtttgagaaacgctatgctgaggtcaagatgctgctgagaggtcaggtgaacatgtccagagtcagggaaatatgggaggtagcaagaggccgcctgtacaagcccctttcccaaggcggggggcagaagagacttccccaaataaaatccccacatgctgtgcctgtctagacatcagtatctcggagaacttgagcacaccattttttttttttttttgagtttccccaagtctcatcttgctaggaaaggaggtctaattccttctacaattcgtcacgtttattcctaatgcattcagtcattcaacagatatttatttaattcctgatgcgtctggcatggtctgaatggcgtctttaacttgcttactttcttctgaaagtctcttatcatctctatattgctcataaaacgaggacctcgaccaggtgcggtggctcacgcctgtaatcctaacactttgggaggccgaggcgggcggatcacgcggtcaggagatcgagaccattctggctaacagggtgaaaccccatctctactaaaaatacaaaaaattagccgggcgttgtggcgggcgcctgtagtcccagctactcgggagactgagacaggagaatggcgtgaacctgggaggcggagcttgcagtgagccgagattgcgccactgcacttcagccggggcgacagagcaagactccgtctcaaaaaataaaaaataaaataaaaataaaataaaataaaataaaaataaaaataataaaataaaaataacaataaaataaaataaagcgaggacctcaaagggcactgagtcatcagctgtagtttggtcacgtcacattagaaatgaactctccctttccttgttcaggatgtaggacttcatccgggaaggctaaggctgtattggcctgcagggaaccccctctcactatgtacttactgtagatttgaaatcccagattattttcctgctactcctgcagactcatatcttcctatccatacctactcttttggagagttggagctctgatttacccacatagaggttcatcccgctagtccaggctgtggttaagattgcggtttcttcctgatgtgatcccttggatcctgacggggatatgagatgtatttgttcacaccacgggctgctgagctggccttgcacctccacatccctggacaggctt

SEQ ID NO: 776 - DNA, 600 bp, Homo sapiens
  misc_feature (1)..(600): DMR5:11145001
tatgccaagcaatttatgtgcatgactgcagggccaggaatgggtgagggatgtgaggctgtcacctcggtgcaacatttaagggggtgctgaaataacttactaattatgataaacaacgtacacatttttataataaaatatatattatataaaattaccatcttaaccatttttaaacgttcagtaggactaagtacattcacattgttgtgccgaagaatattttaatgcaatattttttcatctaaatcaaagcaaaaaaatacaggatgaaaatattaccaaaaatttaaactaaaggtgggatctggccctgcacagctcagcctcccttgcctccccctgtcccagccctacatgactggccaatccctctttacagagggagaaactgaggctcagagaggctacctcagtggcccaagattacacaacctgtagtttctattcagatgcagatgaggatgcctgctcctctgagcttggattttacacctgtccatatcacactcatctcaaagacagtggcaactaactgaggttcctagagcaacacctaggacagagtctaggatctgcaaatggggccagtgctat

SEQ ID NO: 777 - DNA, 200 bp, Homo sapiens
  misc_feature (1)..(200): DMR5:13080601
agcatgcacttcctgcactctgagctcataaaaaccccagactcagccagactcagtaggagctacccactttgggtcactcgccactgagagctgttgtgtcactcaatagaactcttctctgccttgttcgccctccagttgtccatgtaatctctttctacacgttcctggcctgcttactggagctgtgggtggtg

SEQ ID NO: 778 - DNA, 1000 bp, Homo sapiens
  misc_feature (1)..(1000): DMR5:13199501
gggagttccctatgattagttgactgaggaagagaagactagaacctgattcaatgagggttctgcacaacatgcaggcaccactcaaaagtggacaactgcagcactacagccactttccaggacatccctgaaggacagcggtgaagggaaatcttcccagtgggcagaattccaagcagtgcacctggctgtgcccttttcatggaaggagaaatggtcaaatatactattatatactgattcacaggttgtagccaatggtttggctggatggtcagggacttggacgaagtatgattggaaaattagtgacaaagatatctggggaagagctatgtggatagatctgagtggtcaaaaattgtgaagatatttgtatcttatgtgagtgctcaccagtgggtcacctcagtagaggaggattttaataatcaagtgaataggatgaccctattcactcagcttctgtccacagccatccctgtcatcacccaatgggctcataagcaaagtggccatggtggcagggatggaggttatgcatgggttcagcaacatggacttccactcaccaaggctctcctggctatggccacagctgagtgcccaatttgccagcagcgagactaacactgagcccttgatacggcaccattccttggggtgatcagccagctacctggtggcaggttgattatattggacctcttccatcatggaaagggcagtggtttgtcctcactggaacagacactccagatacaggtttgcctatcttgcatgcaatacttctgccaagactaccacccatggactcatggaattccttatccaccatcatggtattccacacagcattgcctctgaccaagacactccccttatggctaatgaagtgcggcagtaggctcatgctcatggaattcactggtcttaccatgttccccatcatcctgaagcaactggatagaatggtggaatggccttttgaagtcac

SEQ ID NO: 779 - DNA, 1700 bp, Homo sapiens
  misc_feature (1)..(1700): DMR5:13736001
agcctaaactctaaatgaaaacaacaacttttattttaggcagtggctgcctaccagatacgggatacaaagcgatattcatttattaatatatttattatttacaacattttgtaagtaatcaactatttgtatttattaaatggtacttctcattttagaatctctagacccctcgcaacaatattttactatttttactgcaggtagaaaagacaatcaaagaaatttcaaaggttgtgttagtttaacacccagcaagcgaggtagccattagggacctcatccttaagttccagggagaagccatgcctaacctgggcttcaagtctgcaaaacaagccattgcaaagatgatgcttctgcctctctaacaataaacgacactttaattattattattattttgttgatacggagttttgctcttgtcccccaggctggagtacagtggcgtgatctcggctcactgcaacctccgcctcctgggtttaagagagtctcctgcctcagcctcctgagtagctgggattacaggcgcccaccaccatgcctggctaatttttttttctcttatatttttagtagaaacagagtttcaccatgttatccaggctggtctcatcatgttgaccaggcctgtctcacactcctgacctcagatgatctgcccacctcagcctcccaaagtgctgggattatagtcatgagcaaccatgcccggccgattatttgttaagaggaataataaaatactaaaagatagccgatccaactgaattatttagcaggtttctcttgtacaaggccaatttgcaaattggtggctgaggataaaaatctcccaagagaccacagaactaccttcctaacacaaaaactataaacaaaataccaacatagtgttaccaaacgataaataactggtgcactaattcctcagatttccctaatttgtagtcatcagattttttaaaattctccttctttactttctaacatcaaaataagttcatgagaaccttaaaggatttaccaactaacatgaatgacaagtacccaggaaatttataccattataaaaaatttttgacctccattttacggaatatttcccaacagaaattccacaaaacacctccactttgcataatcatttgtataactccctcacatccttccatttctctaattctcattcctctctcatttcattttcctgtgacatttgtctttcattaccaaactcaccaggtctgtattcctcccgggctgagttaatttgaacttctgtctcagcagaaatttctagcttctgtgtcacctcctcggctgtcctttttgtgttactcagcacgacaatgagactttcatcttctaccagggacccctgggtacttgtcaggcggtaaagcaagttatcttctagttccttcatccttcttttgtttgcagttacatcttccatcagatgagttctttctttctccaattcctattaatttgcataaatatattttctacctcaattaacaactcttgttgagtattccttaagacgttaacctacatggctgctttgaagctcccatactgtatttatcataatcaactgcaggaaatatggacatcaaaaaagaagggccgggcgcaggggctcacacctgtaatcccagcactttgggaggcagaggcgggtg

SEQ ID NO: 780 - DNA, 2200 bp, Homo sapiens
  misc_feature (1)..(2200): DMR5:14115001
gaaataggcatcacatgtcacatgtttcctccaattctggctccttaaagaccaaaagagatgttccctggaggtgggcccatggctgtccacaaagaccagaatgtagcttctgcaggaggagccaggctttcccatcttctccccagcatgttttcagcagccagaccttgggctctcttttaaatgctgcttcttttgctcccattcacaaatgtggggacttttcttgctgacccttcctgattctgcttttgtaactgtaataggttcattgcctgatgtgcagggtaaatcaatacgccgagacactgggctacagcagagaaagaggtttaatcgtagggctgccaaaggaggagatgggaagagacctcaaatctgtctcccccaagcagtttggggctaggatttctaagggttttggagtgggctgaagtgtgaggatcattaattggttcaagagttgcgggggtgaagtcatgggaccgagagtggagaaactattctcatgctgattccattcctttgtgggggtcctcaaactgggtgatgtaagttgtttttgccagaattcaggatatggaaaacatcttaggcaattcttaaacaaacgccttatgagtctaacatcagaaatcctatctagaagaacagcagggatgcaggtgatcagtatctagcgctacatggctcagtgacaaggaagtgggccacagtgcggcctgactaatgcttaattacaaccctatttctgtccagaattcttgctaagcctatgaggacagtttcgattttgctctgtccacactaggctgggcaactcccccatgctcctcatggggctcctaacccattccaccctctgggttggtcttttccaccagtagaaaggaccccaagaggagttccagtcccttcatggacttgtcagtgagggttctccagaaaaacagaaccaataggacaagaatagacaaataagaggggattgactgcgggaattggctcgcataattatggaggtctagaagtcccacagcctgccatcctcaagctggagaaccaggagagccaggggtgggattcagggtgagtctgaaggcctgaaaaccaggaatccaaagtctgaaaaccagagaagatggaggtgccagctccagaaggacagaaaatacaaaaaagtagattaattatcctgtctgtgacattttgttccttcagggccctcagcagattgaataatgccatctgcattggtgaggatgatctgccttactctgttgactgattcgaatgctgatctcttccagaaacacctcagggacacacccatattcttttttttttttttttttttttttgagatggagtcttgctctgtcccttaggctggagtgcagtggcgccatctcggctcactacaagctctgcctcccaggttcatgccattctcctgcctcagcctcccaagtagctgggactacaggcgcccaacaccatgcccggctaattttttgtatctttagtagagacggggtttcaccatgttagccaggatggtctcgatctcctgacctcatgatccgcccgcctcggcctcccaaagtgctgggattacaggtgtgagccaccgcgccaggctgacacacccatattctatcagttttgtgggtatccctttacctggccaagctgacacataaaattttccatcacaatggaagatgagcagaaatgtcccatgcaaggtgggactagtatttaaatgtataaagcccagttatttagaagctttgtgcctccatttcctcaagtgcaaatggggataataatggcccctcttccatgggtccttgagagcaccccccgaaataattcactaacgcatcacaactgtgcctgatgcacagaacacagaccataaatgctatgccttcctgttgctaaaagtattattgtcggctgggcatggtggctcacgcctgtaatcccaacactttgggaagccaaggtgggtggatcacttgaggtcaggagtttgagaccagcctggccaacatggggaaaccccgtctctactaaaaatacagaaattaaccaggcatggaggcgggcacctataattccagctactcgggaggctgaggcaaaagaatcacttgaacctgggaggcggaggttgcagtgagccgagatc

SEQ ID NO: 781 - DNA, 700 bp, Homo sapiens
  misc_feature (1)..(700): DMR5:16052601
gagattgtgacattgcactccagcctgggcaacaagagggaaactccatctcaaaaaaaaaaaaaaaaaaaaaaagaagctagacaaagaaggtaaaaattaaatccaaatttcatagaaggaaataattagtcattacgtacagatgtagacttgattgtgtgggtagagaacatgagaacatcaaggagtcaacaacaacaataaaagtctgtgagaatcattagtggaattagcaagttcaacatagaaaagtcaattttgtttctctgtactaacaataaacaacttaaaataaataaaaatacaacaccatatacaaaaacatgaaaatataaaatacttaaaaatttttacaaaagatgtaacagacctctacacttgaaactacaaatgtgtacaaacacaatcttctaaataaacactgaaccttttggataaatacctttttgaaaaaaacaaaaaagaatttttaaccctcttcctttttcttcccttttactcagaaggcagaaggaaaaagcgaggaagggttacatgatatcacagtgatgggagaggtgtgcaagaaagctcataggcatttttttgtagtagcctcaaactggtaacagtccaaatgtccattaatgggaaattgatacacaaattgtgatatagtcttttttttttttttgagacagagtctcgctctgttgcc

SEQ ID NO: 782 - DNA, 300 bp, Homo sapiens
  misc_feature (1)..(300): DMR5:19200301
ctacatgcatggttcaaacccgggctccaaagccacttggcaagcactgacacctcagaaaccagcaccgcaggctgggcacataggtgctctgtacaccagcaccactgccatcgtgatgctccacacatccccatgctccagacgctggcttcacacatcctctacattaaaaccacacatcagacactggtgccacagcccctcccagtgcacccgcatccaggaccgggcatcaagggggatctccttggcccatgacttccacccacaaggaaaaagagaacaggagtactctag

SEQ ID NO: 783 - DNA, 1700 bp, Homo sapiens
  misc_feature (1)..(1700): DMR5:23303701
atacttaatatttatatattcgtgccctttcctcttgcttttttgctcttcttcaatcctgagctgcagtgtttcaatataatgctggactgccgtatagataaatcggtactatgcttctgtctggaccatccctgacctctgagaccgcatcatctggatggttttgggaacgtcaatgttgcagtcaacacctttctctctgacgatgtcagtaagaatatcaatcacaatgaacgtccctgtcaggccaattccagcactacagtgcaccacgaccggccctgcatccgtgatgctcccctgcttatggtacacctcctccaggaagtccagcacgaccccggggtcgctgggcactccatggtccggccaggtccgaaagtgatattgcccgaccggtctctccatattccctggtccaatctttgaaagttcaagttctcttagtgtatagtcatgagctgcgctttctttgacgttcctaacacgcatgacgccatattcttttaaagcatactcatcaggccagtatttgacacatttactctttcctctatccacttcttttgttgtcatgacaatcactcgggagttttcttggaacttcatctgccaaaagtcattcactgtgttttgctgacagccttgtgtggcaatgtaacacgttttgggctttgaattgttgcacctggtttcaaattcaggcatgatggtatttgcactgatgtaatctgaaacaggctcatcgggatcaccgtcgtgtaggacaaccctagtatgatcaaagggtaggatgtttttatatctatttttgtttttgttttcttgcctttgaccctcttttcggctgtagagaagtttgcactcctgttgttgtagtgtctcaaatttttcccaaaagccttgtttgagtttgtctgtggtctcagctaatttgcttagttctcgaactctgctttttatttcagcagcatttatatgagtcgtgttaaggggatgcttgagttgtagtactgtacccaaggtttccaccatggaattcttcttgtaatgttcttcaagatctgttaaagaatcaaaccgttctcctccaccaacgtcatatttcagttcctttcagaggtataatctgcacagttcagaagatatttaagctcaataacatctccattcttctcttttaattgcctatgatgttccatgtaatactggaccaactcagccaaagtggcacatttctcctctccatagaggtcatagtaatcaccagtgctctaaatgtgggtgacagctccatttcttctaatggaaagtgtgaagtctccagggttacttttattaggccttgccaaaacactgccatcaactcctcttgtcaacagtaggttttctgcctccacaccagtgatatttgggtgaaaccatctccgcgatgtcatgttcctcccgccctccagctctgtgacggacccgctgcttgctcaggctccactgggctgggtcacatcgggctagcccaagggaggcctactcgggaccagacgaggagacagagccagccggctgtgcacagaccccctctccaggcctggggatcccagagactgtgcagccgccccccccggtccggcttgctcctcctccggctaatttttgtacttttagtggagatggggtttctcacttttggccaggct

SEQ ID NO: 784 - DNA, 400 bp, Homo sapiens
  misc_feature (1)..(400): DMR5:24508501
acccacattgcagcattgcaattacttttttctttttttacaaagacagggtgttgctttgtcactggagagcagtggtgtgaatgaaggtcatggcaaccttgacctcctgggctcaagtgatcctcctgtcttaacctcctgagtagatgggactataagtgtgcaccaccatgcctggctaattttttaattttttatagagacagggtctcagtatgttccccaggctggtttcgaacccctgagcttaagcaatatgtccaacatggcttcccaaagtgctgagattacaggtgtgaaccagcacatccagcctactttataattttaaaacttctctcattcaaccttacattttatttaataacttgaaagcacaaataaagtagtttggttg

SEQ ID NO: 785 - DNA, 100 bp, Homo sapiens
  misc_feature (1)..(100): DMR5:24512901
cacttccatgaaagatatggaccaaactgggcttttcaaagttttctaggcaaaacttaatttcctatattactatttcttcttgctttctctctttctt

SEQ ID NO: 786 - DNA, 900 bp, Homo sapiens
  misc_feature (1)..(900): DMR5:25302901
tttttatctctgacttgagatctacgttttagctctgccacactgcgtacaattctccaggcaattaatactgaggctagtttctggcacttctccataaactgtcccatcttccttaactaaatttgcctcttacctgtactccagtcgctaaagggcttcacgcctggtcaccgtgagtacatccctcaactacccaatgtatacataccaatttaagaggaaaaagttttttatttctattttagtagcaagttattaattacagtaattaaacatttcgtctaaaagaaagaaaatacatagttaaatctagaatatgtggtaagttaaagaaacattaattttggtttcaggcaaacgttgttagttttacttcattagattgattttctaaagctagaagcctagggaagaataatttgtatataaagaattaaataaagcttttacataaaaattataaaaacatatatttatatacattccagtgattaaacacaactctttcctcttcttttaagtttcgaatgtacctttgataactgtctgtattgaattctagtcattacttaagctatccttaattaaaagtaagagctgaagagttttggttaaaatatatatgtatgcttgaagttcattttacttatatccaaaccaatcaatgctaataatatcaccaaagtgattttacccacataaaatatttcaacatggatttctgaacctatactggtgccaaatttttataaatagattgcttttatttgaatattagttttttacagttgcaagaatcccttcaaattgtctaaataaggcagacaagaagagaaacagatgtacataagtgaacctgaatagatagacagatgatagataaataggagagagaac

SEQ ID NO: 787 - DNA, 200 bp, Homo sapiens
  misc_feature (1)..(200): DMR5:27993601
ttggcaacaccctcacagacacacccaggaacaatactttgcacccttcaatccaatcaagttaacacttaatattaaccatcacaccactacactcaacctgggtgtcagagcaagacccagtctcttaaaaaaataaaaatgtgttgagtatgtatgcactggcaatgtttatgttggcatggttgccactgcattca

SEQ ID NO: 788 - DNA, 2900 bp, Homo sapiens
  misc_feature (1)..(2900): DMR5:30068101
ggagccgaagaggtgaatgtataaaataccttaagagtatcataatagctaaattgctgccaggataatgtatttgttttgttttcttgtttttgaggaagagatttacatttcatctatgatctgttaaaaaggtaaataattttgagcctccctaatactgttctaaatctgaaaataaaagttcctcattaaaattgcaaggctttgggagtcaactggatgttaattcattgacttttaacatttgacttagagaagattcgatcaagcctttaaaaagtaaggcaagtacctagaaagtaaaatataactctctaggaataactctcctagcctgaagtcaatgccaatatcccttgaatactacgcagaggtcaaatgtaataactctgggagctaaaccgaaatgcccaaattcaacattgaaatataacccaaggcattacactgcctcaataattttcagtacaaaaaatatttgctgcatagtgatatgaaaagaaacagaagaaaatcatatttggaaattgtcttagttcagtctgccataacaaaatttcacagactgtgtggttaaaacaacagaaatttatttctcatagttctagtggttaaaagtctgagatcatggtgcccgcatggctggtgtctggtcaggccttttttttgtgacttctgggcagttgccatctccctgagtgctcgctcatatgacctcttctttgtgtgtatgtagagcaagacaagtgctgtctcttctgcaaggacacgaatcccatgacatcatggtcctgcagctaagacctcatttaaacttagttgcttacttaaagcctccatctccaaacacagccacactggggggttagtgcttcagaatatcagttttgggaggaagcaaacattcagtccataacaggaagcacacgactgttatgtagaggcagcacacacatcttttggagagaagggagacaaggatgatttgtttgaactattaagctcgtctccttgaacagctcaaaatatctaagtatttataaaatatctacaaaagacagaagctggggttaagtaggaggaagctgggaacctgcatgggactcccatgtaccaggactccttcctggcccctaaagacgagaggataacgggtggctaatgggtgagttgaactggcaaggaacaaccagctctcaccatgagcctctggaatcctgacagaaggagacccctcaaccaccatggacattggaattggcaggaagaactgcttagagaagtggtaggggaagcataacagctgaggcggagcccagagtgtttagtgcaggaacatctctaataggaacatgaccagggaagcccatctccctagcctcaatgtcctcccataggagactttagccctaagggaactattggacctgaactctgcagggcgggcttgcccatcaaacagggctagtatgacctgagcacctcttgttctgctggcctctcctggaaccccgacctggctgtgcctgcttgcagggcagcctctggtgccctgggtgcccgcattatagctcctgtgcttgcggactgtgcttaaccactggagagctccaacgggatggccccactgccaggcagcagcctgccctctctctttccacatttcagcttcccccaggcctatggcaacccccaccacccaacattgccttgcctatgagcgtgtgcattggcaggttttgggtgtgtgcatgcatcctgccctgccactgctgccagtgggagagcaccctacccatactcccacaccctcggccccccaccagtattgcagttcgagccttggcaggcacggatccagccagcccgccccccgcctccctgagtgccccaccttgtgccaacactgctgcaggagtgaaactagccacagagaacaaacacttccttgccctgagtgaccaccattccctgcagagcacagagggcgcacacagacctgcacccggcagtgaggcatcatcatgccgaccccaccaccagtgtgactgcctgcacagtcgccagcacgggcccccgccccactggaccatgctacctctgccattgtggtgaacccccacacctcagccacccccagcacccgctagcaccctgcagcagccaagtatgcactccaccacactgccactgctgctgacatgtgcaaacgaggatggatcccactgctactgcagtaagaaacactttacctgaccactcatcagagcgtggtgaccagccatccgggagcactttggccctcccagtgatgtggattcttttgtttttgtttttgtttttgtttttttgaagaataacattttatttgtgttgtagtgatttcttttttcacattttgaaaaactgtaataccctttgggtttttggttacacggatgaattgcatagtggtgaagtctgagattttagtgcacccattaccccagtagtgtacattgtatcaatatgcagtatttaatctgtcaccctcctcccaccctccccacttctgagcctccaatgtccatcatactactctgtatgcctctgtgtactcacagcttagcttccactttttttgttgttatactttaagttctggggtacatgtgcacaatgtgcagttttgttacatatgtatatatgtgccatgttggtgtgctgcacccattaactcgtcatttacattaggtatatctcctaatgctttccctctcccctccccccaccccacaacaggccctggtgtgtgatgttccccttcctgtgtccaagtgttctcattgttcaattcccacctatgagtgagaacatgcggtgttaggtttcttgtcctcgcgatagtttgctgagaa

SEQ ID NO: 789 - DNA, 1100 bp, Homo sapiens
  misc_feature (1)..(1100): DMR5:30247601
ggcaacagagtgagactccggctcaaaaaaaaaaaaaaagaaaaaaaaaaaaaaaagaaggagttgaggctttaagaactgattaggtgatgaaatctatgccttcatgaatggattaattccattattgcagaagtgggttcattacaaaagagtaagtttggccctattctctttttctctctagtttttctctcttcttccctgcccctaataactctgcctttctgccttgtgatgccatccaccatgtaatggtgcagcaagaattccctccctagatgccagcactttgatcttggacctcctggcctttggaactgtgagaaataaatgtctgttcattataaattactgtggtagtttgtaatagtagcacaaaatataccaaaacaatatttgtatgtaaacattcaaaaatatttcacaaacttacattgtggggaaaaaattacttgactctcataatgtcatatcaactattttccacactttatttgagaattttcttctctaggatattatttataaaacaggttttagatatagatatctaacagatatttaatgatccctttaaaatatcttcaaatgtaggactttttaattcattcaataataccacaaagtgaacagcctgaaaagcctttggcctttcctaagcagagcctccttctactgtgccttcacctcctgctttgctcagcatggctggcttcccccgacaccacatgctggccagctcctttgtggtcaccgtagacccaacaccatgattagtgatgacaaaccagattatgacctagatttattttttatagctgattattacatggagggtttgaaaaaggtgtttattcttcatggactaattaagggcagggccaaatatgtgatgctcaatacgtgatgtaggagatgggaggccatgacattgtagccctctgtgtgttcaagggggctatgaattatttgctcacctgctggattacatcaaagcgctgattagaaatagtcatagttccattcctatgctatagattttatcagactgaagagctactgtaatcaccagtcaaaaggggagtgtaaaagtaatt

SEQ ID NO: 790 - DNA, 200 bp, Homo sapiens
  misc_feature (1)..(200): DMR5:30458001
cttgtttataatttaattatttaaaacttttcctgacctactacataaagatttcaaaattaattccctttggagaatgcacttcacagaggaacaaaacattatttgacctcttttaactcatgttgcaacctaagagtgagttattgttttaaaacatcatttctttttctttttttttttctttttttttttttttt

SEQ ID NO: 791 - DNA, 100 bp, Homo sapiens
  misc_feature (1)..(100): DMR5:30502201
ctggtagattaaggcagactctttggaaatgccctatgaaaagccacactgcaaatcacaaacactgggatataatccaaattgggaagatagtccaagg

SEQ ID NO: 792 - DNA, 300 bp, Homo sapiens
  misc_feature (1)..(300): DMR5:33916601
ttggactgtggacttttgagttaatgctggaatgagttaagactttgggggactgttgggaagagatcattggttttgaaatgtgaggacatgagatttgagaggtgccaggggtggaattatatggtttggctgtgtccccacccaaatctcatcttgaattgtagttcccataattcccatgtgttgtgggagggacccagtgggaggtaattgaattatggtggcagatttttcccgtgctgtttccatgatagtgaataagtctcataagatctgatggttttataaagggcagtt

SEQ ID NO: 793 - DNA, 300 bp, Homo sapiens
  misc_feature (1)..(300): DMR5:36234301
aggcggagcttgcagtgagtcgagatcgcgccactgcactccagcctgggcgacagagcgaaactccgtctcaaaaaaaaaaaaaaaaaaaaaaaatgaattaacacgtatctacacagataagttttgaaaccaatagtaaataagagaagcaaatttctaaagaataggcacatattctaaagaacagaattatcattgactaacttttaaaagacacacatgatgttacacttgtttatggatactgtcatattaataaatgtaaaagcatatgtatgagaacaatacacttaacgt

SEQ ID NO: 794 - DNA, 100 bp, Homo sapiens
  misc_feature (1)..(100): DMR5:37175101
tcttcaggcattcctagtaaagccacaaggggctccagggctgtagaggtccccttgggcacagggtgggtgcattcatgcttgcacaagtcactggcac

SEQ ID NO: 795 - DNA, 500 bp, Homo sapiens
  misc_feature (1)..(500): DMR5:37686401
gtcagcatagccacagaagacaaccaggacccatgagtagttgttagaagtgagtcttggacccagcttaaaaagttgttgccagttagagcctaggcgggaagatcgcttgagcccaggagttcatgaccagctgggcaacaaactgagaccaccacccccggctctacaaaataaaagtataaaaaccagccaggcgtggtggcttgtgcctgtagtcccagtacttgggaggctgaggcaggaggattgctccagaaattgactgatattccttataatgtaatgcattttgaatttccagaggctccatgaccatctgctgagaaaagaggtatacagacaatttttccaattgggagtttgtattgtgtgatcccagacagggccttcaaaactctgggattttgtgcttgcgttttccatcttggtgaatatttgagtcttgatattctccaaatcatagtgtaaggcacacctaagaataagaggcctacgag

SEQ ID NO: 796 - DNA, 1400 bp, Homo sapiens
  misc_feature (1)..(1400): DMR5:38142601
aagaaaaaaagaaaaagaaaaaagaaattgttgtgtgattttcatgagcaatgttattcctgttaaataaaattcaatgtaagtaacattcaaaataagaagagtgtaatgggttactttaaagacttgaaggaaaatcacagacaaaggtagttcattttgctttttttctaagatgcagagtcgaattttcatttggtccagcaaattgccagagaaataagtctgtattttgtcactagtcatggccgcagagatgtttatgaaaagcacggacaatcttcctgagctgtatcaggaaatgtgttcagctacaagtaacaaaagccccaaacagtggattacgcgaattagggtttttatttttctcacctttccaaaagtccagagatcaatggctaatggttttgcctcagtggcttacagataccaaggccaaggtacctgggaaaatctgggaagagcaaagagggaaatgatgcaggcctgctaggtctgcccttctgtaaggcccacccacaaaacttctgctcacattttgtgggtccgaactctgtctgcagaaggtgctggcttttagcgggacacattacacctcccaacaatgttaaagtctgtgagaaagaggggcaggtgaccagctggtctgccccaatatcatggcaaactaaagacaaggacagtgtcctcaacacctctggaaatgaacatcttgctacggatggatccatctgaatatatctcaaacctgcttaaatctatttatatttttagccagtctacatttttgagggaacagtcaacaatgttagaaacaaacaaacaaactcaaaagtgtttattttcaagttagcctttcccatagaagataaagaagagctcagtgggcagacagttgctaaacatcactgtttgggtgttccccactctctcctaaagagcaacgtgggaattgctaatacttggagactccctcctttccctactcatcattcctccatacgcatacatgtattcaggccagtcacgtagaccaagcttccatcaagccccactgtgcaccagtgtactgtgtgtgagtgtgtatatatctacattatatatgttattttctctatattatgttttttgcatcttaaaaaccctttctgcctggggagagactgcctctctctgggctagccaattcttagagacagcaaagggctccgaggggaatatgtccttgatatgcaagctaagcaatctagagtcatcctcctctatttggcccagccaccccaggaggcaatatagccttgctaaagttaagctcagatatggaattatctgtgttgcagtggaaatggttaagttgcaacataaatcgttggctcatctgaactcttgggtgagttggc

SEQ ID NO: 797 - DNA, 2300 bp, Homo sapiens
  misc_feature (1)..(2300): DMR5:46045001
aatctgtgatgggatatttggcagctcactgaagtctatggtgataaagaaaatatcttttgataaaaactagaaagaaatttttagaaactgctttgtgatgtgggcattcatctcacagagttaaagctttcttttgaaggatcagtttggaaacactgtatttgaaaaatctgtgaagtgatattatgaaacgcaaaaagcccatggtgaaaaaggtaatatcttaagataaaacaggaaacaagtgttttcagaaactgctttctgatgtgtgccttcatctcacagatttaagtcgtttttgatggaacagtttagaaataccgtttttgcagtatctgtgaagggatatttggaagctcattgatgtctatggtggaaaaggaaatatcgtcagagaaaaactgggcagaagttatctaagaaactgcattggttttaggtcaacaagtaagtctttaatccatcttgaattaatttttgtacaaggtgtaaggaagggatccagtttcagctttctacatatggctagcccgttttcccagcaccatttattaaatagggaatcttttccccattgcttgtttttctcaggtttgtcaaagatcagatagttgtagatatgtggcattatttctgagggctgtgttctgttccattgatctgtatctctgttttggtaccagaaccatgctgttttggttactgtagtcttgtagtatagtttgaagtcaggtagcattatgcctccggctttgttcttttggcttagctttgacttgtcaatgtgggcttttttttggttccatatgaactttaaagtagttttttccaattctgtgaagaaagtcattggtagcttgatggggatggcattgaatctataaattaccttgggcagtatggccattttcatcatattgattgttccttcccatgagcatggaatgctcttccattcgttggtatcctcttttattttattgagcagtggtttgtagttctgcttgaagaggtccttaacatcccttgtaagttggattcctaggtattttactcttgttgaagcaattgtgaatgggaattcactcatgatttggctctctgtctgttattggtgtataagaatgcttgtgctttttgcacattgattttgtaccctgagactttgctgaatttgcttgtgagcttaaggagattttgggctgagacaatggggttttctagatgtacaatcatgtcatctgcaaatagagacaatttgacttcctcttttcctaatagaataccttttgtttccttctcctgtaaggacttcatgtctaaaacaccaaaagcaatggcaacaaaacacaaaattgacaaatgggatctaattaaactaaagagcttctgcacagcaaaagaaactaccatcagagtgagcaggcaacctacagaatgggagaaaatttttgcaatctactcatctgacaaagggctaatatccagaatctacaatgaactcaaacaaatttacaagaaaaaaacaaacaactccatcaaaaagtgggcaaaggataagaacagacacttctcaaaagaagacatttaagcagccaaaaaacacatgaaaaaatgctcattatcactggccatcagagaaatgtaaatcaaaaccacaatgagataccatctcacaccagttagaatggtgatcattaaaaagtcaggaaacaacaggtgctgaagaggaggtgcagatatttacactattggtgggactgtaaactagttcaaacattgtggaagtcagtgtggcgattcctcagggatctagaaatagaaataccatttgacccagccatcccattactgggtatatacccaaagggttataaatgatgctgctataaagacacacgcacacatatgcttattgtggcactattcacaatagtaaagacttggaacccacccaaatatccaacaacaatagattggattaagaaaatgtggcacatatacaccatggaacacaatgcagccataaaaaaatgataggttcgtgtcctttgtagggacatggatgaagctggaaaccatcattctcagcaaactatcagaaggacaaaaaaccaaacaccgcatgttctcactcacaggtgggaattgaacaatgagatcacttggacacaggaagaggaacatcacacactggagcctgttgtggggtgggcggaggcgggaggaatagcattaggagatatacctaatgctaaatgacaagttaatgggtgcagcacaccaacatggca

SEQ ID NO: 798 - DNA, 300 bp, Homo sapiens
  misc_feature (1)..(300): DMR5:46246101
gatacttcctttttcagcatgggcctttttgtgctacctaacatcactttgcagattacacataaacagtgtttccaaactgctcaatcaaaagccacgtttaactctgagaggtgaatgcacgcatcacaaagcagtttctcaaaaatctgctttctagtttttatccgaagatatttcctttatcacaattggcttcaacatgctcccaaatatccctttgcagattctacaaaaacagtgtttccaaactgctcaatcaaaagataggtttaactatgtgagttgaatgcacacttc

SEQ ID NO: 799 - DNA, 600 bp, Homo sapiens
  misc_feature (1)..(600): DMR5:50730801
aagttgttttgttaataatgatcaaaggtgagggttaatagatgaagaaattactgcataaacttaggcatattaatcagaagacaaggaagtaatgtgcaagggcagattacccagtgaagtttggctcacatggggcagtaactttacaccgttgactgcatgttcaggaatactttgagcaagaaagattagatcttgtcacaaactaatcagaagtttcttgccgtaagcaaaaaaggtcagtgcgaaaaatcacaagaggctgagtgacttagaggaaatgtcagaaaacctggctctgcttctggttccgcatggaattgaatgagtctctttaaatttatgtttgttcatctgtaaaataagggatgtgcaactgggtgatttctgacttctgttccaacctaacactctgtgaaatcaagatcacatgtacatttttttccaaatttccaaaatttttattctttggcctttagagagtgaaatcaaaaatctctcaattttgaatttcttttttcaattgagttctcttttgctcttctgtccaaaagaatgagtgtgttggtctgttggacttgagtcaaatgaaaatgt

SEQ ID NO: 800 - DNA, 5500 bp, Homo sapiens
  misc_feature (1)..(5500): DMR5:51064301
agggacctgactattgaaagaaaaacaaacaaactgaaagcaacaacaacagcatcaacaaaaaaggtccccctaaaaacctcatccaagggtcagtaggctcaaagatcaaaactaagcaaactcatgaaaataggaaagaatctacaaaaaaatgctgaaaacccaaaaggtcagagtgcctcttcccttcaaaatgatcacaacacatctccagcaagcgtgcagaactggacagaggataacatggatgaattgacagaagtagatttcagaaggtgggtaatgacaaacttagctgaggtaagaaaagcatgttctaacccaatgcaaagaagctaagaacgttgataaaaggttactggagctgctaactagaataaccagtttagagaggaacataaatgacctgatggagctgaaaatgcagtacaagaactttctgaagcatacacaaatatcaacagtcaaatcagtcaagagaaacaaacagtataagagctggaagactatcttggtgaaatacgacaggcagacaagattagagaaaaaagaatgaaaaggaatgaacaaaacctcgaagaaatataggactatgtagaaagaccaaacctacgactgattggagtacctgaaagagatgaagagaatagatccaagttggaaaaacaagcttcaggatattatccagaagaacttccccaacctagcaacacaggccaacttgaaattcaggaaatacagagaaccccactaatatatttcacaataagttcaaccccaacagattctccaaggttgaaacaaaggaaaaaatgttaagggcaatcagagagaaaggccaggtcacctacaaaaagaagcccatcagactaacagtggatctctcagcagaaaccctgaaagccagaagagagtgggggccaatattcaacactcttaaggaaaagaattttcaacccagaatatcatatccagccaaactaagcttcataaacaccggcaaaataaaatccttttcagacaagcaaatgctgagggaatttgtcacaaccagtcctgccttgtaagagctcctgaaggaagcactaaatatggaaggaaagaaccattgtaagccactgcaaaacatatgaaaatataaagatcaatgatacaatgaagaaatgacatcaacgagtgtacaaaataaccagctgacatcataataacaggatcaaattcacacataacaatattaaccttaaatgtaaatgggctaactgcccccaatgaaaagacacacactgacaaattggatagtcaagacccattggtgtgctgtattcaggagacccatctcacatggaaagacacacataggctcaaaacaaagggatggaggaaaatttaccaagcaaatggaaaggagaaaaaagcaggggttgcaatcctagtctctgacaaaacagactttaagccaataaagataagaaaaaaacaaagaaagacattgcataatggtaaagggatcaattcaataagaatagctaagtattctaaatatatatgcactcaatacaggagcacccagattcatgaaacaagttcttagagaccgacaaagggacttagactcccacagaatagtagtgagagactttaacaccccactgtcaagattagacagatcaatgagacagaaaattaacaaggatattcataacttgaactcagctctggatcaagtggacctagtagatatctccctaactctccacaccaaaacaacagattatacattcttctcagtgccatgtggcacttactttaaaactgatcacataattggaagtaaaacactcctcagcaaatgcataagaatggaaatcataacagtctttcagaccacagtgcaatcaaattagaactcaggattaagaaactcactcaaaaccacacaactaggtggaacctgaacaacctgctcctgaatgactcctgagtatataatgaaattaaggcagtaatctagaagttctttgaaaccaatgagagcaaagatacaatgtaccagagtttctgggatgcagctaaagcagtgttaagagggaaatttatagcactaaatgcccacatcagaaagctagaaagattcaaatcagcaccctaccatcacaattaaaagaactagagaagtgagagcaaacaaatccaaaagctagcagaagacaagaaatcactaagatcagagtggaactgaaggagatagagacatgaaaaagccttcaaaaaatcaatgagtccaggagttgttttttaaaaaaaattaataaaatagaccactagctagactaataaagaataaaagaaagaagaatcaaatagataccataaaatgataaaggggatatcaccattgaccccacagaaattcaaacaaccatcagagaacactataaacacctctacataaataaactagaaaatctagaagaaatggataaattcatggacgtatacacccttccaagaccaaaccaggaagtagtcaaatccctgaatagaccaataacaagttctgaaattgagacagtaataaatatcccacaaaccaaaaatgcccaagaccagacagattcacagccaaattctaccagagctacaaacaggaactggtaccatcccttcagaaacctttccaattccctccctaactcatttcatgaggccagcatcatcctgataccaaatcctggaagagacacaacaaaaaaagaaaacttcaggccaatatccctgatgaacatcaatgggaaaatcttcaataaaacactggaaaaacgaatccagcagcatatcaaaaagcttatccaccatgatcaagttggcttcatccctgggatgcaaggcttgctcaatatacacgaatcaataaatgtaatccatcacatatagagaaccaattacaaaaaccacatgatgatctcaatagagacagaaaaggccttcagtaaaattcaacctcccttcatgataaaaattcaataaacttggtatcgatggaacttatctcaaaataataagagctatttatggcaaacccacagccaatatcatactgaatgggcaaaagctggaagcattccctttgaaaaccagcacaagacaaggatgccgtctcttaccactcctattcaacttagtattgaaagttctggctagggtaatcaggcaagagaaagaaataaagacttcaaataggaagagaggaagtcaaattgtctctatttgcagatgacatgatcctgtatttagaaaacctcatcgtctcagctccaaaactcactaagctgataagcaacttttacaaagtctcaggatacaaaatcaatgtgcaaaaatcacaaacattcctgtacaccaacaatagacaagcagagggccaaatcacgaatgaaccccattcacaaacagagcaaaatacctaggaatacagctaacaagggatgtgaaggacctcttcaaagagaactacaaaccactgctcaaggaaataatagaggacatagacaaatggaaaaacattccatcctctttgatagaaagaatcaatatcatgaaaatggccatactgcccaaagcaattaatagattcaatgctattcccatcaaactacaatgtcattcttcacagaattagaaaaaactagtttaaatttcatatggaaccaaaaaagaacccacatagccaagacaatcctaaggaaaaaaaaaaaaagctggaggtatcatgctacctgacttcaaactatactacacgtctacagtaaacaaaacagcatggtactggtaccaaaacagatatacagaacaatagaacagaatagagacctcagaattaagttcacacatctacaaccatctgattttctacaaacctgacaaaaacaagccacaaggaaaagattttctatttaataaatggtgctaggaaaaccagctagccatatgcagaaaactgcaaatggacaccttccttacgccttatacaaaaattaactcaagatcaattaaagacttaaatataaaaccccaaaccttaaaaaccctagaaaaaaatcctaggcaataccatttaggacataggcatgggcaaagattttttgattaaatcagcaaaagcaattgcaacaaaagctaaaattaacaaatgggatctaattaaactaaaaagcttctgcgcaacaaaagaaactatcatcagaccaaacacgtgacctatagaatgggagaaaatttttgcagtctacccatctgacaaaggtctaatatctagaatgtacaaggaacttaagaaaatttacaagaaaaaaaaaaccatcaaaaagtgggcaaataatatgaacaaacacttctcaaaacaagaggttcatgtggccaagaaacatatgaaaaaaaagctcaacatcacttatcactagagaaatgcaaatcaaaaccacaatgagataccatctcatgccagtcagaaaggtgattattaaaaagtcaagaaacaacaggtgctagtgaggctgtggagaaataggaaagattttacattgttgatgagaatgtaaattagttcaaccgttgtggaagacactgtggtgattcctcaatgatccagaaccagaaataccatttgaaccaaaaatcccattactgagtatatacccaaaggaatataaataattctattataaagctacatgcacacacaagtttatttcagcactattcacaatagcaaatacatggaaccaacccaaatgcccatcaatgatagactggataaagaaaatgtggtacgtatacaccaagaaatactatgcagtcacaaaaaggaatgagatcatgtcctttgcagggacatggatgaagctggaaaccatcatcttaagcaaactaacacaaacaccacatgttctcattcataagtgggagtggaacaatgagaacacatggacacagggaggggagcaacacaccagctcctgttgttggacggcggggagctgaggggagagacagcatcgggacaaatagctaatgcatgctggacttaaaacttaggtgacaggttggtaggtgcagcaaaccactatggcacacatgtacctatgtaacaaacccacatgttctgcacatgtatcccagcacttaaagtaaaaaaaaaaaagaattttgtcacatgctttttcttcatctgttgagatgatcatattgtttttacccttcatttttgttaatatggtgtataacatttattgatttatgtatgttgaattattcttgcatcccaggggaaaattccatttgatcatgatgtatgatccttttaatgtgctgttgaattcagtttattagtatcttgttgaagattttcgcatgtgtgttaattagggatattagactcaaattttttttcttatattgtccttatctaagtttgatatcgtgtaaaattagtttgtaa

SEQ ID NO: 801 - DNA, 2800 bp, Homo sapiens
  misc_feature (1)..(2800): DMR5:51251101
gtcctacgcccacgaactctcactgattgctagcacagcagtctgagatcaaactgcaaggcagcagccaggctgggggaggggcgcccgccattgcacaggcttgcttaggtaaacaaagcagccaggaagctagaactgggtggagcccaccacaactcaaggaggcctgcctgcctctataggctccacctctgggggcagggcacagacaaacaaaaagacagcagtaacctctgcagacttaaatatccctgtctgacagctatgaagaaagcagtggttctcccagcacgcagctggagatctgagaacaggcagactgcctcctcaagtgggtccctgacccctgacccccaagcagcctaactgggaggcaccccccagcaagggcacactgacacctcacactgcagggtattccaacagacctgcagctgagggtccttttagaaggaaaactaacaaacagaaaggatatccacaccaaaaacccatctgtacatcaccatcatcaaacaccaaaagtagataaaaccgcaaagatggggaaaaaacagaacagaaaaactggaaactctaaaaagcagagcgcctctcctcctccaaaggaacgcagttcctcaccagcaatggaacaaagctggatggagaatgactttgacgagctgagagaagaaggcttcagatgatcaaattactctgagctacaggaggacattcaaaccaaaggcaaagaagtggaaaactttgaaaaaattttagaagaatgtataactagaataaccaatacagagaagtgcttaaaggagttgatggagctgaaaaccaaggctcgagaactacgtgaagaatgcagaagcctcaggagccgatgcgatcaactggaagaaagggtatcagcaatggaagatgaaatgaatgaaatgaagtgagaagggaagtttagagaaaaaagaataagaagaaatgagcaaagcctccaagaaatatgggactatgtgaaaagaccaaatctatgtctgattggtgtacctgaaagtgatggggagaatggaaccaagttggaaaacactctgcaggatattatccaggagaacttccccaatctagcaaggcaggccaacgttcagattcaggaaatacagagaacgccacaaagatactcctcgagaagagcaactccaagacacataattatcagattcaccaaagttgaaatgaaggaaaaaatattaagggcagccagagagaaaggtcgggttaccctcaaagggaagcccatcagactaacagcggatctctcggcagaaaccctacaagccagaagagagtgggggccaatattcaacattcttaaagaaaagaattttcaacccagaatttcatatccagccaaactaagcttcataagtgaaggagaaataaaatactttaaagacaagcaaatgctgagagattttgtcaccaccaggtctgccctaaaagagctcctgaaggaagcgctaaacatggaaaggaacaaccagtaccagccgctgcaaaatcatgccaaaatgtaaagaccatcgagactaggaagaaactgcatcaactaacgagcaaaatcaccagctaacatcataatgacaggatcaaattcacacataacaatattaactttaaatgtaaatggactaaatgctccaattaaaagacacagactggcaaattggataaagagtcaagacccatcagtgtgctgtattcaggaaacccatctcacatgcagagacacacataggctcaaaataaaaggatggaggaagatctaccaagcaaatggaaaacaaaaaaaggcagggattgcaatcctactctctgataaaacagactttaaaccaacaaagatcaaaagagacaaagaaggccatgacataatggtaaagggatcaattcaacaagaagagctaactatcctaaatatttatgcacccaatacaggagcacccagattcataaagcaagtcctgagtgacctacaaagagacttagactcccacacaataataatgggagattttaacaccccactgtcaacattagacagatcaacgagacagaaagttaacaaggatacccaggcattaaactcagctctgcaccaagcggacctaatagacatctacagaactctccaccccaaatcaacagaatatacatttttttcagcaccacaccacacctattccaaaactgaccacatagttggaagtaaagctctcctcagcaaatgtaaaagaacagagattataacaaactatctctcagaccacagtgcaatgaaactagaactcaggattaagaaactcactcaaaaccactcaactacatggaaactgaacaacctgctcctgaatgactactgggtacataatgaaatgaaggcagaaataaagatgttctttgaaaccaacgagaaaaaagacacaacataccagaatctctgggacgcattcaaagcagtgtgtagagggaaatttatagcactaaatgcccacaagagaaagcaggaaagatccaaaattgacaccctaacatcacaattaaaagaactagaaaagcaagagcaaacacattcaaaagctagcagaaggcaagaaataactaaaatcagagcagaactgaaggaaatagagacaccaaaaacccttcaaaaaattaatgaatccaggagccggttttttgaaaggatcaacaaaattgatagatcgctagcaagactaataaagaaaaaaagagagaagaatcaaatagacgc

SEQ ID NO: 802 - DNA, 300 bp, Homo sapiens
  misc_feature (1)..(300): DMR5:54175101
agagcatccggtttaaattattcatgtcgttatcactcatatttttgccaaacactccagaatttcatcttcatgttctttttaaaatccagagtagaaaaactttgtagccaactccattaatatctattttacctgtttattctaggtcacctaagccacttctgacataaaagatgattttgcaatgatagcagtgatattctactccactgtcttttctcttctttctttctttcttttttttttttcagacagagtttcactcttgttgcccgggctggagtgcaatggcacaat

SEQ ID NO: 803 - DNA, 1100 bp, Homo sapiens
  misc_feature (1)..(1100): DMR5:55067601
gcaaacacatgctgagtgaatacacttattgaaatcatattctataccaattccatatgttaggaaaattattccacatcagcttcaagtgcccaagattcattgttataaggcaacatttacttttcatgccttttgcagtttggaacacaatagaccatcattaaagactgagtgagtgggtggatggatggatggatggatggatggatggatggatggatggatggagaactgtgagagaagataagtaacattaggagaacttcccctctcaatggtgagttcttgagtacagagaacgtgtcttaattctttgcattttcaatgctcaaaatacagtctaacacaaaaagttattaacaaatatgagaagaataaatgaatgtgaaattacatgaattatatacatattatttcaattgtaaaccttgatttaacagatatagtgttcgattaactatcttatgtgaaatcacgtttcagatataaaaagtccaaatatagaaatttttactaactagaaaaaaatttcgatcattaaaataaatcttcacatctgaaacaacatgtaaatattataactgctactgtcacctatctttaggggtatcaatactctaaaaaaagggtaaaataaaatatatagtagatcatatgtaggaaaaaatttcatgattaatatttcttaaaaacaaagttctattattttattaacaatttttgtcctttaacacattcattgtaaaatgttaaagctatagaactataattaaataaaaggaagaaaataaacaatcacccataatcaccagggataactcttgttaacatttggtattaaaatatgttctggcatggacacagggaagggaaaaaaacacactggggcctgtcagcgggggcaaggggagggagagcatcaggataagtagctaatgcatgctgggcttagtacctaggtgatgggttgataggtgcagcaaaccaccataatacacttttacctatgtaacaaacctgcgcgtcctgcacgttgcacatgtatcccagaatttaaaataaaatagactttttaaaaaaagaaaataaatatgttc

SEQ ID NO: 804 - DNA, 500 bp, Homo sapiens
  misc_feature (1)..(500): DMR5:55530601
atgcgatagaatttaatctgttttgcacagcatctgcagctaccagaaaacttcctcattatattttcaaggtctaaggcccgttcagggcatgctctctcttctagtcacatttccacgacacaggggacaatgtgctccgctttccctcattgcagtcaggaaacattttctacagaaaacgtgctgacagggcgcggtccgcacgggcgttttgagcacctcctgacagacggggcagtaggatgtggccgcggagaggtcctcagccatggcgggggatgggggaacaaggcgatggtgacagcggcagcggccccgatggtgacatggtgacagcggcagcggccgaggtgacggtgacggcccggggctcgatgccctacaacaacatcgcgcctttcataccagcctaccaccattctctgtagagcttttctcatgcgctcagataatgtatatggcctgttctatagtcacagaaccagtcataaaaagag

SEQ ID NO: 805 - DNA, 900 bp, Homo sapiens
  misc_feature (1)..(900): DMR5:56393001
gatggataaattcctggacacatacaccctcccaagggtgttcatccttgatgaacattgatgcaaaaatcctcaacaaaatacttgcaaaccaaatgcagcagcacatcaaaaagctaatccaccatgatcaagtagaggcttcatccccaggatgcaaggttcgttcaacatatgcaaatcaataaatgtgattcatcatataaatagaactaaagcaaaaaaactgcatgattatctcattagatgcagaaaggcttttgataaaattcagcatcccttcatgttaaaaaaaactctcactaaactaggtattgaagaaacatacctcaacataataagagccatctatgacaaatccagagccaacattaaactgaatggacaaaagcctaaagcattcctcttgaaaactggcacaagacaaggatgccctctttcaccacttctattcaacatgttattgaagtcctagccagagcaattaggcaagagaaagaaataaagggtatccaaataggaagagaggaagtcaaattatctctctgtgtagatgacatgattctatatttagaaaaccccagagtctcagctcaatagctccaccagctgataaacaactttagcaaattttgggatacaaaatcaatgtacaaaaatcactagcattcctatacaccagcaacaaccaaactgagagccaaatcagacaggcaatctcattcactattgccaaaaacaaaataaaatacctaggaatacagctaaccagccaggtgaaagatctctacaatgagaattaaaaagcactcctcaaagaaatcagagaagacacaaacaaatggaaaaacaccccatactcatgaataggaagtatcaatatcattaaaatagctatat

SEQ ID NO: 806 - DNA, 1000 bp, Homo sapiens
  misc_feature (1)..(1000): DMR5:57248101
tgatagttaccttgtaggattgaaattaactaatgaggatttgtattgtataatgtcttcttttggggatgatggacattttattactattaacactgattggggggaaaggaggaacaagagagaaaggtatgtattgttactgtactgactgtgagtacctggtagttcaggtattttctttctcatttgatcaaggttttgaaactcccagaacagggagttctctgaccagtctagtgtcaaaggacacccatagcacttatattattatacctgaaattgctttgggtactgtattggaacccctcatatactattttttttttttttttttttttttttgagacggagtctcgctctgtcgcccaggctggagtgcagtggcgggatctcggctcactgcaagctccgcctcccgggttcacgccattctcctgcctcagcctcccaagtagctgggactacaggctgggcatgtagccactacgcctggctaatttttttgtatttttagtagagacggggtttcaccgttttagccgggatggtctcgatctcctgacctcgtgatccgcccgcctcggcctcccaaagtgctgggattacaggcgtgagccactattttttatttatgatctcagacagaatttttgagctttgagggaaggactagcattcctagctgcttaattctgctaagattagttataatatacatacattaatgccaacaagtaagcattattatggtttgtttccgtgactaataatccatatgacacagagttttaacattctgttttgtgttccactgtcaaaacaccaaagaaccaaaaacaaaaggattctttctcctctcctccctgccatctcacaaacattttaccaggtgaaatccactcttataaaccctatgtatgtgtataaataattataaaatacattttattggagctgttactgaactctagaactctgtgtaacacagtttgaaaag

SEQ ID NO: 807 - DNA, 1400 bp, Homo sapiens
  misc_feature (1)..(1400): DMR5:57549501
gccttttgggttttcagtgttttttttaattgattctttctcatcttcatgagtttgtctagttttgatctttgaggctgctgacccttggatgaggtttttgtggaaatattttttgttgatactgttgctgttgctttctgtttttttgtttgtttttctttcagtggtcaggtcctccttctgtagggctgctgtggtttgctgggggttcacttcatgccctattcatctggttcactcctgcacctggagatgtcactcaaggagactggagaacagccaagatgggtgcctgctccttcctctgggatctttgaccttgaaaggcactgtcctgatgccagtaggaatgctcctgtatagggtgtctgacaacccctgttggagggtctctccaagttgggtggcacagggagcaggacccatttaacaaagcactttggctgtcccttggtggagaaggtgtgctttgctggggggaaacccactcatctgggctgcccagattcctcagaaccagcaggaggaaatactaagtctgctggtctgtggggattgtggccactcctccccacaggggctcaggcccagggagatcagagtttgttcctgagcccctggctggagttgttggagttcctgcagggaagcccctcccagtgaggaggggtgggtcatggtcaggcctgaagaggcactctggatgcagccggccacagccagtgtgttgggctatgggggacaactcttgggaccaagctgtccggtctccctggctccagcaggcgaaaggcgtggcctggagcagctgcccttccccaaccctgggagcttagtgtgttaggcagctagcagtcccaatgttagctgctgtgccccctgcaaggagctcaaatggcttagacagcaggcagctgcaactgtggtgcttgctgcccctctccccggggaacttggcaggcttaagcagattctcgctgagtggctgttgagaatctgtgtggctccatggttgggaccctatgccccagtggcgtgggttcatgaatgggatcttctgatctgtgggttgcacacttccgtggagaaagcacggtttcccaggctgggtaggattctcactcaccacctctcttggctgggggtgggggttcccctgccctgtgtggctctcgggtgggctgccacaccacactgttcttccttcctctgtgtgggtcacgccagccacctagtcagttctgatgatagaacctggatacctcagttgtgggtgcaggatttgcacgctgttttatggtttttttcgatggaagcctctgatagctgctgcttctagtcggctatcttggccccgcccctccaggtgattcttattagagaagggaaacatccta

SEQ ID NO: 808 - DNA, 3200 bp, Homo sapiens
  misc_feature (1)..(3200): DMR5:60335201
tgcaatagggaagggagtgcagtgtgaactgaactcaaccttgatttgcacagaggagactgtgtatttcagaagaggaatgagagagtagaaaagggaaggggtgagagcaggctcagtgaagtcagagagtgaaaaattacaaagggttggtcaacattaaagttgattagacaattatgggagttaggattctatctgcccagataccaaaagacagaggccctctctctcctgatggttactttttagaagaatggctcttgggtccttgagaaagacactcttgagcagtaggaagtgcatatatttatcaaaggttacagggcaaggattcacaattgtaagccctttttagtaaatgctctaagaaagggtggttgggcctagctccagggtgttggctagaagaaatagtaaactctcctggcaaccttgagcttcctcaggcaggcatcctaagtggggtagggtagtcctagggatgtggccttgagctgttagaaattattctagtgtttgtgtaagtcttttaatgtggggcacgagtggatgaaatcattggtgttgagaatctgtagttgtgataggaagttaaggcctagtcaagaagggggttcagaggagcatggctaaagtttggtaagttagagaatctttgtcaacacctagaaaccaaagatgctatttttaagtcattaactgatagcactaatatgtcaaataattttaaacttgtgtccctttactgatattaaactattatcaagcagcttagcagcatggtcacttggtcagggctctggggttggagacagcctcacagggtaggttattggagagcgaggaaaagaatgaagaattccagacacaactgctaccactccgaccaaacactgacaacttatttccaagtaactgtcctgccaagcttgctttaaaacagaaaggtaagacttatggtagtataaacagtggacttgccaaaagtcttttaaaatagtttattcttttatgtagagtaagaagaacccacttggaagtttctttccttggcattgctcagtaagcccttttgttccaataatatatagataaactagaggtcagtcattttaattgttaccaacttgaattttactgtaaatatgtgtttgtggcatggctatcctgagaaatagcaagtactcactttgataactcagcaaaggttcattttcttaagggtagaaccctagtgtgtgcttccaccttttccacagaccacatccacctatttcagggtgcccgtgcttcctgagtcccattcctccacaacacaatttggctgcaagctgcccagatagaactggtttataaactggaaagccaagaacttcagtcttcaaagcaggctagcatatgctgttcatgtacaaacaagtgaattcttacttcatacaaaaatctcactccctcctctctttttaggttgtcacaaagtgtctgaatggctgaatgattctgttgataggatccatggtctcttcttgcagtttccttctctgtctgccaatttcacacttaccctcaattctaacagttcccacactggcaatacccatccagtggggttgggttgggttgccagataaaatacaggatgcccaattacactgaattttatataagtaatggataatttttagtataaatacatgttattttaatttcctaatttcagcaactctattcctagacaaaaatccactatccaattattttatcttcctggtgtataaaacattattctggaaagttgtagaactatgataactgcttaaaatataaattgataggctggatgtggtggcttatgcttgtaatctcagcactttgggatgccaaggccggtggatcacctgaggtcaggagtttgagaccagcctggccgacatggtgaaccctgtctctactgaaaatacaaaaaaaaaaaaaaaaaatttagctgggcatggtggcaggcacctataatcgtagctacttgggaggctgaggcaggagaatcacttgaacccggggggtagaggttgtagtaagctgagattgtgctgctgcactcaagcctgggcaacagagagagactttgtctcaaaaaacaaacaaacaaactatatatatatatatatatatatatatatatatatatacacacacacacacacacatatatcaattcatagatcagttgtttccaggagctgaagatgtggggagacactggctataagaaggagggagagcttttgaggggaggtgatcaaactgttctatacattaattctggtggtatacacatgactatatgcatctgtcaaaacttatagaactctacaataaaagggatggattttactgtaaataaataatacctaaataaaccagacttttttaagtggaaaataaatgtacactactcggtatcagacggccctcacacatttcagacaccattttattcctcccttagtatcaccagagtaaatgcctcacaacagctattctatttttttcattctccataggttcacaattccaacaccacatctctccctgcaaacagatttgttcagtcacgcaaccagagtgtaatcttagctggatctggaactataaagatgaaaatagagttcctaccaaaaaacattcctcatgggctagtaggcaaacagaaacaaataataataaaaaaaaagacatacaatgtaaaaaaaatctgtataatgggcaattataagatgttgtactgtacagaggaatagtaaacagtaaagtctcttcaataactcaggaaaagttaaaaatgctggagttcagccttcaaagcagggagttatataggtagataaaggaaggtgagtagccggagaaaaaaggcagacgatcagctgcacaggtgggtcagcacaaacgatgaaagccgttgacactcaggtgctgtgggaattcttgcttgccgtaacagaaaccggccttggctagctggaggagaaaaaagtagactccattggaaggacatgcaggttcagactcagtagaagtcttcatcactaaggacagaaaatgagcaaaaacccaggcgcgcaagatgccaaggagcaagaatcacgaccactatcctgtagcaagaattacagccaggacactgctgctgccgccgc

SEQ ID NO: 809 - DNA, 1100 bp, Homo sapiens
  misc_feature (1)..(1100): DMR5:60528201
ccgtgaatcctgtcagccttctaaggcagttgctattgttcccattttgtagcttgccagtgtcatgcaagtcaggacaataggaaaggagcagggaatagaaaagtaaatagataaagaactgagaatagaaaaaggagtggtgggccagtgcccgaggcaagggagaggaagtcatcacaggtaactcctgagcatatcttgttcttttcttcctttggaccttttattctaagaagacagggagaaagtcatcttccaaaaatggtggaccgtaaaaagggagctaaaagaagaaatagtcaaaattttctaaatgaggtaatagaggtgaagaaggaataggatgttccaccttcttcctgactcagacagtaaggagtgggtaaactggtagcattcttttatcttcactatctcagagaaatttatgctattaaaatagtttcttcttgattgtttccctgacatgatgcaaccccaaaatcacttaataactgagctactcttgagactaattattaaggtatctaaaatgaacacccagaagcatcacagtctcatgaggacacatttattaatcacttgattccataaaaggtgttagtgatgctacagtgagacactgaccccaagggctttagaggacacaacacagaaatctgctcgattgataaatatccatcttagttcttactttataaaacccagaactaagtaacaagacatgacaggccactatttaaggggaattaatctgttgcctcaattgacatttaagcaggaggccaaagaccattagaacaaactgaaattaattaatgtagcaaaataactcaataccaggatgctgatcttatcttgttgaaaatcactccaagatctttattagtccttaacgtaacttccaagtgagctgcctgtatctttcttattcagaatccctattagccaattgaagtgctgggcagtgtggccaggaaacaagaaggaggaacttgaacaaaatccttaaaatagacctcactccaaaggcttatggaatgtcccccgtgattggggagaattcattctgattttggtaaccagctcagttacag

SEQ ID NO: 810 - DNA, 600 bp, Homo sapiens
  misc_feature (1)..(600): DMR5:61525801
ttcatcgaacaggccacatcggacagtgttcacccgagccatcgaggcatgcgatctccactggcaggatagccacttgcagcacattatcagcagtgacctatacaccaactactgttaccatgacgacactgaaaactccctcttcgactcccgcgggtggcccctctggcatggtaagtgaccaaaccggaaagacatttccatgacttacttctttgtttagtttctatagcattactggaatgggaggtggagaactgaaggattcaatgggagatggatgaatgcttggcaataggagctgagattttcattcaaatccaagttcaggaatggtttcttgtgtctttttaatagtattttgggagaaacatcttactattaaattctttttttatggatatatctgacagtggcaactttacccccttgactttctgttttagaacatgttcctacagcctgtgcaagagtggacgcattacgttctcatgggtaccccagagaagcactgagactagcaatagctattgttaatacattaagacgacagcagcagaaacagttggaaatgttccgaacccaaaaaaaaggtga

SEQ ID NO: 811 - DNA, 900 bp, Homo sapiens
  misc_feature (1)..(900): DMR5:61627401
tctgaacaatacactgtgaatatctttccacgtgaacatccttctaatgaatatagtttaataaatatactctattcttaatgattctacagaactttcattgtagggatgcggtgcgatattttcaatgattctcttacagggcttctaggatgttgccagtttttgttttttgctttttttttttttttttttaacttctgtccacaccattccaaggtcattctcttgctgggtcactatgcatgtccttaattatttccttaaaatctattcctcaaaacgactgggccaactgttctgcatttttaaagtttcactacattttgtcaaaccgacctttagaaatgttatgtcatttcatactcccacctgcagaaaatgcagaagtctgttgccagaattccatccttaccaatcatgaatattagtctcctttttattcttttctgtttgtctatttttaaattggagtattcatctttttcttactgatttgtaagaacattgtatatgttcagtctattaattctttctcatgcattttgcaagcttttcccatttgtcaattgctttttacctttcaatttacatttaaaactgttgggcagtccatcacaaagcgtatccaccatgatcaagtctgcttcatccctgggatgcaaggctggttcaacatatgcaaatcaataaacataattcatcacataaacagaaccaaagacaaaaaccacatgattatctcaataaatgcagaaaaggccttcgataaaattcaacaccccttcatgctaaaaactctgaataaactaggtattgatggaacgtatctcaaaataataagagctatgtatgacaaacctgcagccaatatcatactgaatgggcaaaagctggaag

SEQ ID NO: 812 - DNA, 300 bp, Homo sapiens
  misc_feature (1)..(300): DMR5:61762201
taggcctcttttaaaaatcattttttaagtaatttctccatttctaccctaatttgtgccgtttaaacatgtcttcattttatcttctgtgtttttggctatatttctttgtgtcaaattctttttttttttgagacagagtctcgctctgtcgcccaggctggagtgcagtggcacaatctcggctcactgcaacctccacctcctgggttcacgccattctcctgcctcagcctcccgagtaaactgggactacaggtgcctaccaacacacccggctaattttttgtatttttagta

SEQ ID NO: 813 - DNA, 800 bp, Homo sapiens
  misc_feature (1)..(800): DMR5:62453401
agtgaagaatatgaagcatgtggaagagaagggatgtaatggaaggagccaagtgaagagagagttctagaagaaaatacttgtcctagtctttttatgttgcctttattctttcacaaagaattggccaactttttgttctgaggactcaattttgtcttgggctcacagtgtagagcctcttgtttgagtatggactagggaagggggtgggaaaagcagtgtataaccttgagctgtcttccatgtcaaaaacattcgttttcaatctgttatacacagactgagaggtttctgaaccacacctttggaatcctcactttgaggattatggcttggcaatttgcatttttaacaagctccccatagaatttttatatacaccaaagtttacgtcacaccacattgtgtccttttcatttttaactcaatgggtttaaatagccagtcttggctgggtgcggtggctcatgcctgtaatcccagcactttgggaggctgaggcgagtggatcatgaggtcaggagatcgagaccatcctggctaatggtgaaaccctatctctactaaaaatacaaaaaaaaaatagccgggcgtggtggcacgcgcctgtagtcccagctactcaggaggctgaggcaggagaatgacgtgaacctaggaggtggagcttgcagtgagccgagattgcaccactgcactccagcctgggtgacagagcgagactccatctcaaataaaaaataaataaataaatagccagtcttatgttcatcctaggatattgtatgtaagagaaa

SEQ ID NO: 814 - DNA, 500 bp, Homo sapiens
  misc_feature (1)..(500): DMR5:62663101
ttttatattgattacatgtcaaaataatatctttgatatattagaataaaatgttattaaaattaattttcccaatttcttttcatcttttaaatgtagccacaagaaaatttaaaattggccgggcatggtggctcatgcctgtaatcccaacactttgggagcccgaggtgggtggatcacctgaggtcaggagttcaaaactagcctaaccaatacggtgaaaccctgtctctactaaatacaaaaaattagccaggtgtggtggtacgtacctgtaatcccagctaattgggaggctgaggcaggagaatcgcttaaacccaggaggcggaggttgcagtgagctgagactgaggcatttgcactccagcctgggcaacaagagcgaaaccccatctcaaaaaaaaaataaataaaataaaataaaatttaaaattatatatgtggctctcatttgtagcttacattatatttctacaagttcagtatcctttatc

SEQ ID NO: 815 - DNA, 200 bp, Homo sapiens
  misc_feature (1)..(200): DMR5:63289201
tatcaggaagtcctttagattggttctttgtttttgagcacttccttgcttttttgtatagtgaggatgttcggatgtttgaggctcattttttattttccgtgccccatctctggaatcaacaacttctctgaggagccctgcttcctctctcttttttggaaaatgatacttaactatcaagatctgggttttaggtg

SEQ ID NO: 816 - DNA, 1800 bp, Homo sapiens
  misc_feature (1)..(1800): DMR5:65165301
tgaaatgaagcgagaagggaagtttagagaaaaaagaataaaaagaaatgagcaaagcctccaagaaatatgggactatgtgaaaagaccaaatctacgtctgattggtgtacctgaaagtgatgcggagaatggaaccaagttggaaaacactctgcaggatattatccaggagaacttccccaatctagcaaggcaggccaacgttcagattcaggaaatacagagaacgccacaaagatactcctcgagaagagcaactccaagacacataattgtcagattcaccaaagttgaaatgaaggaaaaaatgttaagggcagccagagagaaaggtcgggttaccctcaaagggaagcccatcagactaacagctgatctctcggcagaaaccctacaagccagaagagagtgggggccaatattcaacattcttaaagaaaagaattttcaacccagaatttcatatccagccaaactaagcttcataagtgaaggagaaataaaatactttacagacaagcaaatgctgaccgattttgtcaccaccaggcctgccctaaaagagctcctgaaggaagcgctaaacatggaaaggaacaaccggtaccagccgctgcaaaatcatgccaaaatgtaaagaccatcgagactaggaagaaactgcatcaactaatgaacaaaataaccagctaacatcataatgacaggatcaaattcacacataacaatattaactttaaatgtaaatggactaaattctccaattaaaagacacagactggcaagttggataaagagtcaagacccatcagtgtgctgtattcaggaaacccatctcatgtgcagagacacacataggctcaaaataaaaggatggaggaagatctaccaagcaaatggaaaacaaaaaaatgcaggggttgcaatcctagtctctgataaaacagactttaaaccaacaaagatcaaaagagacaaagaaggccattacataatggtaaagggatcaattcaacaagaggagctaactatcctaaatatatatgcacccaatacaggagcacccagattcataaagcaagtcctgagtgacctacaaagagacttagactcccacgcattaataatgggagactttaacaccccactgtcaacattagacagatcaacgagacagaaagtcaacaaggatacccaggaattgaactcagctctgcaccaagcggacctaatagacatctacagaactctccaccccaaatcaacagaatatacatttttttcagcaccacaccacacctattccaaaattgaccacatagttggaagtaaagctctcctcagcaaatgtaaaagaacagaaattataacaaactgtctctcagaccacagtgcaatcaaactagaactcaggattaagaatctcactcaaagccgctcaactacatggaaactgaacaacctgctcctgaatgactactgggtacataacgaaatgaaggcagaaataaagatgttctttgaaaccaacgagaacaaagacacaacataccagaatctctgggacgcattcaaagcagtgtgtagagggaaatttatagcactaaatgcgcacaagagaaagcaggaaagatccaaaattgacaccctaacatcacaattaaaagaactagaaaagcaagagcaaacacattcaaaagctagcagaaggcatgaaataactaaaatcagagcagaactgaaggaaatagagacacaaaaaacccttcaaaaaatcaatgaatccaggagctggtt

SEQ ID NO: 817 - DNA, 300 bp, Homo sapiens
  misc_feature (1)..(300): DMR5:65719901
ttttacatagtgctattaaaatgactcaggtatttttatatattatttctaaactggatgctttcctattaggaaatggagacaacaagatcttcagagtattaaccaggatttaaatctcagctttatcacatatcagctgtgttatctgcttacgctatttggtttcattttctttttctttttttttttttttttttgagatagggtctcgctcatggcccaggctggagtgcagtggtgtgatctcagctcactgcaacctccacctcctgggtttaagccaccctcctatctcag

SEQ ID NO: 818 - DNA, 100 bp, Homo sapiens
  misc_feature (1)..(100): DMR5:65981401
gagaagaaagcagaaatcaatgaaacagaaagcatactctaagaaaatgaacaaaatataacatttcctctttgaaaagatcaatacaattgataggcct

SEQ ID NO: 819 - DNA, 3700 bp, Homo sapiens
  misc_feature (1)..(3700): DMR5:68127701
ggcagaggttgcagtgagccgagatcgtgccattgcactccagcctgggcagcaagagtgaaactccatctcaaaaaaaaaaagaaaaattcaaaagggtctatgtaggcattttatgctacaattgggggaggagttaacacctaaccatatttcatttggcacttatttataacatgtattgtaaagtaaatagttattttagaaattgaggacattttggtactattgctaaacctggggaacatataattagtaataataataattgcctgtgtagcatagactctaggctaattactgtatgtttgctgtctcattcagtccccagtcctcagaacagccctcggagagagtgactatctttatgtccagtttatataccagcaaactggtgcttggagatgttagattactttcccaagcagaatgctttcgagagttcatatggccaacaactgtgctcttcatcaactctagctgttttattggtaaatttcttggacctgtatcccacttctttaaggtgctttcctcatttctgtgtataccaacatctcctcctcccagcttatcctgatattcactgtgactctttctgctccttagttcagacacactcaaatgttgctatttaaatggtgctttgttggtgtgttacaccatcttcactagctcccaagctacctgggggctgagatcatgtcatattagttcatcttcttctttcctgatctctctctctttttttttttttttttttttttttttttttgagacggagtctgctgtctcccaggctggagttcagtggcacaatctcggctcactgcaagctctgcctcccgggttctcgccattctcctgcctcagcctccccagtagctgggactacaggcgcccgccaccacgcccagctaattttttgtatttttagtggagacggggtttcaccatgttagccaggattgtctcaatctcctgacctcgtgatccacccacctcggcctcccaaagtgctgggattacaggcgtaagccactgcgccctgccctttcctgatctctctaagtagcagatattcgttagacaattattaaatacatgttatgtcactggaggttataacacttgttattctagctgaaagaatgaaaaaattactaattagggcattttaaaaaccaaccaacttattttgctattaaaatctgatattctcagtgaaacagttttcagacactagagtttatggctcaagattattttgttattaggagaaataaatttaaaagaacctacaagcttgatggcccatatgtaatgaaatatacatttcgtaaatcatttcattgtcaatctctgcttagtcaacctcgtcttgccagtagttaatggcaagtctattaactctactaagaagtaatgatttgaaaaatgaagattgattgagctgcagtatcttcagataaccatttatcatcactaattacacttctgactttgtaactatttcaaggtaatttataggaactaaattcattattcacaaaaaccaatgacagatgtcaaggatagagggttacagcccagcaggtctcactaatcagcatttcctttctccagcttgcctgttgctcaatttatgcccgatctccatgatcttaggtaagcattattcatagtaagtcttaacagagaaagaaatctgaaggcagttttcagaaaatcacaaacaacctctaccgttcagctctttcaaataaaatatcaaaagtaagtttccttgctttacttcagttagaagaatttttccaaggtattatcaatgaaacaggtcacagtgctctttgagttacctaagcgggcagctaagctccccgttgcatcattaatgacatacacagtgagatgtcccttttaagagctgctatttaatcactcataaaatgattgtttctttctgtatcttatatagtgaaaagtaattgtcttcagtggaacaccaaagcaggtggctttttgatgggctagaatccagtcttttgccgttcacacccctacttctgtggagtctactttggtggaggttttaaaaggtcatggctttatatatattacaccctaagtgttgcttttgtatgtgttcaacttgccacttagtaagtcaccatatctagattgtatctgctaaattaaatcaattcgatatgcaaagatgtcacaggtttgacctactgaaatgtgagtgtgtatgtgtgtgtaatttaaaaaaaatctttattagattggagtgtattttttaaaagcacaaaatatatggaggagatctaattttgttcacaagaatagtacacatgaaaatatatctccctgctacagacagaagtcatgccttttattttattttattttattttattttatttatttatttattttttgaggatggcacgggggaaaattgtgcaagaacagttaatcccagagaaaatatctctgttggaacactagcaaggtcagtgttcccttagttattcactgtcaaatgtcagtctgattgcaaataatagattagtcttgtatgttgaaggtctctgaatatctctgtatctcaaagttgttctcgactctgtatgatctagacttcaagagcagatgccaaagcagtggatgtctcttaaaaccacttttgctgaaaagaggattcccccttttatgtgtccctagaaaaaggtattgggtaatgctgctgacaccgtgattttgtacttctggcctccagaactgtgagaataaatttctgttgttttaagtcaccaagcttttggtaatttgttatggcagtgttaggaaactactacaggtcagtaacattgtctttataaataaagtgtctataagcatcacctccaccatctgatatccaaagactcctctgaggatggctactttatcaagaattggtgccaaaaattaaaaatcaacttctcctcttaaggattcatgacatgaaacctaaaataaaatgtttatagactgggcgcagtggctcacgcctgtaatcccagcactttagggggctgaggtgggcggatcatgaggtcaggagttcaagaccagcctggccaatatggtgaaaccctgtctccactaaaaatacaaaaattagccgggtgtggtagcgcacgcccatagtcccagctactcaggaggctgaggcaggagaattgcttgaacccaggctggtgtgcagtggcacgatctcggctcactgcaagctctgcctcccaggttcacgccattctcctgcctcagcctcctgagtagctgggactacaggcgcctgacactacgccaggctaattttttgtatttttagtagagattaggtttcaccgtgttaaccaggatggtcttgatctcctgacctcgcgatccacccgcctcagactcccaaagtgctgggattacaggcgtgagccactgtgcccagactggttaactcttattcatcatggatgacttgggtcaaatgtaacttctgtaaagccttctctgacctcacaccctgcttcatattcccactggaccattataccagttcatgtttgtatgttgcctctcccactagtctgtaactccttgaaaccggaaacctctcttattaaaaatgaaaagttcagtctctggaaacaga

SEQ ID NO: 820 - DNA, 1200 bp, Homo sapiens
  misc_feature (1)..(1200): DMR5:68263801
cctcttgcctttcttgcctttatttttctctgcaattccacacacaggtcattgctttcccttcctctccctttttgatcatggatgcttcaactcccttcatatatttgttaagcatattttactaagatttcattttgtgatgcttgcaaatatacattacaaaatatatatttttaaaaagtgatttgaagggccctctgtccatctgatgattaactagaagagtcttttgtaccttgctaaaagtgataagttagccagctatatttagctggataaaacccattacatccttggggaagaatgtgctttgtttagctttatgagaaaatatttaataaatgctgtcttgaaaatatttagcctggctgagtgagctggcaaggcttcaatactgataaagcagaggtgatggtgaaaagctggcctgccagtccaagctcaagttaaaaaaatgcacctcttgtcactaagggttgcaactgtcgccaagtgcttgtccatcagtgtcacgtaaagattttttaacctcacatatggcatcatgcagtttgtctgcctaaaaaggcaacctagattcacagagtggttacaattggctttgaagtcccatctgttctgtaaaatcctagctttatttcttactgctggtatgactttaggtaacttgtttaatttttcttaatctcagttttctcatctgtaaaatggggacagtgataatttcttagagcgttgtacagattaaatgagattaaacgctgagcagagtttcttacactaagtgttcactacatgggaattaatcagcagtagtagtgatttgtaatcagcctaacattttctgtccctccctaactcctcccaccccacaggagatacaaagagcaaagtcctcttgaatgtggcgaggtaggaaaggctctggcatgggcatcaggaggcctgggtcctcggcttgaacttcctgtgggaccttgggcaagttgtggctcacataatccctccccactcatcagtacacagtgcacagggcagcagagctcctggctgctagtctctcttttgatacctaattcgttgtggtatcagaccaaatttgatatgatagctagacccgccggtccgtcagtatcatttggggtctggtgtaagatcagcctgtgaaactcaggcatgtaggcaacaagttatcag

SEQ ID NO: 821 - DNA, 2700 bp, Homo sapiens
  misc_feature (1)..(2700): DMR5:69052901
aagtttaaacaaaaaaaactaatcacacataagcactctacccaaagattataattgtcaacattccagtgtatcttcttctacattagatttgcagtgagccatgattgcaccactgcactccactgtatgtactttcaaacatacagcaaagttcaaagaactttagaatgaattacaatggggccaggtgcggtggctcacgcctgtaatcccagaactttgggaggccaaggagggtggatcatgaggtcaggagtttgagaccagcctggccaacatggtggcaccctgtctctactgaaaatacaaaaaaaaaaaaaaattagctaggcatggtggtgtgcgcctgtaatcccagctactcgggaggctgaggcacgagaatcgcttgaatcctggaggtggaggttgcagtgagccaagatcgagccactgcactccagcctgggcgacagggcaagactgcatctcgggggaaaaaaaaaaaaaaaaaagaatgaattacaataaacatccatccacatacccatgacctagattctattaacataatattatacttgttttgtcacacctgttcatctacccattaatggctccatcatatatatttttaacccagaagccccactcacactgctacatattttttgatgcattttaatttttgtttttctttttgagacagggtctcattctgtcacccaggctggagtgcagtggtgcaataatggctcactgcagcctcgaactcccgggctcaggtgatccttccacctcagcttcccaagtagtttggactacagttaggtgccaccatacctggctaactttttttattttttgtagagacagggatctcactctgttgcccaggctgatcttgaactcttggcatcagtgatcatcctgccttggactcccaaagtgttgggatttacaggtgtgagcaactgtgcccagcctgatttgtcaattttttaatgtgttagtatgaaatttcttagaaaaaaattccttacacaggttgggttctccaggagcacagtgatttgggatctgcatgcaatatatttattcaaaatcaacacccatagaaggaagggagaaggaagcaggattgggcagatggaaaagtggaacgccagtgcaggcctggtgaagtctcagccataggatgtgctacggagtatgtatgatggaacagaattgctgtgcattaagacaaaataaccaggccttgtaacatggcttcaatcagtcattggttgtgggctaccccaggaagctgaggcaagccctgaagaagctgacagttgggggctgtgagctaacaaccagacaagctccccctggaagtgggatccatgacacacatctctgtgtccaccacggcatattttgttttgatttgcatttctttcactattagtgaagttttaaaatatttatagattaaaatgcatattgaatcatgtttaaaacactttcaatctaatgtacaaccccttccccaacaaggggccgctgaattattccattctttgaagtgccttcaagccctagtgcagtttaggcaggaaagatagtgatgaggttggatagggagggaaggatagaacccaattgagaagagaggttggaactttatgtactggcaataagacagtcacctaatgtcgctgaatagggggatgtcatgatgaaattctggcctatcacagtgattctagcaaaagatgtcagcaccacaatccagccttaaacaacacccagacaactcttcttgagcaagacttgacgtttctgactttctgagagtttgacctttcagagttcttccatatccaattctcactggaaaaccacccaaccatggtgaataagttaaggttaaagattatggtaagcagcactgggcacagtggctcacgcttgtaatcccagcactttgggaggctgaggcgggcggatcacgaggtcaggagttcaagaccagcctcaccaacatggtgaaaccccatctctaataaaaatacaaaaattagccaggtgtgatggtgggcacctgtaatcccagctactcaggaggctgaggcaggagaatcacttgaacccaggaggcgaagcctgcagtgagccgagatcgtgccattgcactcaagcctgggtgacagagtgagactccgtctcaaaaaaaaaaaaaaaaaaaaaaaaagattatggtaagcagcaacaagcgatggatcagaaaataaataagacatgtccgggcgtgacggcccacacctgtaaccccagcactttgggagaccaaggcaggccaattacctgaagtcaggagttcaagaccacgctggccaacatggcaaaaccctgtctctaccaaaaatacaaaaattagctgggcgtggtggcaggtgcctataatcccagctattcaggaggctgaggcaggagaatcacttgaacccaggaggcagaagttgcagtgaaccaagatctcagcattgcactgaagcctgggcaatagagcaagactatctcaaaaaaaaaagaagagaagagaagagaagagagaaagaaaggaaggaagaaagaaagaaagaaagaaagaaaagaaagaaagaaaaagaggaaaaagaagaaaacagtgtagaagctatacctgaacatggtccaggcaagaaccccaca

SEQ ID NO: 822 - DNA, 1900 bp, Homo sapiens
  misc_feature (1)..(1900): DMR5:69073901
cagtggtgagatctcagctcactgcaacctctgcctcttgggttcaagcgattctcctgcctcagcctcctggatagctgggactacaggcacacgccaccatgcccagctaatttttgtatttttagtagagacagggtttcaccatattggccaggctggcctcttggccaggctggtctcgaactcctgtcctcgtgatccgcctgcctcagcctcccaaagtgctgggattacaggagtgagtcaccacgcccagcccttgggttctattttttaattacatatgaaattttagtattaaagagccagaaggagcttgaaaagtctagttcctcaagtcttttcgtcatacatgtttacattaggatgaagaatagaaaggggctgagtactgtgagaagccaggaaatgaggtcccatgaagagagacatgttttccaaggaaaaggacaagggaagtccactcaccatggaagaaagtgccacagggcatgctagaaaggccaaggacagcagagggatggatggaggtgggggatacaggttgctgccaggcagtggatgtgagatgggccccaccctattttgcacctcaggcctgccaagccgggatccttctgcccagccaggctctgggcaaggaagaggggttctgggaggaagtcccaaactcgaagggtgaaggaagatggcagtgccgaggctttgggaagggagccagaggcaggaattggaattggggcctggtttccccatggcagatttcatccaggtccaggatctgccctctcttggcattgactggccaagccatggctcaggtattccacacctgggcccggaaccacatgccagaaaacccaacactgttcggccccagccggcaacttccagcagccaggagcaaacaggacttgtgaaggaggcagtggatctccagagcccagcagcagggaggctactttccgggagagggcagcagcacaggagaaggccctgccgcctacaggggtcctactccactccgggaccctgcccatctgtggccatcctcccaccagcagcctgtcacctcccatccctcccgctggtgacaggcaccggggtaccgtgcccagcccccgggcacctccacagggctgccatgtggcagaggaagccggtgaactgacgcttggctgcagccaggcaggcctaagctctgttgccccgccgcatcccagctacacccacaggcctggatgccaaccagctggcgtcagtgcccgcggtgccttccagcacccgcctgtcctggaggagctgcacctgtcccctaatatcttcacccgcctcttaggggcagccttctcggccctggcgtgcatggtgcaccacctccacctctctgaaaagctggcctgggtgcccgtggaggccttcgtggggctgcagatccaagtgaaccaatccgccaacccgtgaaactgggactgtgccctccagggagtgctcaggctggtgaggctggcgccgggcaccaggacaggcatcgtgtgtgaccccagaacccgaccagacctcggtggggcaggagctcctgccgctggcaggggaggaagagctgtgtgggtcggggcagggcccagaggagcaccaaggtggcccctgccgttgaggggtggctgacctggtgcattatgtatggtagaaccgagatgaaacctggcgcaccctcaagcggcccctgttgccagtgcacccagaggatgactccaccctcagcacagtggtctaagggtgctcctggggccacaccacacactcctcctcctacgccctctcccttcctctgaccccccgccttctcccttcctctgaccccctcggcttcctgtgcagcctcaccccagccccc

SEQ ID NO: 823 - DNA, 300 bp, Homo sapiens
  misc_feature (1)..(300): DMR5:69873801
atgaattgttattttaaagaacatccacaattttgcctgactgggcatgggaatacatgcccatctttggactgaatgtccatttttcccttctttgatttatcaaaatattggttaaatgatcaggactaccgtcagaaggaattttatatctaaaaatagtttaccttctatggatgtaaaaaatagttgtagtagttctggcttttatattattcgatgtttcaaagcggttttttttttccatcaccatattctacgttcttgaaaagtactcgttcatgtgactgctatcattta

SEQ ID NO: 824 - DNA, 6800 bp, Homo sapiens
  misc_feature (1)..(6800): DMR5:69910601
gcccccatctggtagccctggcttcagcaggagcccaggacaggtgaacgggcaggtgtggtcctctgagctttctgatgtttcccacccttggtgggaggcccagattttttatttatttatttatttatttatttgtttgtttgtttgtttgtttgtttgtttttgtgatggtctcactctgtcacccaggctggaatgcaatggcctgatcacagctcactgcagctttgagctgcaatcctcctaccttggcctcctgagtagctgggactacaggcacatgccaccatgcctggctaattaaaaaaattttttttgtaggccgggcatggtggctcacacctgtaatcccagcacttcgggaggctgacgcgggcagatcactttaggccaggagttggagaccagcctggccaacatggtgaaaccccgtctctactaaaatatgaaaatttgcagggcatgatggtgcacgtctgtaatcccagctactcgggaggctgaggcaggggaattgcttgaacccaggaggcaggggccgcggtgaattgagatcatgccgcagcactctatcctgggtgacagagtgagactgtctcaaaaaaaaaaactcctttttatagagttggggtcttactaggttgcccaggctggtcttgaactcctggactcaggtgatcctcctgccttagcctcccaaggtgtagggattccaggcatgagccacctcgtctggtcaaggagaaggcctgattttgaagggcaggtcccagggtcagccagtgaagggcagagcctctgattgctgcttctctgcaggcccagtggcgacttctggggtgcatgcacgaggggtcttcctgctgtagggcaggccagatggggctcaggctgtcggggcgctcacacctggcgctttggctgtcgtaggtgcggctgactgcacagaagtcactggggcctttgacttctacacactccctgtggggctccgcactgtgcccgtcaccgagagccagtgggtgagagccagtttcatttgcggtagaggcagcagaggttgtagaaatgctccttgaggcagatgccacaccccaatttcatggagtgatttgggctgagccgagtctgcagcaggcagaaggctctgagatgttgtcctagcctgggcaaaggacaattcagagctcgggggaataggggtgtgctcagcacgactgggtggacaggccgtttgttgtgaatcgtacaggcttccaggagcgggtgcctgaggcttccagacaggctttgggaggtggccagaggagatgcctgtttccggggcaggaaatggagggagggcccaggctggagaggttcagccaggctgtcacaaggctttgaagcttcccatctgagagcctggctattggagagtgtgggtttggaacttgaggctaggaggttctattctgtcctgtgccagccacagccttcggatgggcagagcaatgatggggggaagatgtaaaagaaaagaactgaggaaagaagaagaaaaccagcttcaacaacggtctaggccggatgcggtgggtcacgcctgtaatcccagcagtttgggaggctgaggtgggtggatcacccgaggtcaggagttcgagaccagcctggtcaacaggtagtgaatcctgtctctactaaaaatacaaaaattagctgggcatggtggtggacgtctgtaatgccagctaccaggtaggctgaggcaggagaatcgcctcaggtgaaccaggaggcagagattgcaatgagctgagataatgccactgcattccagcctgggctacagaatgagactctgtatctcaacaaaacaaaacaaaacaaaaacacaacagtctgttctgtggaggccttgggcagatgctgggagctctgagcacggactggtccctctgttgggagcctcttcccttcatccctcctggttaacttgactcagcataaaggccatttcttctaagagcctgtccctgactctccaatcggggatgtgtctgttgtctcatagagtgcccaattcctgccaccacttgtcatttccattcgcaacatttctttcattgtttgtttttcagagtcagggtctcactctgttgcccaggctggagtgcagtggtgcaatcatagctcgttgccatctcgacctcctgggcttaagcgatcctccccactcagcctcccaaatagctgggaccacagacgtgcgctgccttgccaggctaaattttaatattttttttttccccacgagtcagagtcttgctctgtctcccaggctggagagcagtgttgcgatcttggctcactgcatcctctacctcctgggtacaaacagttctcctgcctcaccctcccgagtagctgggattacaggctcacgccaccatgcccagctagttttcttctttatttttttttgagatggggtttcaccatgttggccaggctggtcttgaactcttgagctcgtgatccacctgccttggcctcccaaagtgctcacaggcttgagccaccatgcccggccctaatttttaaatttgttgtagaaacaaggtcttgctatgttgtccaggctggtctcaagcgcctggtctcaagtaagcctcccaaagtgctggggttctaggcgtgagccacctcgcctggcacttgcaccgtttttctgtgcatgcatctccactcccactgcccaggacctgtggacttagatttgagtcattactgagcacctagcacccagcctcatgcctacctcccacctcgcactacctgtttgcttgatgcattaataaatattccacctgaatccacagcccattcactcctgtgttcaagagctatttcaggaagtgaacctcatttctggcagtgttcagtccagtgacctcagctctgtgtacccggcagggtggctacgcctctgggggagttggattcaggggtgggggagaaagagtgttgttagagagctcggtctaggactagaggaacgtgcccttatgtaaaatacatctcaagttagggaagaaagcagcggctctgtgctttgtttttttttttttttttccttttttttctttctttttttttttttgtttgtttgtttgtttgtttgttttggggcagggtcttgctctgtggcccaggctggagtgcagtagcgtgatttcggctcactgcaacctccacctcccgggttcaagcaattcttgtgcctcagcctcccgagtagctggagttacagatgcgtgccactatgcctggctaatttttgtatatttagtagaaatggggttttgccatgttggccaggcggttcttgaacccctgacctcagtgatctgcctgtctcagcctcctgaagtgctgggattacaggcgtgagccatcgtgcctggcccccagttgtgttctggcaggggaagatgggacagagaggatgggagggtgtctgagcctttcccggactgacggaacctgtgtcttctctcttttgtggacaggatggtgattgctcacaccaaagccttggacccctcccagcctgtgacctttgtgaccaactccacctacgcagcagacaagggggtgagcctgggggtccccaccccatttctccctgcctttgcctgggcttgtcctgaagcctgctcatgggaacagctggaaagaaccatgtgctgccagtctgagctttttattttgttttacttagaaagatagagacagggtcttgccatgttgcccaggctggtctcgaactcctgggctcaagtgatcctcctgcctcggccttccaaagggctggggttacaggcgtgtgccaccgcactcagccgcagccagtctgttttcaaagatggtctttgggttaatgacaattctctctctgcttactctccaggcagtgtggctttctgaatccaaggaggctgggcatagggagatgggatttgtttgcccggtttggactcagcattttttgtactcgatttaatagactcataaaatgtcaaaggtttaagtgagcttagagttcatctggcccaaacctggctgatcagaatctccaggggaagttttattgaaatgccagatctctgcgttctgagatcctgatttagtaactccagggttggaacctgagttttttgtttttttgtgtgtgtgtgtgaaggcaaggtcttactctgttgctctggctggagtgcagtggtgtgatcacagctcactgcagccttgaattcctgggcctaagcaaccctcttgcctcagccttccaagtagctgggactccgggtgtacaccactgtgcccggctaattttaaatgtttttgtagagatgggatctcactatgttgcccaggccagtctcaaactcttgagctcaagtgatcctcctgccttagcctcctaaagtgctgggattacaggcatgagccaccgtgcctggctgatactagcattcttttttattttttattatttttttaagatagagtcttgctctgttgcccaggctggagtgcagtggcacagtctcagctcagtgcaacctccgcctcccaggttcaagcaattctcctgcctcagcctcccaagtagctgggataacaggcacatgccaccacgcctgcgcttgatcgtgggaggcagaggttgcattattgtgccactccattctagcctgggcaacagagcgagactctgtcttccaaacaaagcggaaaaagattatctgcgagaatgactgcattggccccttgggtgggagggcttctccagggcaaggtgaggggatgcccagtgctgggagtgctgcctggagaggagtcagttccagtggcgggggccctgggttttggctgaggactgcgtgttggcagctgctctgcctctcacagcccttcccagctgcacacgtcgtgagcgtcagtgtgcaatcacaggcctgcctcctttgggccactttgtgaccatgttttttgcttgtggggcagggtaatttcaggatctaaattggtgcagttggatgttctcagccccgagaggcagctcttcccgttgtaggctttttgttttgttttgtagaaatggagtcctacgatgttgcccaggctggtctcaaactcctgggctcaagtgatcctcccaccttggcctcccaatgtgctgggattacaggcatgagccactgtgccgtgctgattttcttgatactattttttgtagagctggggtcttgctgtgttgcccaggctggtctcgaactcctggccacaagccaccctcctgcctcagcctcccagagtgctgggattacatccccttcttaccttctctgtcagaggagcccccacagcatgtgagtactgagtcatgcggtcttgtggttgctgaacgggctctgctgctctggtcctaggctctgtatgtggatgtgatccgtgtgaacagctactactcttggtatcgcaactacgggcacctggagttgattcagctgcagctggccgcccagtttgagaattggtgtaagacatcacaatcccattattcagagcgcgtatggagtggaaacgcttgtaaggcttcaccaggtaagcggtgttgaactttctgcttgtgtattctctctgggcagagatgccacttgcctcccccaccctgccctgcgcccactgcagtgctccccttgcttcagctttgggctcacctcccgctaccctgtccacgttcccttctcaccagcagccaggcctctgccccactcgcttggtcctcaaaggtggactccttactggccttgtttccagacagcctcctatcacccgtgcccaagtggtctttctaagaaatccaaatttttatgtgtttttgagaccgcctctctctctgtcacccaagctggagtgcggtggtgcgatcactgctccctgcagccttaacctcctgggcccaagcgatcttcccacctcagcctcctgagtatctgggaccataggcacaggccaccatgcctggctaatgtttttacttttgtagagatggggcgttgttgtgttccccgggctggtcttgaattcctgggatcaagtgaccctcctgcctcaggctcacaaagcgctgggatttacaggtgtgagccactgtgcccggccacaaatcaaaatttttgagtcctgtcattggctcccccaggcccataggacaaagtcctaacccctagtcaggacactcagtgtcctctgctctctcctgggttttcatcctcttctcttctcactcctggccactgatctgtttccactgccctcatttgctctcctgctcttgcttgagctattctttctgcctggaatgcccaagttggcaccataatcaccaactaaaagatccttttctttttatttttttagagatagggtcttgctatgttgcccaggctggtctcaaactcctggactcaattgatctttttgccttggcctcccaaagttctgggattaacaggtgtgatccactgtgctagcctttttttattttttatttttttcctgacagggtcttgttctgttgcccaggctggagtgtggtggtgtcatcatagctcactgcagcctcgaactcctgggctgaagcaattctcctgcctcagcctcctgagtagctgggactacaggcgtgcaccaccatgtgcagcctagttttaaaatattttgtagagatgagtctcgctatcagg

SEQ ID NO: 825 - DNA, 2100 bp, Homo sapiens
  misc_feature (1)..(2100): DMR5:70497401
gaggctgaggcacaagaattgcttgaacccgggaggtggaggttgcagtgagccgaaatcacgctactgcactccagcctgggccacagagcaagaccctgccccaaaacaaacaaacaaacaaacaaacaaacaaacaaaaaaaaagaaagaaagaaaagaaaaaaaaaaaaaaaaaacaaagcacagagccgctgctttcttccctaacttgagatgtattttacataagggcacgttcctctagtcctagaccgagctctctaacaacactctttctcccccacccctgaatccaactcccccagaggcgtagccaccctgccgggtacacagagctgaggtcactggactgaacactgccagaaatgaggttcacttcctgaaatagctcttgaacacaggagtgaatgggctgtggattcaggtggaatatttattaatgcatcaagcaaacaggtagtgcgaggtgggagggaggcatgaggctgggtgctaggtgctcagtaatgactcaaatctaagtccacaggtcctgggcagtgggagtggagatgcatgcacagaaaaacggtgcaagtgccaggcgaggtggctcaagcctagaaccccagcactttgggaggcttacttgagaccaggcgcttgagaccagcctggacaacatagcaagaccttgtttctacaacaaatttaaaaattagggccgggcatggtggctcaagcctgtgagcactttgggaggccaaggcaggtggatcacgagctcaagagttcgagaccagcctggccaacatggtgaaaccccatctcaacaaaaaataaagaagaaaactagctgggcatggtggcgtgagcctgtaatcccagctactcgggagggtgaggcaggagaactgtttgtacccaggaggtagaggatgcagtgagccaagatcgcaacactgctctccagcctgggagacagagcaagactctgactcgtggggaaaaaaaaatattaaaatttagcctggcaaggcagcgcacgtctgtggtctcagctatttgggaggctgagtggggaggatcgcttaagcccaggaggtcgagatggcaacgagctatgattgcaccactgcactccagcctgggcaacagagtgagaccctgactctgaaaaacaaacaatgaaagaaatgttgcgaatggaaatgacaagtggtggcaggaattgggcactctatgagacaacagacacatccccgattggagagtcagggacaggctcttagaagaaatggcctttatgctgagtcaagttaaccaggagggatgaagggaagaggctcccaacagagggaccagtccgtgctcagagctcccagcatctgcccaaggcctccacagaacagactgttgtgtttttgttttgttttgttttgttgagatacagagtctcattctgtagcccaggctggaatgcagtggcattatctcagctcattgcaatctctgcctcctggttcacctgaggcgattctcctgcctcagcctacctggtagctgggattacagacgtccaccaccatgcccagctaatttttgtatttttagtagagacaggattcactacctgttgaccaggctggtctcgaactcctgacctcgggtgatccacccacctcagcctcccaaactgctgggattacaggcgtgacccaccgcatccggcctagaccgttgttgaagctggttttcttcttctttcctcagttcttttcttttacatcttccccccatcattgctctgcccatccgaaggctgtggctggcacaggacagaatagaacctcctagcctcaagttccaaacccacactctccaatagccaggctctcagatgggaagcttcaaagccttgtgacagcctggctgaacctctccagcctgggccctccctccatttcctgccccggaaacaggcatctcctctggccacctcccaaagcctgtctggaagcctcaggcacccgctcctggaagcctgtacgattcacaacaaacggcctgtccacccagtcgtgctgagcacacccctattcccccgagctctgaatt

SEQ ID NO: 826 - DNA, 1200 bp, Homo sapiens
  misc_feature (1)..(1200): DMR5:70764401
tgcttttagtctccgttacatggagtatcttttttcacccatttactttaaatctgtatgtgtctttacttttcagtctgtatgtgtctatatgtttcttgtaagcataatatttttggatcattttttagttcgttccatcaatctacctttctttttttttttttttttacttttagatggagtttcactctgtcatccagagtggagtgcagtggcgcaatcttggctcactgcaaactccgtcttgcaggttcaagcgattctcctgcttcagcctcccaagtagatgggattacaggtgccggccaccacgcctggctaatttttgtatttttaatggagatagggtttcactatgttggccagcctggcctcgaactcctgacctcgtgatccacccacctcggcctcccaaagtgctgggattacaggtgtgagcaactgcacctggcccaatatctatcaatctatatattttaagtggaatgtttaattcatttacattcaaggttaatgttaatacatgaggttttctttctgccatattgctgtttgttttctacttgttttataagttccttggggttattttgttgttgttttttgtttttctttctgtgtgtctctttgtctttgtggtttggtggaaatctgttgtgttgctatttgattgctcgtcctactttgtgtgactgttttacaagacctatgagtttgctactttcatgtgttttgatgatgatgatgaatgttgacctttcatttttgtgtttgggacacctttgagtatttctcataggactcgtttggtggtgacgaattccctcagtgtgtgcttgtctggaaaatactttgaatcatttcaagaaaattagcagtgagttatgtcaatcaagccattggtttgtatttggtggcacatttactctgtattatttcacactagaaccatctgagttaagttttattatttgctatatgttgcagatgaagaaactgaagctgagagaggtttagtgaatgactgaaaaggttgtcaggctgcagggaaaaaaacaaaacaaaactgtacgactagcctgcaatgcttcccaaagtatgtagcttattattattggtcactttttgagtacaaaatgctgtgctatgtaacaaaataatacaatgtacatatgtataaaagttaacatatacata

SEQ ID NO: 827 - DNA, 1700 bp, Homo sapiens
  misc_feature (1)..(1700): DMR5:71385101
taattttcccctcagaagcaattccaagactgaagattaaatatacagagaagcaatgattcaggcttttaaaaaaatcgctttttaaaggagtataagtgaaaacagttaagtaaatatatttaattaccaagattttattgtatcttttactcacataaaaagactaaaataaaacgtttctggttttcacagtaactgatctgataatgtcaacttttgaaaacagatagttatgactcaaggctttgagaatgtaaagagacgcccttcacatgttgagaaatggcacgatttcacgttatcagtgcagttcggttctcagggggaaaggtaagcccatagctaactccagctccaagctgctatttcatgataacagctcacggagctgtgggcctgctaagcctttcccacctcgttctggaattcctctatagcccatccgtactaccaggagactggatccgcaaagtagacacttggtctcatgaagccactgctgggctccagagagaaggaaaaactaagcggttttaaaacccccgccctccttggtttacctccatcattaaaaaacaacaatgacaacgacaacaaaaaacaaaactaaaacgacttattgtttattaattatgttgtggcagacaatatgctgaacattaggcataattaaattctttttaaaaattgataatttatctctgttttatagaagtgtgaaactgtcaggaagacagatgaaatgatttgcctgaggccgtatcatcaaacaagaaattcatattcacctttctggaattcttaggataatgattacatgtgttcaattgttaaaaattggcagataaaattttatgtatttaccacgtacaacatgaaattttgaaacatgtatacattctggaatgactaaatccagctaattaacataggtattgtctcacatatttacttttgtggtgagaacagttaatatccactctcaacattttccaagaatacaatatattactaactatagtcaccatgttgtaaaacggatctcttcaagtattcctcctatataattgaaattttgtatccttggaccaacgtctcctcaccctactcactcctcaaatatccctacccttggaaaccactgttctcctctctctacttctaggatatcagctttcaagagtgagatcttgtggcatttgtctctctgttcctagcttatttcacttaacataacgtcctctaggttcatccatgtgcaaccccctaggttcatgtccttttttaaggtttaatagttttctgttgtgtacatatgccacaatttatttacccatccacttcttgatggatgcttcaattgtttctgtacttgagctattgaggacgatgctccagtgaacattggagcaccgatatttttacagggtggtgatttatttttctctggatatatatacccagaagagaaagtgctgggtcatacgatagttcttttcttttcgtttttttcttttcttttcttttcttttttttcagaaacctccatactgttttccacagtggctgcaccaatctatattcccaaattaaacttcaatgtgcagatgaattacctaaaattctttataaattgcaaatgctggtttagaaggtgtgctgattttgatgcatttttaagacccccctcccatccc

SEQ ID NO: 828 - DNA, 300 bp, Homo sapiens
  misc_feature (1)..(300): DMR5:74674101
aattacaacattattattcatgtgagtctggcacattcttatagcaatttaattggctataggccatgtttctttttgagaagggtacatttgacattttttaacagagggtgtaataatcattggttgtttgtcatttggtctaaacaaactagaacaaaggggaagttaaatctataacaagagtccaaggtcatcaattaagaagaaaggaggttttcagccaggcgtggtggctcaagcctgtaatcccggcactttgggaggccgaggcgggcagatcacaaggtcaggagatcg

SEQ ID NO: 829 - DNA, 2100 bp, Homo sapiens
  misc_feature (1)..(2100): DMR5:74772001
ttttgcaaaatcccttcaaagagactgaactattctcccagttagatacacagcctcaaaaaaacaaagtatcagagagaggaaagttgcaacatgccataatcctagtgttcaacctgagtaattttttttttttttttttgggacggagtctccctctgtatcccaggcgggagtgcagtggcacgatctcggctcactgcaagctccgcctcccgggttctcgccattctcctgcctcagcctcccgagtagctgggactataggtgcccgctaccacgcccggctaatttttttgtatttttttgtagagacggggtttcaccgtgttagccaggatggtctcgatctccgtgatccgcccgccttagcctcccaaagtgttggaattacaggcatgagccaccgtgcccggccaacgtgagtaatttttaatagattaaaatattggcaaatagcctgtttctgtaaataaaattttaatggaacacagtcatgcctgttcatttacatattgcataacccctacccctagaattgagcagttgcaacagaggccatatggcctgacaaagcctaaagtgtttacctattgggttctttacacaaaatgtttgcccaccccggattatatcatggactcgacttgttttggtttcatattcatagtctgaatatattttggtagccttaacagttctacagggagagaatatacaagtcaggctattctaggttttctgtagtttcacagatttgtcattataatcagatggcatcctgaatggtgtcagtttcttacaagcttgattaatgagtctgttactaagaaactgatttagtgattttttccccccatccccatgcacacaaaaatgaagactgcaaaatgttgtgacgtttaaagtactacaccctaaaagaccttattaggtgactgggtgactccataaccagtttctgtaacaaagactcctctgggtctcctccagtctcatattgccatcaacctaaagaaagctgacagtccactccttttttcatcatggaaggtagccgagttatataaagacttggaatcaggatattaaggtttgagtctgtttaccactcaccatttaatctggaaacaagtcatttaacctgctgatccttgttacatcatttgaaaacagaggagaggggatgtgtttgttgtgaggttattgtgtttaagtgagccagttgtgagctagcatagtggcctggtatatataaagtccttagtaagtctaagtgtagatgactagacagtaaaaatctgggtatgttgctaggtagctattacagggtgaaaaaaaaaaaaacttttcagaggctagctgtggtggcctgtaatcccagcactttgggaggctgaggtgggtggatacgttgagagcccaggagtccaagaccagcaggcaacatggcgaaaccccatctctaccaaaaaaaaaaaaaaaaaaaataagctaggcatggtggtgcgtgcctgtagtcccagctactcaggagcctgaggtgggaggatgtcttgagcccaagaagtccaagctgcagtgagccaagatcacgccactgcactctggcgtgggcaactgggcaagaccctgtctcaaaagaaaaagaaattcttaagtatttgtgtgggtgttttccccacatatttatactgtaaccatcagctttttactctgtaaaacatattttgttagcttctttaagatgacattattcaaccatagttttttggagatggttgaaaaagataagcgaaaacgaccactactcatcactgttaacattttggacgtaaacattcttatgttgtgtttgacttactagggcttgcgtttcaagaaagcccatgtaacacatcctgaactgaaagccaccttttgcctaccaatacttggtgtaaagaagaatccctcatccccactgtatacaactttgggtgttattaccaaaggtactgtcattgaagtaaatgtgagcgaattgggccttgtgacacaaggaggcaaagttatttggggtaagtgaatttttgaatacagggctgctgtgttctgcag

SEQ ID NO: 830 - DNA, 300 bp, Homo sapiens
  misc_feature (1)..(300): DMR5:76420301
ttcagtggacagttttgtggtattaagtacattcacattgttgtataaccatcatcacgatctatctttggaactttttttttttttttttttgagacagagtctcacactgtcacccaggctggagtgcactggcatgatctcggctcactgcaatctccgcctcccgggttcaagtgattctcctgcctcagcctcccaagtagctgggattacaggtgcctgccaccacgcccggctaattttttggatttttagtatagatggggtttcactatgttggccaggctggtctcgaac

SEQ ID NO: 831 - DNA, 400 bp, Homo sapiens
  misc_feature (1)..(400): DMR5:76647501
ttgtggtagtgaataagtctcatgagatggtttataaggggtttccacttttgcttctttctcattctctcttgctgccaccgtgtaagaagtgccttttgccttccaccatgattgtgaggcctccccagccacatggaactgtgagtccattaaacctgtttttcttcccagtctcaggtatgtctgtatcatcagcgtgaaaactgattaatacaggctctagtgaaagcctgctctctgtagccaaaggaccaagaaagaaacaggctagcaagacagaaataatttcagacagtaactgctctactctagccaaacaccacacacacacacacacacacacacacaaacgaaaaaaactgtaatgcctccacctaggcagcaaagcctgaatggc

SEQ ID NO: 832 - DNA, 700 bp, Homo sapiens
  misc_feature (1)..(700): DMR5:76649101
tgaaaacaaaagacaaagaaaatatttggaaaagcagtgagatagaaacaacttacctgtaagagggagacagttctaatgacagaggatttttcataacctaaggaggccagaaggaagtacaacatttttcgggggaatcaaaggctgaatgaggagtctagacttccaccctcctgtaacaaggcacccagacacttgtagaacctggagagaaaataactgtcaacatagaattttatatccagcaaaaataacctttaggaatgaaggagaaactaagagcacttgttaccagcaaacttccctcaaagaatgactacagatagctctctaaaccaaaaggaaatgaagaaagaagaaatttcggaacatcagaagggaagaaaggatagctagaagaataaaaatatgaataaatacatttttctactcttgagtttttaaagttgacagttgaagtgctgttgtggctctgaatgaagcctgcttcattctctgtggtttctctcaagggatggcgttcagtgtctgtggcttttccaggcacgtggtacaagctgtcgatggatctaccattctggggtctggaggacagtggccatctgctcacagctccactaggcaatgccccagtggggactctgtgtaggagctccaaccccacacttctcctccatactgccctagcagagattct

SEQ ID NO: 833 - DNA, 400 bp, Homo sapiens
  misc_feature (1)..(400): DMR5:77084201
ttccaacaataattctgatacctgtgtgatatggtttggctgtgtccccacccaaatctcatcctgaatcctactcccataattcccacgtgttgtgggatggaactggtgagagataattgaatcacgagcgcggtttctcccatactgttcttgtgctagtgaataaatctcacgagatctgatggttttataaacgagaagcccttttcgcttgaccctcattatagctcatgccgcagccaggtaagaagtgcctttcgccttccgccttccgccatgactgttaggcctccctagccacgtggaactttaagtccattaaacgtctttcttttataaattgcccagtcttgggtatgtctttatcagcagcgcgaaaacagattactaacacact

SEQ ID NO: 834 - DNA, 1300 bp, Homo sapiens
  misc_feature (1)..(1300): DMR5:77912901
tgaacccgagttttcctaacactttcaaaaagccctttcttaaacagagggagtccatgcctcccttttctttggaggcttctgtacagatcattttcaccccttttcttgccctttgcatagcactgaattttaaagggctgcttctcccagcctgattatcctcccggtggtggaaatgggagaggaatacaaagatgagtgggaagcgtgtgctttttaacacagaggaccgctagggagtcgcatcggtggggctttgacaaccgtaaagcgcttctggcaattatttccaaaaagaatggtacaaatggactgtcctgttacatcttgtctctttttgatggactggaaacaatatgaataaatgaaggaaaatccacatttctcgaaagcagagatcaagctaaaaggaattgccacctgcactgttcataaaacactggcattataagaattttacaccttctataaacattcaacacagaacgctaaaaagacttccgaaggcatttccaacaccataaattgccgccttgcagtgctggtttgagttttatttttctattttaaactaaataatggttcgtgccagttttttaatttatcagctgttctcagataccatatcttttggtttctatgcgggaagagttataattaggtatggaggaagcacggagaagctttaatttccagttttgaggatgcccgaatgcttgtgttttattggctgttctctccaaactcatatcagggataaccccaggaaccgcaggtctagactagtctctcctgatggttcttggaaagaaaggccctgccttcctctctgacctcagctcctgcaagctcccctttgaccccatcgctccagccatgctggcctttctcattcctcctggaacacggagttcattcctctcacttgcttccttctccatgggaggctcattcctagccatcctatggcttgctttttcttatcatgtcggtctccgctcaaatgtcacctcgcaagagaagtcttccttgaccacccactctgaagtaatgccgacctgcttgcccaaccatcagtactttccttcatcctatcatatggatgtcatgattcttgtgggggatgaagacattaaataaagaagcaaatggttgtattatcttacccgtttgcctctttatttactgtcttcataccctgtaagaatgcaagcttcccaatagcaaggacctcatctgtttacttgtggtgtttgacttcaacactgagcacagcacctgggacatttagaagctt

SEQ ID NO: 835 - DNA, 700 bp, Homo sapiens
  misc_feature (1)..(700): DMR5:79664101
aggtgtacataggttatatgcaaatacttcaccatttcatataagggactttagcatcccctggagccctggaaccagttgcctaggaataccaagggacaactgtacacacatatatatagcaactttttcattttaaaaattgacctaatgtaaggaagggatccatcaattacctgaaacaggctataaatgaatacttttgaaaagatttagccagccgtggtggctcatgcctgtaatcccagcactttgggaggccgaggcgggtggatcacaaggtaatgagatcgagatcatcctggccaacatggtcaaaccccgtctctactaaaaatacaaaaattagccgagtgtggaggcacgcgcctgtagtcccagctactccggaggctgaggcaggcgaattgcttgaacccaggaggcggaggttgcagtaagctgagatcacgtcactgcactccagcctgggtgacagagtctcactctgtctcaaaaaaaaaaaaaaaagaggttaacaaattttggtggagatattttttttaatggttataaaacattgttttaaagttggcactacctgaattttgaaaacgtagaaaaattaatttggaaataatacatgaaaattttcaggaggtaaccacactgtattgtataaatgtgcaataataatgatatgtggcatatactaaacagt

SEQ ID NO: 836 - DNA, 500 bp, Homo sapiens
  misc_feature (1)..(500): DMR5:81292901
gtgcctgtaatcccagctactcaggaggctgaggcaggagaatcacttgaagccgggagatggaggttgcactgagccaagattgcgccattgcactccagtctgggtgacagagcgagactccatccaaaaacaaaaaaaaacaaaaaaacaaaaaacaaaaaacaaagctgtcatcaaaaacctcctagaactgataaacaacttcagtaaagtttgaggatacaaaatcaatctataaaaacagtagcatttctatattccaataacattcaagttgaaagccaactcgagaatgcaatcccacgtacaacacatacacacacacacacagagagagagagagacagagagagagagagaagtacctaagaacatatctaaccaaggaggtgaaaggccactacaaggagaactacaaacacagatgatacaaacagatggaaaaacattccatgctcagattggaagaatcaatatcattaaagtagccatactgc

SEQ ID NO: 837 - DNA, 200 bp, Homo sapiens
  misc_feature (1)..(200): DMR5:83329801
tcaagaaatgactgaggaactaaggaagaagcctaaagtgatgtaactgctaaagtattgtgtgatttgggacattttgaggtaaaggacattagtggaaactgaatggaggttgaaaattagatggcagcaatgtatcgatgttaattttctgttttgacggttgtattgtgcttaagtaggagaatgtttagaaggac

SEQ ID NO: 838 - DNA, 2800 bp, Homo sapiens
  misc_feature (1)..(2800): DMR5:83849701
aaaaaattttccattgctctttgggcacatattgatataatacatattgatatactatcatgtctgtacaagtaagagctgaagaatagaaaaacagttttatgaagggtttagcaatacaattagagatagaggtggatgcaagtaactataagtctgttaacaaaattgaatataaattccaatcttattctcaaaaaagcaggaaaacaaaataaaacatactaagaataaacgatggcaaaatttagatgtaacagaaaatattgataacctgggcagatggaatgagaaaaaaatacactgctaactcattgtctctatgaggaaggaaatgaatggttctatgggactcttaatgtaatgcttcaaccttgactccagacatggggaaataaagtgttgtcttcctagctacttcccctgatttggccctaccctccaggatgaggttaatagaagggagtagaatccaagatctggtctgacaagggcagggagtagaattcaaggtctagaatgattacattgccatgaactgttacacagagtaccagaagactgaacgtctgcgtttggtcaaagaacatttcctaatagataggggttccttgcttttacactgttggtgggagtgtaaattagttcaaccattgtggaagacagtctggcgattcctcaaggatgtagaactagaaataccatttgacccagtgatcccattactgggtatatacccaaaggattataaatcatgctactataaagatacatgcacacgtatgtttattccggaactattcacaatagcaaagacttggaaccaacccaaatgtccatcaatgatagactggattaagaaaatgtggcacatatacaccatggaatactatgcagccatgaaaaaggatgagttcatgtcctttgcagggacatggatgaagctggaaaccatcattctgagcaaactatcacaaggacagaaaaccaaacacctcatgttctcactcatagctgggagttgaatagtgagaagacatggacaaagcacagggaacatcacacactggggcctttcgtgggctgggaggctggggaagggatagcattaggataaatacctaatgtaaatgacgagttgatgggtgcagcaaaccaacatggcacatgtatacctatgtaaaaaacctgcatgttgtgcacatgtaccctagaacttaaagtataataaaaaataaaaataacaaaaataaaaataaataaataaataaataaataagggttccattaatcagcagtgccatagtaactagatgagacaacttggatgcaaaactacaactccatgatttattacttagcatctacgccaatctcagtcagcaggagtagcaataagtctgtgatacccagaaggtctttcttatgcttcattttatgagtgtcacattcttctcctacattgacccctatcttaatctccattaaaaatcatttccaaacgacttctagactctccgttagtgtggcactccaagtacatgcggctcctcccttaattattgtttacttcatttgcatctgcgattttttttttttttttttagatgaagtcttgctcttgtccccccaggctggagtgcaatggggcgatctcggctcactgcaacttccgccccccaggttcaagtgattctcctgcctcagcctcctgaatagctgggattacaggcacctgccaccacgcccagttaatttttgtatttttagtagagatagggtttcaccatgttggccaggctggtctctaactcctgacctcaggtgatccacctgcctcggcctcccaaaatgctgggattataggcgtgagccactgcacccggcctgcatctggtttttcttttgaacatttattttaatacgataaggttcttttgtcagatcaatgcaataagtcagaacttttagtgctgcctggtctggtttctaatatgttctggcctgcccttttgtggtagactgaataagagctctgaaaatgtctacaccctaatctctggaatccatacatttgtattaggtggaaaaggtactgtccagatgtgattcaggtgtacaccttgagatgaagagattatcttggtttatccatttgagcctaatctagtcacatgagcctttaaaagaggggtaacttccagctgcagtcagttacagagaagtgcagtgtgagaacaaatcattactgatttgaagacagaggaagaagactatgagtcaaggaaagggggtgaaatccagatgctgagaacagctctcagctgacagtcagcaaggaaacaggacctcagttgtacaattacaagaagtgaattctgtcaacagcctaactgagcaaggaagcagattcttccccagaacatggcactccaaaatatgccactttggcataaggatgattttgagttgaaggcttttaagatttaacagatgcagaaagaaggcttcctttatctgaccaaaacagaacttttgagaaatgagggctgttgtaaactctctctccagaggaagttttgtgtccgtgaagaaagcggaaagttggcaccaagatgacctttacagacaagcctcactctatttgtttcccccttctatttaccctccgacagtttgccaccttggaagcctgaagccttttgttttgtcacttctctacaaatgtattgttctttgttaaaattgtttatgtaagcccaagttctaaccactcctttgagttgctcacctctaagtt

SEQ ID NO: 839 - DNA, 1100 bp, Homo sapiens
  misc_feature (1)..(1100): DMR5:84518601
cccactggcaactgtgcacgtggtcatgctggtggttgtattataagaggggcagggtgctggtgggcacaggtctgtgtgcgccctatgtgtgcatttgcacagatggaggtggctgcttagggtgggggaaggtccaggtgggctgatgtgtggctgcaggggttggtctgttgaagctctctgctggttaagcatggtctgccagtgcaggagctgtgatgtgggccaccagggcacccaaggctgcactgcaagcaggcgtggctcagttgggatactggagaggccagtaaaccaaggagtgttcaggtcagatcacccccatccgatggccaagactgtgctgcagaattcaggtcagacagttcttcttgggctaaagtcttctatgggagcaagtggagcctagggggatggacataccttgctgtgcttcactacagatgctcccactgggctctgcactggctggtatgctgcccctagcacttctccttgccaatgcaagtgttcacagtggtagaggaatttcctcctgcctggattccagagtcccatggcgagagcaggttgctccttgcctgttcaactcatctgttcctccagagtttttagggtccaggaatgagtcctggtatgcagtagccccatgcagtgttcccagcttccttcgacttcagcccagcttctgcatcttccctttgtccccttctcagtgccttctctctgaagatctgttaggagtgtgccagtcatcctggtcccttggtggtagcttttccacctggctgtgtctagtcagccatcttgcctgcctactaaaattattaaactattaatcaccaccaaaattattaaaccactctattctttaatgtcttactatgtaagataaaagattgtgaaaatagttttataatagtatctctgagaggattaaatggcatgtaaatccaaattacttaatctagtacctaccatatagtaaaagtagataaagattagataatgttaccttacacgtacatatcataaaccaacagtgctttaatatgatttagggctgtatattaaacaacaatctcatcctatcaaag

SEQ ID NO: 840 - DNA, 1400 bp, Homo sapiens
  misc_feature (1)..(1400): DMR5:85164601
gtcacctcttcatatggtgactgtggcaagctgtaagctcaagtgtagccctcaggctctttatttcttccccagactgaggacagcagggatagaaatgctgctctgacaatggaagagggactgttgtatgcctctggggacttctcctcagggaaactctgcatcactaccagtgggtttatgcagccacggggagggtgactgttccacagtcatgagccagggtccctgcctggtgaagagtgggcagttggggtttccccaggaagaggggctggattcctccttgtatggtggctatggtgtactgcaggtgagagacaggaatagctggatttcccaggccaactaagaatccctaagcctagctgggaaggtgaccgcatccacctttaaacacagggcttgcaacttagctcacacccgaccaatcagagagctcactaaaatgctaattaggcaaaaacaggaggtaaagaaatagccaatcatctattgcctgagagcacagcgggagggacaaggatcgggatataaacccaggcattcgaacaggcaatggcaaccccctttgggtcccctccctttgtatgggagctctgttttcactctgtttcactctattaaaacttgcaactgcactcttctggtccgtttgttacggctcgagctgagctttcacttgccgtccaccactgctgtttgccactgtcgcagacccgctgctgactcccatcctgccgctgactcccatcctgccgctgactcccatccctccagatccagcagggtgtctcctgtgctcctgatccaatgagactcccattgtcactcccgatcgtgctaaaggcttgccattgttcccgcagagctaaatgcctgggttcgtcctaatcgagctgaacgctagtcactgggttccatggttctcttccatgacccacgacttctaatagagctataacactcaccccatggcccaagattccattccttggaatccgtgaggccaagaaccccaggtcagagaacacgaggcttgccaccatcttggaagtggcccactgccatattggaagtggcccactgccatattggaagtggcccaccaccatcttggttgctctgggagcaaggacccctggtaacacaggtactggcatagtgactaggctccttcttccttccctgatgtaaggtttttagggtggtaccactgcaactgcagtggtggaggggttgtgtgttgactcttgaattttatccatggagaaatgttgggctgcctctgaatggagtgatcaggcagtgggagggtggttgtgctggagtctcaggtcacatggttctgcccagtgagaagtgaggaccagaacctgtgtgaagaacagtctggc

SEQ ID NO: 841 - DNA, 1300 bp, Homo sapiens
  misc_feature (1)..(1300): DMR5:85247601
ctagaggcctccactgtgattcacctatgcgggcctaccaaaggctacaaacagcatccctatctgccactgacgcctcaattacccttgtatctgctgcattatatggcccaagtggcaaagcaacttgcacagcagactggacctattgcagagtcttctcctgttctggaccccactgaaaactggcagccttttgggccacttgataaatgggcaggagtaacacacccaaatgaggaatgtgttgcctccaaaatccaaataggcccactaggtgttgtgcctctttcttggttgtagggggatgggggcaaatacagcaacttatacttcaccttagaaggaatttattgacaggccccacactactggacccctagaaattttactgaggtacaaggtccctgaattttactaggatttatttaccattttctggcacgcaaaggtctcaccaataagttcagtgtgtttgctacttttcagtcaatggatccaatcagcataatgttaccaatgtaatggaccagtgtgatatcttgcaaaagcaaaaagtgatcaaggtctctctgaataatattacttgacacaaagttgaagggttgatatacccctgagataagacagtaaaggtatattgttgggcttgccagttgaaggcaaattgcttctggtgcaccttatggagaggaatggagaaaaaggcatttgccaagtcaatgtctgactaccaggtaccaggagatgtgttaatttgctcaatcaatgaaagcacatctggtatagcagctgcaattagagtcaccacttggttaagcttatgataatcaactgtcattctctaagatccatctgtcttctgcacaggccaaatgacagagttgactgtggatgtggtaggaatcaccacccttgtgtctttcaattccttgatggtggcactaatcttcacaatccctccagggatatgatattgtttttgatttactgttttcctcggtagagacagctctaatggcttccatttggcctttcccaccataatagccctcacattaccagttagggagccaatgtgggggttctgccagctgccaagtatgtctatgccaattatgcattctggcgctggggaaatgaccacaggacgagaccaggcacccactggacccactaagtcaaactgtagctaaaactccattaattacctcacctccataagcccctactttgactggaggaccacaatgacattttgggttccctggaatcaatgtcagctcagagctagtgtcca

SEQ ID NO: 842 - DNA, 1300 bp, Homo sapiens
  misc_feature (1)..(1300): DMR5:88970301
gtaaatatttcattggaacatccagtatatcattatcagtcctgttaaacaagtctggttattctgcgaataaaaccccgcttgtcataatcatgataaagataacatgacctttccaaccttctgccccattttcaacctcagtctagccagtaattttgttttgttttgttttgtctttgagttggagtctctctctgtcacccaggctggagtgcagtggcatcatcatcatagctcactacagccttgaactcctgggctcaagtgatcctcctgcctttgcctcccaaggagctgaaaccacaggtgactgtcacaatgcctggctagtttttaaaaagatttttgcggagacaaggtctcactttattgcccagtgtggtttccaactcctgggctcagcttgctttgatctcccaaaatgctgggattacagatgtgagctattgtgcccagcccagtaatttgttactaatcataaagcacctaggattctaagaatttaattgttttaaaaattaattttaaaaatgtaaatatttcagaaaaatacatagaataatagaacatctatggccagaactaataattgttaacattttgtcttacttatttcccattaaccaccaatgttaatcctaatctacaattccttacctatataatctctatgatgaatttggtgtgcatctttcttgttcatgtttattttttatacacataagtatcataaatattttatacctttcggttttaaaatgtttatagtagttacattactacatttatcattttcaccttcctttctcctcaatatcattttctgagaactcaaccatatataactaaacctattttagtaggaccaacagtatttcaaggattatgcatatttgtatatttgtgtttctatgggcacacactcaaaagctgtccaccatcaatgttaggggctgaatgaatttgtcctcttaaaattcacacgttgaggctgggtgtggtggctcatgcctataatcccagcactttgggaggcctaggcaggcagatcacctgaggtctggagtttgagaccagcctgaccaacatggagaaatccgtctctactaaaaatacaaaattagccaggtgtggtggtgcatgcctgtaatcccagctatttgggaggttgaggcaggagaattacttgaacctgggaggtggaggttgcagtgagccgagagtgcaccattgcactccagcctgggcaacaagagaaaaactcctcctcaaaaaaaaaaaaattcacatgttgaag

SEQ ID NO: 843 - DNA, 100 bp, Homo sapiens
  misc_feature (1)..(100): DMR5:90874901
caatgaagttaaaagaaatcttaggctttcttataaagagcattcttggcaatctaaaactaacctatcaccattttctcatgaaaataagcacttccta

SEQ ID NO: 844 - DNA, 1700 bp, Homo sapiens
  misc_feature (1)..(1700): DMR5:91562301
gtctgatggacagagcagcctgtggaggctcacattgtgaacttttgctccaagagctacttcaggaatacaccaagaaagctgaaagaatccgcagaccctttgaaggaaatggattcctctttcaggacccgggagaccagtccaaaaactgagtgcccaaactgtgaaagtggcaaagggggatcatctgcctcagaacacacaccctcactggggaacctgaaggtccaaattgctggagaagattctgaccttacctggaactgagtcaatttagagagtcaggcaaaatacatggttagagaaaacagtgggaaaagttctgtgggctctcttgttccccaggaaagccatttctgccttgtctcacaggggtccttgggaaggactgccagaaaacttggaaaagaccacagggagaaggaaccctgcagttgaactgtaacaattccagctgaatatgaagtttcctagccagaacttgggagagggtgtgatctggtttgcagactcgacaggcagggggaagtgtgagagtcctgctgctttctcagccatcgggctggtagtctggggcaagttctcacccctgctcatccactgcctggaaacaaacttggtgctgtttgggagtggggcacagtgggagtgagactggccttttgggtcgtatgggacctgggtgaggcctgtaactgccggctttcccccactttcctaatagcctgtatgacatagcagaggcagccaaaatcctcctggaaacataactccattgacctgaaatgacactcccatcccctacagaagcagcagcaaatcctgcccaaggagagtctgagctcagacacgtctaagcttgccaccacctgatggcccttccctacccaccctggtagctgaagaaaaggttatattctcttgggagttccagggtccctccaactgcctgatcctccctatactaccacagctgatactctcttgaaaagatcacctcctggcaggaggccaaccagcacaaaaatagtgcaataaacaataataatacaactaaggactttcaaagagtccatttcactccctgccacctccaacagagcaggtactggtatccgtgcctgggagacctgaaggtggtttacatcaaggactctgtacagacgccccccattgccagcccgtagcctggtagccctgctgggtggctacatccagaagagaaataacaatcactacagtttggctctcaggaagccccatccctagaaaaagggggagagtactacatcaagggagcaccccgtgggacaaaagaatctgaacagtagccttgagtgccagatcctccctctgacataacctacccagataagaaggaaccagaaaaacaattctgataatatgacaaaacaaggttctttagtagcccaccaaaatcacactagctcaccatcaatggatccaaaacaagaagaaatccctgaattgccagaaaaagaattcagaaggtcaattattatgctaatcaaggaggcaacagagaaaggtgaagtcaaacttaaggaaataaaaaaagatgtaagacatgagaagagaaatcttcagtgaaataaatagcataaattaaaaaaaaaatcacaacttcaggaaataaaggacacactttgagaaatgtgacgcaaaatcaccaggta

SEQ ID NO: 845 - DNA, 200 bp, Homo sapiens
  misc_feature (1)..(200): DMR5:96201701
gctccaataccaccagttctgactgctcggtgttcagccttagctattgttgaatgtgttgaatattacccctaatataaagtgtcacagtgcatcccccaatctactgtcctgtctacttctttctccttgatgcccccagggccccatctcctacggtaggttgtttttaattattgattagacaaatccaactttaa

SEQ ID NO: 846 - DNA, 1800 bp, Homo sapiens
  misc_feature (1)..(1800): DMR5:97298501
ttttggttcttatgaggatgctttcttgtgtagatagttgttcaatttggtgttcctgcaggggggtgatcgctagagaatttggccatgttgctatgcctcttttgtctgtctaatacataagctctttattttcattttttatatttttagacagtcttgttctgtcgcccaggctggagtgcagtggcatgatctcggttcactgcaacctctgcctcccgggttcaagcaattctcctacctcagcctcccaagtagcttgggttataggtgcatgccaccacacccaggttgtttctgtatttttagtagagcggggtttcactatgttggccaggctggtctcgaactcctgacctcgagatccgcctgccttggcctcccaaagtactgggattacaggcgtgagccaccatgcctggccctggtatttaatactgaagcaaccatacgaccaagcagcaggtatataccatgggatatatacctgggggtttattgttgtgtgctgagaaagaattcaggacacggacacatgtgggtgggttaaggagtggaaatgatagacacaagaaaggggagaggagagaagcggactgcagcaaattttataggcaggctggagacgatggtgtctgatgtatgtagggctcacagattggttctatcagatatgatgtctacatagtgcacagggaaggctggtggccccaccctaatattattatgcaaatggactttccagttgatcagtgccatcttgtctgctctttactatactcttggctgacaaagaagaaggaagatgaagccgccattttgaacatgtctagtccctagttgctgctggccttgacccaggcaagctcccagcttgcttatctgtgtctgcagcctgattttacaggctgattttacagaaaatgatgtggggctgcttttcattaaaaaaaaaaaaaaaaaaagaaaagccttaccgagggctctcatgctcttgctattagcctaagtaattccttcttaactcctatatcaatactatcagatttaaagtgatattttcatttcaaattttaaattttaaaaaaaatgaaattaaggaaatatcaattagatttaatttttttggatcagaaaagcttgtttgtcataattgattttattttattttttatttttttattttttattatactttaagttgtagggtaggttgccatgttggtgtcctgcacccattaactcgtcatttacattaggtatatcccctaatgctatgccctccctcctccccctaccccacgacaggccccagcatgtgatgttccccttcctgtgtccatgtgttctcattgttcaattcccacctatcagtgagaacatgcagtgtttgtttttttttctttgtgacagtttgctgagaatgatggtttccagcttcatccatgtccctacaaacgacatgaactcatccttttttatggctgcatagtattccatggtgtatatgtgccacattttcttattccagtctatcattgatggacatttgggttggttccaagtctttgctattgtgaatagtgctgcagtaaacatacatgtgcatgtgtctttatagcaacatgatttataatcctttgagtatatacccagtaatgggatggctgggtcaaatggtatttctagttctagatccttgaggaatcaccacactgtcttccacaatggatgaactagtttacagtcccaccgacagtgtaaaagtgttcctatttctccacatcctctccagca

SEQ ID NO: 847 - DNA, 2100 bp, Homo sapiens
  misc_feature (1)..(2100): DMR5:98811601
ttgtcccattcccaagtatctccaggtgcttaaaatgttgatagtaataatgaaatcactaaatgaaaactggagacaatatgcccaaatttcagggaagaaagaagaaaatgttctttctcttcactcctcccatggaatatgaaactgataaagagaagcagtgactaacctccaaactcttgctttaagggcaggcaaacagtgtttcaaatggatatctaagacattatagctccaagccccagacctgcaacacctctgtctcctacccttggatgattcagttctacagtttggtttatatggtccccattcacctggagctcttccttaactgatctattatgtataacaggatggctcacccggcagcaattctgcaatctctttctcatgaaatattttgcaagaaagctctccctttgacaccctattcagcataatattgtatcatgtgtagattaatattgcatttgttccatgatcagttatcttgcaaagtcaattattcagaacacagccaagaatcaataggaagatgaaaaaattatctgaacaaccaagtaatactcttacagaatgttactcaaagaagaatctctctggccatttctcaggacttatttgcttctattttagatacaattcttacatgcttaataaaccaacttgttattcaaccaactctatgcaatcttttttagagataggttgtcactgtgtcgcccaggctggagttcagtggtgtgaccacagttcactgcagcctcagctttccaggctcaagccatcctcccacctatacctccagagtagcgagtagcgggtagcgggaactacaggcaggcaccacttcccctggctaattttttgtgttttttaaagaaatggatctcattgtgttacccatacctgcctcaggcccacaaagtgttgggattataagcgtgagccactgtgtccagccactaatgacattcttaaagttactcctaagctaacccaggccgtaaagatggtgtggaactgaaacacaatgcctggtcttacacaggtcctcagcagtgttagaatgtgctcaatgaactgtttatgatgtgactgaatgggatgatgagatgcagcccaacaacactatgttcactatgagaaacttagtgaaaatatttggatctgaggatgcatttctttctcttcttaacgtaaggaaccatactagctcttgtttttaaattgtagactctgcaaacaatataagtgattgtcattcatattctgccttggtatcagaaagctcaaagccaagattgtgatccatatctcattagtgtaaaggatttcatgggaattattttgtgttttgcattttgttttttttttatttgcatcatttttctcacttattttgaagttacatctttttgctatatggtttattttatttttaaaaacccatatggaatttaccatatgctagacactgttctaagcactttgcaaatattaattcatttagttctcatagttaccctatgttatcatatccatttatggttaaaaatggaggcacttagagattagttatatatcttttaatctacataaaatctttttggaatataagaaaatatatggctaggcgcagtggctcacacctgtaatcccggcactttgggaggttaaggcaggtggatcacttgaggcctagagttcgagaccagccagggcaacatggcgaaatcccatctctacaaaaaatataaaaattagccaggcatggtggctccagcctgtagtcccagatacttgggaggtttaggtgggaatattgcttgagaccaggaggcagaagttgtagtggtgctgagactgtgccactgcactccagccaaggcaacagggggagaccatgtctcaatacaataaataaataaataaatagagcaagtttattctagctggaaaagttgactgaaaagaaattaatgcttaaaattgataaattgggaaaaagcaataggtagaaatatagaggtaaaatactaggggaaaaaaagctaaaggtttaagtgattgcttttggggaatacaattcag

SEQ ID NO: 848 - DNA, 100 bp, Homo sapiens
  misc_feature (1)..(100): DMR5:99507001
ttgcccctggcctacttttttcaagaaaagacagtaaaatctgacttgatgcctttgatttggttaagaaagaaaataaaatcgttttctcgctgtactt

SEQ ID NO: 849 - DNA, 2500 bp, Homo sapiens
  misc_feature (1)..(2500): DMR5:100472601
tttcttttcctttgggtagatacccagtagatatccagttactggacttaagggtagttctatatttatttctttcagaaacctccatactctttggcctataggttgtactaatttacattcccactgacagtgtataaacattcccatttcttcacatcctcactaacgtgtgtttttttaactttttaataatagcgattctgactggtatagatggtatatcattgtggttttaatttgtatttctccggtgattagtgatgttgcacattttttcatatgtttattgaccacttttatgtcttcttttgaggagggtctgttcattatactttgcccactttctaatggggtaatttgtattttttcttgttgagttgtttgagttcttgtagattctggataatagtttattgttggattaataatttgtaaatatattctctcattccataggctgtgtctttactctgttttttttttcagtgcagaagctttttagtttaattaagtcctgtttgtctatttttgtttttgttgtgtttcctttcgataacttagacataatttttttgtgcctagagtaatgtctaaataatttttcttaggttttctttcagcgtgtttacattttcaggtctcacatttaaatctttcatctatcttgaattaacttttgtatacagtgagaaacagggctccagtttcattcttctgcattttactctccaattttccaagcaccatttattgaatagggtgttctttgcccagggtatatttttgttaactttatcaaatatcagttggttgaaagtatgtggctccatttctttgttctccattttatccaattttctgtgtctatttttatactagtatgctacacaacacacattatagtcacattattagggagggaaaatcccatccaaattaaagcgaattcaaaactgaggagagatagcttatccagatgagaagcaatcagaaaaacaattctggaagtaattttttttaaagagtaatataacacctccaaaggatcacactaactctccagcaatgaatcctaaccaaaaagaaaactttgaaatactaaagaattcaaaatattgattctaaagaagctcaatgaaatccattataaatttgaaaactaacataaataaatccaaaaactaatttgggatttgaaagaagagatagacattattttaaaaaaccaaacagaacctctagaaatgaaaacttccttgaaggaattagaatattttacctttaaaaacattgtaggcgggcgcagtggctcacgcctataatcccagcactttgggaggccgaggtgggtggatcaccggaggttgggagttcatgaccagcctggccaaaatggtggaaccccgtctctactaaaaatacaaaaattagctgggtgtggtggtgcgcacctataatcccagctactcgggacgctgaggtgggagaattgcttgacctcagcaagtggaggttgcagtgagccgagatcgcaccactgcactccaggctgggcaaaagagtgagatgccatttcaaaaaaaatttaataattatggtcaaataatactttaatatgcttctggggtacacatgatgtttttgtataggtatccaatgtgtaatgatcaaatcagggtaattaaggtatctgtcaccttaagcatttgtcatttctttgtgttaggcacattccaatgccactcttctagtttttttaaaaaaatagataataaattatttttttctttcattattatatactagatttccattctttaacctaatgacagtgtagttctttacatatatttgttcaatttttaatatttgcctacaaatatataagtacttttcctttttatcttcacatagtatcatttcttcaaagcttgaagaacttcttttagcattccttacagttcaagtctgcttaaaaaagatcaatatttgtctaaaaatatacttcctttattttttaaggaatatttttggggtatagaattttcggctgacagttctcctttccttctagtcctttagaattactatattgtcttttgagtttgataatttttcgtaagaaggtgctaaaattcctattattgtttcttgtacataaagtagatattaaaataaataatatttaccctcagaaaaggaatgccctttcttctgtggtttactagtttgaggagatgattttctctaatctgtggttgaccttctgttcaatagactaggcgtatagcttttattaaatttagtttactgaataattttaaaatgcttgttttacattaatagggagagaggaaatctagagcagacattgggacaatagtcttcctgagggctcaaaagctgaggaacaaccagtgagacccaagccacctaccctttcaatcagtgagtctgtcacactccaggaactcccattctctacgccctaccacgt

SEQ ID NO: 850 - DNA, 1100 bp, Homo sapiens
  misc_feature (1)..(1100): DMR5:101027501
gctgatacaaaagaaaacctagttagaggcagctagagagaaggggcagatcattacaaaggacacaagccagacaagattgggggcctagattcagtattaataaagaaaataaattccaatcaagaatcttatatcatgccaaactaagctttataagtgaaggagacataagatttctccctatttcttgtgcttatatgacaggcaaatgctaagggaattcattaccacccaacttgccttacaagatgtcctgaagaaagtgctaaatatggaaaggaaagactgttactggtcactataaaaacaaacatcagtacatagaccattgcaaccacatagacatagaccaaagcaaccacaaacaagtctgcataataaccagctaatgaaatgatgacagtgtcaaatccacacatatcaactgcaacctttaatgttcatgggctagatgctccaatcagaaggcaccaagtggcaagttggataacgaagcatgacccaatgttacgctatcttcaaaagatccatctcacatgcaatgacaccaacaggctcaaagtaaaggtgatggagaaaaatcttccaagcaaatgaaaaacataaaaaagtaggggttgccttttgaacttcagacaaagccaattttaaaccaataacaatcaaagaagacaaataaaggcattacataatggtaaagagtttaattcaacaagaagacctaactatcccaaatatgcatgcacccaacacaggagcacctagactcataaagcaaattcttagagacctgtgaagagacttagataaccacacaataagattgggagacttcaacaccccactgatactatctgacagattatcaaggcagaaaattatcagatattctgggaactgaactcaacatttgaccaaatagaactaatagatatctacagaactctccacaccaagcaataaaatatacatttttttcatcttcacatggtacatattctaaactcaactgcacattcatccataagacaatcctcagcaaattaaaaaaaaaacctgaattcataccaaccataaaattacatggaaattaagca

SEQ ID NO: 851 - DNA, 200 bp, Homo sapiens
  misc_feature (1)..(200): DMR5:101432601
acaaaaaaacacacatatattccattttaaagaaattgtaccacttgttctaaattgtatccaaacggtcatgggaatccagaatccaagaagttgaagacaaatgaaattaattcatgtacacactccgtattcaggatgtaaacgtccaaaatatttgcacacaagcttttatttggggagaaaactggtctcgctat

SEQ ID NO: 852 - DNA, 2700 bp, Homo sapiens
  misc_feature (1)..(2700): DMR5:102190101
cagctttgaagagagcagtggttctcccagcacgcagctggagatctgagaacgggcagactgcctcctcaagtgggtccctgacccctgatccccgagcagcctaactgggaggcaccccccagcaggggcacactgacacctcacacggcagggtattccaacagacctgcagctgagggtcctgtctgttagaaggaaaactaacaaccagaaaggacatctacactgaaaaaccatctgtacatcaccatcatcaaagaccaaaagtagataaaaccacaaagatggggaaaaaacagaacagaaaaactggaaactctaaaacacagagcacctctcctcgtccaaaggaacgcagttcctcaccagcaacagaacaaagctggatggagaatgattttgacgagctgagagaagaaggcttcagacgatcaaattactctgagctacgggaggacattcaaaccaaaggcaaagaagttgaaaactttgaaaaaaatttagaagaatgtataactagaataaccaatacagagaagtgcttaaaggagctgatggagctgaaaaccaaggctcgagaactacgtgaagaatgcagaagcctcaggagccgatgcgatcaactggaagaaagggtatcagcaatggaagatgaaatgaatgaaatgaagcgagaagggaagtttagagaaaaaagaataaaaagaaatgagcaaagcctccaagaaatatgggactatgtgaaaagaccaaatctacgtctgattggtgtacctgaaagtgatgtggagaatggaaccaagttggaaaacactctgcaggatattatccaggagaacttccccaatctagcaaggcaggccaacgttcagattcaggaaatacagagaacgccacaaagatactcctcgagaagagcaactccaagacacataattgtcagattcaccaaagttgaaatgaaggaaaaaatgttaagggcagccagagagaaaggtcgggttaccctcaaaggaaagcccatcagactaacagcggatctctcggcagaaaccctacaagccagaagagagtgggggccaatattcaacattcttaaagaaaagaattttcaacccagaatttcatatccagccaaactaagcttcataagtgaaggagaaataaaatactttatagacaaacaaatgctgagagattttgtcaccaccaggcctgccctaaaagagctcctgaaggaagcgctaaatatggaaaggaacaaccggtaccagccgctgcaaaatcatgccaaaatgtaaagaccatcaagactaggaagaaactgcatcaactaatgagcaaaatcaccagctaacatcataatgacaggatcaaattcacacataacaatattaactttaaatataaatggactaaattctgcaattaaaagacacagactggcaagttggataaagagtcaagacccatcagtgtgctgtattcaggaaacccatctcacgtgcagagacacacataggctcaaaataaaaggatggaggaagatctaccaagccaatggaaaacaaaaaaaggcaggggttgcaatcctagtctctgataaaacagactttaaaccaacaaagatcaaaagagacaaagaaggccattacataatggtaaagggatcaattcaacaagaggagctaactatcccaaatatttatgcacccaatacaggagcacccagattcataaagcaagtcctcagtgacctacaaagagacttagactcccacacattaataatgggagactttaacaccccactgtcaacattagacagatcaacgagacagaaagtcaacaaggatacccaggaattgaactcagccctgcaccaagcggacctaatagacatctacagaactctccaccccaaatcaacagaatatacatttttttcagcaccacaccacacctattccaaaattgatcacatacttggaagtaaagctctcctcagcaaatgtaaaagaacagaaattataacaaactatctctcagaccacagtgcaatcaaactagaactcaggattaagaatctcactcaaagccgctcaactacatggaaactgaacaacctgctcctgaatgactactgggtacataacgaaatgaaggcagaaataaagatgttctttgaaaccaacgagaacaaagacaccacataccagaatctctgggacgcattcaaagcagtgtgtagagggaaatttatagcactaaatgcctacaagagaaagcaggaaagatccaaaattgacaccctaacatcacaattaaaagaactagaaaagcaagagcaaacacattcaaaagctagcagaaggcaagaaataactaaaatcagagcagaactgaaggaaatagagacagaaaaaacccttcaaaaaatcaatgaatccaggagctggttttttgaaaggatcaacaaaattgatagaccgctagcaagactaataaagaaaaaaagagagaagaatcaaatagacacaataaaaactgataaaggggatatcaccaccgatcccacagaaatacaaactaccatcagagaatattacaaacacctctacgcaaataaactagaaaatctagaagaaatggatacattcctcgacacatacactctcccaagactaaaccaggaat

SEQ ID NO: 853 - DNA, 200 bp, Homo sapiens
  misc_feature (1)..(200): DMR5:102345701
ttatttatttatttatttatttatttatagcgtataaatgaaatgaaatagcaaagagaaaagttccctgatttctatcctaatgcctcttaatcacacatagtgggcatagctgcaacaaaacataaccacatctatctaatcttattgctcatagctgttaaataccaaatctcagtcagtaattttagagacagaga

SEQ ID NO: 854 - DNA, 500 bp, Homo sapiens
  misc_feature (1)..(500): DMR5:102521401
ctaggattacaggtgtaagccaccacgcccagcctaattgtagcattcttaatctgtcttgccacagtactctcatttgcaaagcttggatgatataatctaattgacacaaagaggatgaaatgaaaaatctatacaagcctcctggcccaatgttcggtatactctagttgcaaaaaaaaaaaaaaaaaaaaaaaaaaaaaaaaccaaacaaaaaaaacaaaaattatttctttcttccatatgtagaaatgagagactttacttactccagattataccaatgtgcatattactaaaatgatttaataatagctatcacttagtacttattattcatcaagtactgtagaaagtattttttatgtgctctgtcattagtcctatactttattaagtacacacattatcactatttcacagattaaaaaaaaaagtccagacaatcacctaatttactaagattatacagctaggtctaacacaaaagcctaagctct

SEQ ID NO: 855 - DNA, 200 bp, Homo sapiens
  misc_feature (1)..(200): DMR5:103666501
tgacatgaacttctctcccactggagctcagacacttcctctagctaggctgttccagctgcccccactccctttctgcttctgagaagaagccctttttacccatcaatgaatgccccaacttctcactggcccaacagaccacctgtacccttatgctggcatctaccttgcctggccctatttgttagtttttgtac

SEQ ID NO: 856 - DNA, 1100 bp, Homo sapiens
  misc_feature (1)..(1100): DMR5:104297301
aatcaaagatgccaaagtgattgtgagtaatgagaaaggaagagagcaataaagacgggtgtagtaaaaattcttgcatagctttgtagaccatcaataggattttggctttaacatgagtaagatagtcattaaagttctatgatcagagtattatgatctgacatagtttattaggtgaattttggtcaccttcttaaaactagtacaaaatatgtaagttcagaagcagaaaaatataactaaaaagttattgaaataaaagacaaaagtgatgtgagccagactggtagctgtggaagtagtagtgagttatcagattccctattatatgggtagaaataatatttgccaaaaagttgtatgctgagtttgagagaaagagagaagtcagggatgactccaagttcttttttcctgaacttctataaggatagatttgccatgtgactgagatgaagacaactgtagaaagagcatattttttagaggaagaccacaagctcatgacttttaaactttgtgatgcctagcagacatccaagtgtacatcgtaactaaagagatgaattcaagggtctagagcccaggaaaagattcagatgggaataatacatctgggagtcctcagcatataaatgtatctacatctgtgagattggatgagattactaagggagtaaacagaaaaaaaaaaagagatccaaagatagatgttgaggatgtgaggaagaacctcaaagggtgattgagaagtatccagaaacataggaataaagccagataccatttcttgttctgggtgtcaagtgaagaaagtgctttgaggaaaagacatggccaatgctatcaaatgcttcagatagtaggcagaatttaacattgtatttatcaatgttgaaagtcagttggtgaccttggccagatagttttcacagagtagagtaaaagacagtataaaatgtctggtggtccctacttcaagaaagtgtagaagagaaagaatttttggtagcaagtttagtaaactttttcaaagagtgtaactttaaatagatggacagaatatagacatgggtagcgtgtagaagcagttatgt

SEQ ID NO: 857 - DNA, 1800 bp, Homo sapiens
  misc_feature (1)..(1800): DMR5:107811301
aaatgctccatacagcttcactggagcctgtaactccctgttctggaaattgaaagcagcaaaacagtttgctgggggatagtagggctgaaacacaaatagttagagctaggggtcaatacttggaactcaagaatgctggtaatgagcctgatggcaagttggaaatgggttttcaatacgatcacttgacaaacatgatttttacgactttgagcttcaaccacaggccatgttattggacagacatgtgaataggtaaatgtctaactactatttctgtatttctataatattcttccctttggggccatcaggacaatctaccaggtctaggaatcagactactttctgaatctgaaagggggctgatggcagctaccaggatttgggaactaggaagaacgaataatgacaaaacagtttaagaaaagatgaaagaactactttggagcagaattggctagaagaaatgttaatggcctgccttcatggtgttgtacagaaaatgaaatactgagaagccacaaagagagcccatccctgtggtataactgtgaggcataataggaggaatttaaaaagaaaaacttgagacaggcattaggaaacagacagaacttccatattcccagaaagaaggtgagcacattgaaggcatttaaaaactgaggttgaattaaactctaggaaatattttctcttgtcggcaacaattctctgctggcccagtgggacagagtacatcatctaacgagacatttttatttctaatttctttaactccatggaaaatccttcctgaattctccgcaactctctgtggtgtttactaagtgaaataacttagtgccctccacagccttcactaacttagtatccattcgctcttccaaatcaataataaacacattaaataacattggtccccatacagaccccaaatgcaccacactattaacctctctccactccaggaaaccagcagtcactctgtctcccacggcttagctggttttgtagaaatctccagcctttgactgctcctgcccagctgaaagaagggtctaactccacttctgctctttcctggttaacactgcagggctctctggtggaagcctgcacccctggggcagtggctgcaggtaacactagtctatttgatgggaggcctaagagtttcagcaaggaaggaaagcaagatggaaaaaagtttattgttcttactgaaaacccaattgcactgccatttttcaattccattgagaaatgtcaatgttctttcccaccgtctggcggaggcagatttgaccaggtgtctccacacagagtgggttctcacagttgggctgcgtgtgtgtcataaagctaaataaggagccagttcagtccgccaccccccttcgcttctgccggccagacacacttccccatatgacagtcttataaatagctgctaagcagctggtcctcctctcacctcctgactctgtcagaatcccccactagaagcccctgacagtcatgcagctgggagctccccttttctcttcttctctcctctccactccctacctctgacatatggccgccacctcaacaatgcccactgaaaccagccagggactgacttccatgggagaagggatcaagcaggctgagggctggatctgaccactgaagcaaactgtcacccaagtaaacaggggaatggaaggttgggagacaccacagtgagacaccaggcagcccacagtacagcggccagatggctgacccagcaaaaatcccaggaat

SEQ ID NO: 858 - DNA, 100 bp, Homo sapiens
  misc_feature (1)..(100): DMR5:107847801
ccacgtaatttcactggggaattctttcaaatatttaagagataaattaccaattttacataaactttctcagaaaatacagaaatattatgaggccaca

SEQ ID NO: 859 - DNA, 1900 bp, Homo sapiens
  misc_feature (1)..(1900): DMR5:108097901
tttcttatttatctatccaaataacattttatattgtctaacaggttttatatttatctgtccacaacccctataatgtaagctccatgacagcagaaagcttgtctattattcactactagatctcctagaagaagctcatagtacacacttcttaaatgaataatgaatgagcaaatggacaagcatatggtcagatggatggaaacatagtgacttcagtaaaacttcaataaatatctgatgatcatcttctaaaaaaaaacagaaatctaatctgggctatcatatactgcaaagatgattttcctgtctatctgcaacagtctatgaatcatagtttttttcctaataaatgttttgatttcttaaagaagggtagcttgaactcagatggtgaaggctgcagtgagccatgatcatgccactgtactccagcctgagccacagagtgagaccccgtctgaaaataaataaataaaaataaaggctttgatttcacctcctttcaactttttgggtcaacttgccacaaaaagcagtattaaaaaaaatacttttcatgccgggtgcagtggctcatgcctataatcccagcactttgggaggccgaggcgggtggatcacgaggtcaggagatcgagaccatcctggctaacacggtcaaaccccgtctctactaaaaatacaaaaaattagccgggcgtggtggtgagcatctgtagtcccagctactcgggaggctgaggcaggaaaatggcgtgaacccgggaggcggcgcttgcaatgagccaagatcgtgctgctgcactccagcctgggcaacagagcgacactctgtctcataaaaaaaaaaaaaaaaaaaaattctcaaatggaatgccatcaaactttccaagctgaaaaaaaatatatactttaaacgttttcatatggcagaagtaaatgactgtaaacatgaatatatcatgtttacatgttgatatcatgtttatcatcactaataacttcttagctaggatgtagcattcttcagagaatataagatcagttacttaggctctgaattgctatattcaagaaaatactaaaagtagcaatagataagagcagagtcattaaagactcatcctgcttactcaatagttaccagcaactactttatattcccattgcctagaatactaacattaatggcctcattagagtaaagcttttccagtgggaatccaccaagatatgcccatcccccaactaagcaataatataactacattttttttaaaaacctgaactttaatatagttgattaatggttgaactaagccaaagaaaaagtataaaatagctgataatgtgatactgggtacatagaacattgtaggggggcagtattttgcctctatcctcttagttttcttaggctaggcctgagaattaaactaaccaaagacagatcaaaaagagaaaagcaaacaaattaatttaatataagttttacatggcacaggagacttcataggaaaacgaagacccaaagatgcagttagagttgaacacttagatattgatttatagacaaaagattagaaaaaatcagacaaaaagcagtaaactgtgaaaatgtgacaaggcaaagaggcttgggctagagtgttttgggtagagaagggactaggaagatgaaggttcatgtttgtacagattttccttggcctcaacttaccatcctagatatgaatgatactttccttctggtatagggagggaggacatatttcacatggaaatttcatccactgcttttacaaaacagaaggaaggtcagagtgatcttcttgcccctgctgtttatcaagtgcctttacctcaaaatagttaatatgccagaatggcatgt

SEQ ID NO: 860 - DNA, 1000 bp, Homo sapiens
  misc_feature (1)..(1000): DMR5:109286401
gagtataaagagaggaattttacagctgggcctccaggggtgacatcacgtatcagtaggactgtgatgcccacctgagctgcaaaaccagtaggtttttattaaggatttcaaaaggggagggggtgtaaaaacagggagtaggtcacaaagatcacatgcttcaaagggcaaaaaggagaacaaagatcacgtgtttctgaggaaacaggaccagggcaaaatcagaaactcctaatggggtctatgttcagcagtgcatgtattgtcttgataaacatcttaacagaaaacagggttcgaaagcagagaactggtctgacttcaaatttaccagggtagaatttcccaatcctagtaagcctgagggtactgcaggagaccagggtgtatttcagtccttatctcaaccacataagacagacactcccagagcagctatttatagacctccccctaggaatgcattccttccccagggtattaattattaaattccttgctaggaaaagaatttagcgatatcttccctacttgtacgtccatttataggctctctgcaagaagaaaaatatggctctttttgcctgaccccgcaggcagtcagaccttatggttgtcttcccttgttccctaaaatcactgttattctgttctttttcaaggtgcactgatttcatattgttcaaacacacatgttttacaatcaatttgtacagttaacacgattatcgtagtggccctgaggtgacgtacatcctcagcttatgaggataacaggattaagagattaaagtaagacaggcataagaaattatgaaagtgtttgggaactggtaaatgtccatgaaatcttcacaatttatgttcctctgctgtggctccagctggtccctccatttgggatccctgacttcccacaacagaattcaggttatgaagtcaatctacacaaatcagtagcactgctatacaccaacaaccaagctgagaatcaaat

SEQ ID NO: 861 - DNA, 200 bp, Homo sapiens
  misc_feature (1)..(200): DMR5:110712001
ctgagggaggagaatggcgtgaacccgggaggcagagcttgcagtgagcagagatcgtgacactgcactccagcctgggggacagacagagcgagactcaatctcaaaaaaaaaaaaaaaaaaaaaaaatcaaactctgaaactactacaagaaaaccttgaagaaactctccaggacattggtctgggcaaaaatttat

SEQ ID NO: 862 - DNA, 300 bp, Homo sapiens
  misc_feature (1)..(300): DMR5:112089101
atatacccagtaatgggatggctgggtcaaatggtatttctagttctagatccttgagaaatcgccacactgtcttccacaatgtctgaactagtttatggtcccaccaacagtgtaaaagcgtttctatttctccacatcctctccagcacctgttgtttcctgactttttaatgatcgccattctaactggtgtgaggtggtatctcattgtggttttgatttgcatttctctgatgaccagtgatgatgagcattttttttatgtgtctgttggctacataaatgtcttcttttgag

SEQ ID NO: 863 - DNA, 300 bp, Homo sapiens
  misc_feature (1)..(300): DMR5:116224401
tacaaaggaatgatatttattttggctcatgtttctgcagactgtacaggaagtgtagtgctctcatctgcttctggtaaggcctcaggaagcttacaatcatggtggaaggcaaaaggggagttggcatatcacatggtgagaggagggaacaagggtccggggccgcggtgccgcactcttttaaacaaccagatctcatatgaactcagagcgagaactcatttattgtgaggacagcaccaagccattcatgagggatcttcccccaagccccaaacacctccctctaggcccacc

SEQ ID NO: 864 - DNA, 300 bp, Homo sapiens
  misc_feature (1)..(300): DMR5:116446601
ctccccctgggattatgtacacgcatcattgggcttcatggatgtggaaaggggagcaaaggatggtttggggggtacgtccggctttagcgagggcgtacgcttcagccccgaccttgtcagtgagttgtaggcgttgaggctgggctgcctcgagacagtcacggcctggccagatggctgggagctgtgcacctggatggagtccaccctctgcggggcgggcggcgggttgtctcccctgccaaagctctggtttctggagaggtgagaggaattggaggagttagtgttgtttct

SEQ ID NO: 865 - DNA, 300 bp, Homo sapiens
  misc_feature (1)..(300): DMR5:116449201
ctcaattcctgcctctggagagtgaaagaacatgaatacattagaggcactgcatgggctgaggaaatgtaaacattgttcctattatggaaatgatagcaagacagaaaaggtaccttctctggtctcgggagacgcatttttcatctactaaatcaactctttctggaatatgtttcatgtattttactggcaggtatcagtggcacagaattagaatgaaaggaaataaagatctctaccccttcccaagcccacaacacgcaaccttaaacttctactgaaatgttgtctttgtca

SEQ ID NO: 866 - DNA, 700 bp, Homo sapiens
  misc_feature (1)..(700): DMR5:118339501
caggggtgatgtcactgagaatgtatattttgggccaatggctggagaaagatgagacttagccacatagttatctggaaagaagagcactccagatagaggaacaactaatgcaaggaccttgtgcacttgaggaatcataaagaaaatcaaagagaagataaatagcagagttagacaggggaagataattgaagatgaaatcagaaagattatagtccagtggccaaactatgtagaggcttgaaaagattttggctttaccctcaacaaaatggggcacctctttagtgcttcagcggagagagttgcagcattacctttcttacatttttaaaaaatttgtttactacattgaaaatgactatggtggtgttaaggaagaggaaatgcagagaagccagccataggctgttggaataatccagaagagaattgctggtggcatagatctgggtagtgacaatgtggtgagactggaggtgaattataagaaaaagatgagagacaacagtgactctgaggcttttagcatgaggaattgaaaagacagagttgccattaattgagattgaaaggctataggtcaaataggtatttgcataagcattaggagtcagttgacatgtagggtttgagacgtttactagacactgaagagatgtataataggaagatggaatgtacaatagaggagtct

SEQ ID NO: 867 - DNA, 200 bp, Homo sapiens
  misc_feature (1)..(200): DMR5:119068001
agagccatcctttctctcttatttttttttagaaactaaaaaagaaaaccaccaaagcacacagtcagtgagcattcaaaggatggaaggatataattcaattatagttgaggggataattagactcaataattctccgggattttttttttttttttaagacaaggtctatcgcccaggttagagtacagtggcgtgat

SEQ ID NO: 868 - DNA, 100 bp, Homo sapiens
  misc_feature (1)..(100): DMR5:120137201
atatttcttttaaatcaaattcagtatgctttggacatccatcccacctgtctgctagaaaattcaattttagtcattgttacggcctccttacatagct

SEQ ID NO: 869 - DNA, 300 bp, Homo sapiens
  misc_feature (1)..(300): DMR5:120564801
atggtgaaaccccatctctactaaaaatacaaaaaatcagccaggtgtggtggcgggcgcctgtagtcccagctactcgggaggctgaggcaggagaatggcttgaactggggaggtggaccttgcagttagccgagatcgcgccactgcactccagcctgggtgacagagcaagactctgtttccagaaaaaaaaaaaaaaaaaaaaatagaggtactgtgattcctcacctcatttttggttcttgtgatggtgcttttctgtgtacatatagttgctaaaattttgtgttcttgcag

SEQ ID NO: 870 - DNA, 200 bp, Homo sapiens
  misc_feature (1)..(200): DMR5:121647901
catctttatttctgccttcatttcgttatttgcccagtagtcattcaggagcaggttgttcagtttccatgtagttgtgtggttgtgagtgagtttcttaatcctgagttctaatttgattgcactgtggtctgagaggcagtttgttgtgatttccattcttttacatttgctgaggagtgctttacttccaattatgt

SEQ ID NO: 871 - DNA, 700 bp, Homo sapiens
  misc_feature (1)..(700): DMR5:124154801
attaaaagcataatgctcaaatgccgtaaaaaagtgtatatattaaaaaaaaaaaaggaaagaaaatgacacattacattacagacagaacaaagataaggatgacagcagacttctcagcagaaacaatgcaattgagaagacagtagaacaacataattaaagtattcaaaagaggaagaaaaaaaaacaacctgtcaacctaaaattctttacccagaaaagtatctttcatgaggctgaaacaaaggtaacataaagactttttaagacagaatttagctgaaagacttcatcactagtcaacctacattccaagaaatgttaaaggaagccattcaggcacaaggaaaatgatgctagatggaaatataggtttacacgaacgctgagcactggaaatggtaaatataaacttttttcttatcttttaaacttcagtagcaggtaattgtttaaacaataataaagacaacataatttgtcatttgtaacatatgtaaaagtaaaatagcccaaaacttcgaaaaagcctactactgcatacaagcaaaggtataacaacctggatgaatctcaaaataattatgctgagtgaaaggagaccaagaaaatagtatatggtcaattcatatgaaattctagaaagtataaattaatgtatagagacagaaaaataaaagcaaattagtggttactt

SEQ ID NO: 872 - DNA, 300 bp, Homo sapiens
  misc_feature (1)..(300): DMR5:125711701
tagtacaacaataaacaatacattcatgatcctgtgatactttacaagttaaaaacaaacacattttatcgatttaacaattttgcaccaatatattacaaaactctctctggatatttttaggataacaatctttgaaagttcttataaatagattgctgaattcttatggattcattgctgttcatgtgctgttaaaaccttatggaccgaagagtttattattttcttgtactgaaatctacttacttagcgaaccaatcacgtaacaacaacaataacgaagtaacaaaaccatac

SEQ ID NO: 873 - DNA, 1000 bp, Homo sapiens
  misc_feature (1)..(1000): DMR5:125817501
tctattgctccctctctcatcatgtgacacacaggtttctctcaccttcggccatgattgtaagcttcctgaggcccacaccagaaacagatgccagcactatgcttcttgtatagcctgcataacagtgagccaagataaacctcttttctttatacatcatccagcctcaaattattttgttatagcaaagcaaatggactaacacaggtggggttatgtcctgataaacccttgttaagttgaaaatattataattcaaaaatgcatttaacgtacctaacctttggaactttgtagcttagcccagcctaccttaaaactgctcagaacatttagaatagttcacagttgggcaaaatcatctcacacaatgcttattttataaaaggattgtatatctcctggttgttaccttcaagatcatgtccctgtctgggacctgtggctcgctgtcactccccagcatccagaaagactacagtactgcatatcactagcccaggaaaagatcaaaattcaaaatatggtttctactgaatgtgcattgcttttgcacaattgtaaaaattaaaagatcatgtctaacctttgtaagatggggactgtctgtgtatattttgtgctatcagcatgatgcaatatttgtgtacccctgaagattctgtacacattcacatcttggctctgcccatacttttccaatttgcctaaaatatcgttcacattcttcttcaatcacattgttctggttcttcaacatttatctcagctttcacctactgacttcatctcctgcctgagataggtgtccttttcctgtgcttctctttgtctgtatgcattgctatcataactcttaccattctgtacttcaactgttcattgatttgtcttactggacaatgagattctctaagacgagaacatgaggcacactttatctgctacacaaatcccctcacctgatacacatctggcactctataaatattcatta

SEQ ID NO: 874 - DNA, 200 bp, Homo sapiens
  misc_feature (1)..(200): DMR5:128557101
gaaaaaccattcaaaagatcagtgaatccaggagctagtttttcaaaaaagctaataaaatagaccactagctagactaataaagaggaaaagagagaagatttacataaacacaataaacacaatcagaaatgataagggggctattaccactgatgacacagaaatacaaacagccatcagagaatattattcacacc

SEQ ID NO: 875 - DNA, 600 bp, Homo sapiens
  misc_feature (1)..(600): DMR5:129163401
ctttttgagttgttagggttcttgtgcttgttcttttacatctttgtaggctgatgttccttcagtcttagaagttgctgacctttggatttttttcttttatcatatttggtgccccgttatccaatcaaactttaaggtataaggcagattcagccaactgccttcatttctgaaagattttaggaggtcaaggcttggttcccaacatctggactgtgtgccctaactctggacttgtgccccaactttgttctctggtttcttgaggttaggaatccactgggctgggtgggccagggtgctctcagactactgcttactacactctaatagctggtgtcagccaagcattatatagtgtagtgacagcaggatccatctttgtttgcatgtgccagtggcagcacatggaggtgcatatttgttggctgtgacagggttctggaggatgtttggttgcctgcctctatgccggcattcatcacaataagggaggcagcacagctgggggtggggatcttctgctggtgactgtgtgtacagttgcactggtggatgatgttggcatggggatggggcactggcaggtgctagact

SEQ ID NO: 876 - DNA, 900 bp, Homo sapiens
  misc_feature (1)..(900): DMR5:134314001
cgggtgtggtggcacatgcctgtaatcccagccactcggaggctaaggcggaagaattgcttgaacccgggagacaggaggttgcggtgagccaagatcacgccattgcactccagcctgggcaagaagagcaaagctccgtctcaaaaacaaaacaaaacgaaacaaacaaattaaaaaaaccctgcaactagttaaaaatatgtgctcattttagaatataatggtaatctatcactaaaacttataagaaaaatgctaaaaggtctgaccaaatcataggggcagacaattagaggcagtccttctgtgaatataattcagtaaatttaaatatatgccctactttggaaaatgtaaaacatgacactttgggaaacagattggcagtttctttaaaaattaaacatatgcctacccatgacccagccattctgttcttagatatttctgcaggaggaatgaaaatacaatgtgtgttccatacaaagacaaacatgaatgttctcatggcaactttatttgtaatagcgaaaagtgggaaataacccacatgtccatcaacagggaaaggattttttaaaatgtggtatagtcatataatgaactactactctgcaaaaaaggaacaaattgctgatacatacaaaaacatgaatgaatctctaaaccattatgctgagtggaagaagccagacatgaaagagtgcctactgtatgcttctatttatataagattctagaaaattcaaactaatctatgggaatagaaagcaaatcagtggttatctggggacagaaatggaagaaaagatgaattgtaaaaggacacaatgaaattttggagagtgatggaaatgttaggtatcgtgtgtgtgtttgtgtgtgtgtgtgttaggt

SEQ ID NO: 877 - DNA, 1400 bp, Homo sapiens
  misc_feature (1)..(1400): DMR5:134573801
gccctctcttgcggggctgggtcccaaggagggtgtgtctttggatcctggtgggggtatgtgcgtggagccaagggccactggcccccactcctacccttcaccatccaattagtaggcccagacgggggcctgcaagggtcctgagttgtgcgtcactaggcagagagccagaggttggaatgtgggcatcaggcctgccctcagggagctttctggttgactaggccacagcagttcaggagctgattgcatgtgaacaggtacagagaagaagtcctagtggctctctgctggtgctgaggcaggaagggccagaagctggtgagcttccctgaaccctggtgtgcctgggagtcagttccgaagaaggcagctgtcccagagatgtgacaggacctggctgttgtttctctctgaccctaacaggatttatgccctgcatccgcggtgtttttcactgtttcattcttattattcttattctcttggcgtcacatgcgtttagtggatctggaaatcaaaggctgaaggaagcgctgacattgatcgtatctgttaattgtggatattgccagacacagggcccttcttggagcgtatacatgttaagaagggcaacacttagcccccaaaacagtaccccagtgttgcgtttacatgcagcagaaatagctggatggagagagattttgagccagggtctgccaatgccacttcagcctcagggctgagctgggcctggagaggaaagctgctgagccaccgttggagcaaatgactgaggacctctgctgcccctacttctgccccagagctgagctgacctgattgtgctttggcatcaccacccactctggccccaacatctagccttgccaagttcaggtgctagtcatgaccatgtagagctcaccgtgtacccaaagactgtggcagcttcctggctgctggagctttccaggccccctatcttctgtttattcactcagccagcattaactgagcatggactggatagggttgctgcccttgtggaatgcaccatctggagagagagaggaatgtggtatcgcagacgctacagttgctgccagtttagggatagaagtatcagggatgtcttcccagaagcagtgatgctccaacaacatctcaggcacttggctgtggccacatatcggctgcagaaggagaagcccatgcaaggcacccacagttgaggaagcagagggtggcaagccacgagcagtgccctcaggcacaggattccagaagcatgggcaagagcctggagggtccacatccccacattggttctggggacatttgcaactccttgtcttgagtgtcaacaacaggcagctctttgttcagggcagggcagggtatttggagat

SEQ ID NO: 878 - DNA, 2700 bp, Homo sapiens
  misc_feature (1)..(2700): DMR5:135745201
ttatttctatagatcatagattagctgaaagcattccttatgggaaacaaagggacaggctctggcttgttatctgcagcaggaacatgtccttaaggcacagatcgctcatgctattgtttgtggtttaggaacaccttgagcggttttccacccagggtgggccacgtgttccttgccctcattctggtaaaccaacaacctccagcgtgggtgtcatagccatcacaagcatgtcacagtgctgcagagattttgtttatggccagtttctcatggcctgtttatggccagatgtggggggcctgttcccagcaacacagcaagattccctctggaaaaaaggccagcgggggtggtgggaagaaaaaaaaagattctccccctgcctcctgctttttaaggtccttctgagcaggctcctaaggtcctcccatccttgaatctgtgcttcacagcacttaaagctgtggtggtttagttgctagctcacgtgtttatatttcccctgttaagctaaactccactagggcagtgaccatgcctgatccccagctgtgtccccagcacagcacagtacctacgaggcggtcaacacacttctgttgaatgaacggaagaatcactcctcaaaaggaagaaaattatgtcaagaaaatagctggcagagccaggatttaagtctgaggactccctgactttgaagcttatcccattttctctgtggtcagttattgtcactcaaacttctgtcccggatcctcttaattaatgtcccttctgatgctgcacaggttagtcttggcctccatccgtgccacatcctttgctctcgccttctacagtcctcctccctgtcactcatttcaagctccgccctcacgctgcctacttttcatgctcagcgccctctaggccccactcctctccgtatacaataccttctagcccgtacccatcactcattctgcagatcccgctccctccctcccatgtgcagccttttccaggcctgcgcctctcacttcctgttgaggccttgcctttttcttacccgggtctggggtagcccccactccagaagtgcacagccgctggttggggcatccctgacatgaagcaccttggcctccctgggcactgagggcccctggaaagtctgcacagagacaagaccacagttacagcagctcgctacagttttgccctgccacccacgcctcctccaggaactcacgtgaggcaccttctccattctgtcgcctttgctgcctttgtggtcaccggaactgctgtcgtgcatttccgccttgcaggtacaatccgattctccggtgcaaaataagtctccaaaagagagggctgtgggcacgcgtgaaccttgggcggagcgactgggactcacttctgttccttttcagggatttcctatcatacatacttcggcagtgcatctcctaagaacacaggcattcttcatgacctcagtgtcattttcatacccaagagatttaatatcgatgcagtactattagtcaatagacagtttatattccaattttaattgttccaaataagacccctcccaccctagattcactcattgcctggagttacgtctctttggtctcctttaattcagatcagtccttcctttttttagggggagtctcatcacattgataattttgacagctccagacccgttgtcttatagaatatcccataatcttgatttgtctgatcctctcctcactcttgccccgtcattagattcaggttaagtattttttgttgttgtttttttttcctgcagaacacacttggataatgtcaatttgtcccgtttttggtaatgtgaagcttgatggcttggtaaaggtggtgtctgccccatttttccagtgaatggtaccctctgccatttgtaattaacaagtattctctggggtgatgcactgaaagaccatgtgaccatcttcttccctatcagcctttcactgagtgattttagcagcattgatgtaatatatataactatagatacagtttcatatatgatatctatatatatatctatatatcagttatataccctctcttttttttctttccttttttttttggagtctcactatggattcctggatttttttttaatttgtcttttataataaattattattatgctttctggtcaatttttccccccaagtgtggtcagtgaagccgcttcaagacagttcttatgttctttgggcactaatacaacttctttgagcattttcttgctttctgatacaataagatatttcagtcatcccttctcactgctgcagtcatttcttcggggagccttggttacttttagcagacaacagttcagaaaccaagatctggatgccacaactactcattgctactggaatgtcattgatcacaggtttggcacctggaatattaatgagtgaacaaactttacctggccccagacactaagaatatagaaacatttattaaactgcaatgtatcagttgcctgtcagtactactaattatagccagcattttgtagaatacttactatttgccatctaccatctttgtgctttcgtgtgaattacctaatttatgtccttttatagtcctactgtctccattttggatgaggaaactgaggcttaaagtagttaaactact

SEQ ID NO: 879 - DNA, 900 bp, Homo sapiens
  misc_feature (1)..(900): DMR5:136158801
aggcaggagaatggcgtgaacccgggaggtggagcttgcagtgagccgagatggcgccagtgcactccagcctgggcgacagagcgagactccatctcaaaaaaaaaaagatggaagatccaagggaaaacgtagagtgaataaattatttgattatttgttgtatccaagaaatagtaatgataggcgtttaacagatctgttggaattctggaaatattagtggaatgtacttaaaattaaacaaatgaagaaacaaggcaatggttaactttagtaaaaacattgttcaagaaaaagtagactcatagtacacttgattcagcaatgaattacatgtatgtatatatgaatactggatattgatttaagcaaaatgttatatttaactctattttggggatgggagtgggatagaataataaaagaatgctgcctcatttgccctaagagcaagtctacaaataatatcttgactaataatagcaatataagcatattatttagcagtacacaaagtaaatgttataagagatggctaagagtttaaatttgttttctatagaaacagtatatgggagggggctaggaattgcagtttttgttataatctctaatagcatgtctttttttaaactgtccacatattaacattattttggatgatataaaataattttttaaaaatcgtgcatagataatgtacaagtgaaagagaagccagtgattttagcatacctctaaagaaaaaaaaaagcaaattcttactgaactgaattcctgagtagttatttcactaagtctctcagattgctagcctgctaaatgtagaaattcttgctgcctaatgcccttctctccaatggcagctgcctcttgttctgcgaggggaatagcagt

SEQ ID NO: 880 - DNA, 800 bp, Homo sapiens
  misc_feature (1)..(800): DMR5:137662801
gagggaagtattggcaatatcgatcaaaattttaaatgtgcattctcgttgactttaaaaataccacttctagagctctagcttatactcacatcagtgtaagagaacagaatatgtgctccaatatctttgctgcagcatggttgtaaagggataaaaaaatgaaacaacctaaagtccactaatagagaaattattaaaggagtatccataccattagatacagttatccctcagtatccttgagcactcgttctttttttttttttttttttttttttggttcttactctgtcgcataggctggagtgcagtggcacgatcttggctcactgcaacctccacctcccgggttaagtgattctcccgtctcagcctccctagtagctgggattacaggtgtacaccactacacccggctaatttttgtatttttagtagagacggggtttcaccatattggccaggctggtctcaaactcctgacctcaagtgatccgcctgccttagcctcccaaagtgctgggattacaagcgtgagccaccagccccagccccagggcactggttctatgaccacccacagataccaacatctgccaatgctcaagtcccttatataaaatggcatagtatttgcacataacctccgcacatcctcccatatactttaaatcatcctcccatatactttaaatactttaaatatatatatttaaagtatgttaataataaatatactttaaataattatataagattgcttataatacctaatataatacccatacatcacttca

SEQ ID NO: 881 - DNA, 2900 bp, Homo sapiens
  misc_feature (1)..(2900): DMR5:139223601
aactgatcacatgctaggcctgaaagcacatctcatcagaaaccaaaaaatcaatttgttagcagccgaacatatctgagtcacaagtcacatggcaccagagtatattaccagtggcgaatctgtatgggtctgcagcaatgttgattcttgcctcctcagaggaaataatttgaccaaggggcataagacagaaggagagaccgaggcaagttttagagcaggagtggaagtttattacaaaactttagagcaggaatgaaactaagtaaaatagcctctccctctccctctccctctctttccacagtctccctctgatgctgagccgaagctggactgtactgctgccatctcggctcactgcagcctccctgcctgattctcctgcctcagcctgccaagtgcctgcgattgcaggcgtgcgctgccacgcctgactggttttcatatttttttggtggagacggggtttcgctgtgttggccgggctggtctccagctcctaacggcgagtgatccgccagcctcggcctcccgaggtgcgggattgcagacggagtctggttcactcagtgctcaatagtgcccaggctggagtgcagtggcgtgatctcggctcgctacaacctccacctcccagcagcctgccttggcctcccaaagtgccgagagtgcagcctctgcccggccgctaccccgtccgggaagtgaggagtgtctctgcctggctgcccatcgtctgggacgtgaggagcccctctgcctggctgcccagtctggaaagtgagaagcgtctctgcccggccgccatcccatctaggaagtgaggagcgtctctgtccggccgcccatcatctgagatgtggggagtgcctctgccctgccgccctgtctgggatgtgaggagcgcctctgcccggccgtgaccccatctgggaggtgaggagcgtctctgcccagctgccccgtctgagaagtgaggagaccctccgcctggcaaccgccccgtctaagaagtgaggagcccctccgcccggcagccaccccgtccgggagggaggtgggggggtcagccccccgcccggccagccgccccgtccgggaggtgaggggcgcctctgccccgccgcccctactgggaagtgaggagcccctctgcccggccaccaccccgtctgggaggtgtacccaacagctcattgagaacgggccatgatgacaatggcgcttttgtggagtggaaaggggggaaaggtggggaaaagattgagaaatcggatggttgccgtgtctgtgtagaaagaagtagacattggagacttttcattttgttctgtactgagaaaaattcttctgccttgggatcctgttgatctgtgaccttacccccaaccctgtgctctctgaaacatgtgctgtgtccactcagggttaaatggattaagggcggtgcaagatgtgctttgttaaacagatgcttgaaggcagcatgctcgttaagagtcatcaccggccgggcgcggtggctcacgcctgtaatcccagcactttgggaggctgaggcaggcggatcacaaggtcaggagatcgagaccatcccggctaaaacggtgaaaacccgtctctactaaaaatacaaaaaattagccgggcgtagtggccggcgcctgtagtcccagctacttgggaggctgaggcaggagaatggcgtgaacccgggaggcggaggttgcagtgagccgagatcccgccactgcactccagcctgggtgacagagcgagactccgtctcaaaaaaaaaaaaaaagagtcatcaccactccctgatcagggacacaaacactgtggagggccccagggtcctctgcctaggaaaaccagagacctttgttcacttgtttatctgctgaccttccctccactattgtcctatgaccctgccaaatccccctctgcgagaaacacccaagaatgatcaataaaaaaaaaaataaataaataaataaaaatacatttggcactgggtgtgggggctcacgcctgtaatcccagcactttgggaggcagaggtgggcagatcacctgaggtcaggagttcaagaccagcctggccaacatggtgaaaccctgtctctactaaaaatacaaaaactagctgatcatggtgatgtgcgcctgtaatcccagctacctgggaggctgagacacgagaatcgcttgaacccgggaggcagaggttgcagtgagccaatatttgagactctttctcaaaaaaaaaacacaaaggaagtaaagtacacttgagagatcacatgcatgggttttatatgttgccatacttgtagggtcttgagttatttctcctctgattcttcccttggggccttggggtgggctgtccgcgtgagcagtggactgctagcacttgggaagggagcatatgcagtgtgcttactggagtcatagcatgctcacttgaggcgttcttcccttaccagtctagcatctctagagcaaggtcatataccagttaaactccaccattttgcctcttaaactgcattcttgggccccctcgctcaactcctgagatcttaccagaaagccgctgatagcagtttcaagtgttttctatatattaggagactgcctttccctggcactggctgtcaccaactatttgtttagagagacagttaacaactgcctaaccatcacctgatggtcacctggcattcctgttgtatgagagcagccctctcctgccctgcttatgcctgactaagctacctattgtaacaaattgaccactttctctaatcaaaatagaattcaaggccaggcacagtggctcatgcctgtaatcccagctctttgggaagctggggtgggggaat

SEQ ID NO: 882 - DNA, 900 bp, Homo sapiens
  misc_feature (1)..(900): DMR5:139636101
ctggggactgaaactggtgcttcagcttctctagggggaaatggagaaatggaaagggggactgacaagggatagtccttaaggagtttatttgggaggctctgggtccctttgtaactaggtgggtgacctttaggagggaagtgctttgtgttctacagctttctgagagtggcaggaaatggggccagtagcagtgcacactagttgggttgcacctggtgagagattaggggtggtttccccaccaaggtctctgagccagagctttcagctgcatgagcacagcctgctccccctgtggaggggattctggggtgggtgtggttgtatactgggggaagtgagaatgtggcctctctgtgggtgagtgcagcaccgtgaattgtgtttgtaacacttgagttgtgtttcccaggtgtatgtgatggcagaactagttttgctgctggggtgaatcaggttcctggaagggactggactaacatggagagaatgatgctaagtagttacagtcattattatatacacatgacttagtagtatagaaccattagcaatgaccaagaccacctgtgtgtcgagtgcttaccatgtgcctggtgctgtgctaagcacctcacctgcagtggctcatttagtcctgtcagaaccctgcaagttcatgctggtttgcctggtgtttgtttattgtgccatgttgggtggggtataattttattcaagttggaagatgcaaaacagctttatccctctcttagttactggggtgcaacttatggcagcatttgcccctgtcatattctatacttgggctcctggtcccatccttttgccagtatgggcaccattgtgttgtacaacgtagagacctaatttgacaatgttctttgaggtagt

SEQ ID NO: 883 - DNA, 100 bp, Homo sapiens
  misc_feature (1)..(100): DMR5:140052001
acaaacacacacacacacaccttctcctttaatgtcatccttcccctttgtatctcagaggctcagtgccccactgctctcttggctttctcaattctaa

SEQ ID NO: 884 - DNA, 200 bp, Homo sapiens
  misc_feature (1)..(200): DMR5:140183201
gagggatggacctgtccctttctagtgtgtcctctcaacttggcagggggcagagttcttcccttttctctctctccatgccctaaccgctcctttcaattccccaactcactttctgtgttcacagctttcttcccttttcctttcccttctgttcaatactgccctctcttttgagcctctctcttgctgggccccat

SEQ ID NO: 885 - DNA, 700 bp, Homo sapiens
  misc_feature (1)..(700): DMR5:140511701
aaatgcatgaatcttaaggtacatggtttagttttgataaacgtatacatacatgtaacccataccccataaacatataaattatttctgtaaccctagaaggttccctcttgcccacttttagtcacttccctgccccagaggcaagcatttctctgatttgtatctccatcacactaattcttaaggatgttttagaaccttggtaggaagggaaactatgcaagcttggttacattaaaatagatatgctggccgggtgcggtggctcacgcccataatcccagcactttgggaggccgagtcaggtggatcacctgaggtcaggagttcaagaccagcctggccaacatggtaaatccccgtctctactaaaaatacaaaaattagccaggcgtgatggtaggcacctgtaatctcagctactccggaggctgaggcaggagagttgctagaacccgggaggcggaggttgcagtgagacaagagcgtgccgtggcactccagccggggcaacaacagcgagactcccatctcaaaaaaaaaaaaaaaaagatatgcttagaattgattacagatctttcaacccttgataatggcatttagaaagtgttttatttagattcaagtcctaaggctcagaaagttgtgatagtccaccttgtttagttagtgaagtagaggcaaagtaagactttga

SEQ ID NO: 886 - DNA, 200 bp, Homo sapiens
  misc_feature (1)..(200): DMR5:141193901
ccttcacccaaacctcctacaccctgttcgtccgcgagaacaacagccccgccctgcacatcggcagcgtcagcgccacagacagagactcgggcaccaacgcccaggtcacctactcgctgctgccgccccaagacccgcacctgcccctcgcctccctggtctccatcaacgcggacaacggccacctgttcgccctc

SEQ ID NO: 887 - DNA, 3800 bp, Homo sapiens
  misc_feature (1)..(3800): DMR5:141644401
ctgtccggtgtagctgtacagggcctgtgccaggaatgctacagaggcccaggagagacggtgagagggaggtgggtagcagtgccccaggaccatgacaccccagggctacaacccctaacaatttttctccatacccagggtcctctaacccaaaatttccctttcttacctgtgggctctgccccgcagggattgtcactgtcttggctgctctctgggagggagaggtccgggaagttgagatatcgctcagggacaaagcctacctcgccgtgctggttccgagcctgctcacccagcaatgtgaacagatattagacttacctcagcagtccatgaccctggctctcttctactcaggcttctagctttgcctagaagggtctatggaggccacagagaagtccctcctactgcccccaacccaaggtcagagcccggggtcccatacccaccttgacccattcgtcagcatctccctcctctatgacctccagccactcaccctccgtgattgtcagctcatcctcacgccctgcctgggccacacacgaaggattcaggacttggctgtcccccacccttgcccatcagaggtccccacccccattcatacctgatagcgaaataccacgtgtgcagggcaggggagggccctcgtggccagggcttggggggcaggctcctcaaagagctctcccgtctcctcacattcctcaaagtcagaaagctcagcatcctcagcctagaggggcaaagaacagacctcatatggggcccactctcaagcactggttctatctcccactcttccatctttcctctaaaggacaccatggatcctccaaggcaggtgcacccatccactcaccatgtacacaaccacagtcaccacagagcaggataatactaacagtaatagagttacagtaattgagtgcatactatgtgccaggtacaatgcaaagtatcttgtgtatattgtctcatttaatcttcataatgacccagtgttaatagttttgcacaactattaacctcactttatttacaaggaaactggggttcagaaaggttaagtcacttttcgagattgcacagctcataagtggagtggctggtactcaaagcccttacagactgccccagaaccctacttcttaatcattctattatgctcataataaaaatgtactgaggactctatgccagaaattatgcaaagaatgatatatgatgatttcacttaagcctcgtaataaccctttgagttaggcacaactgtgattccagttttatagggtttgccttccactggagtttttcccttctaagtaaggatgggtagtgttgggggaggagctcacggttggagagaggtccctctgggacagccgagcctcactgagccgccgctcctgctccacctcatcctgggcctgggtcatggctggcttcagccagcgctccacatctaagccagccccctgcagcagggccagccgggcagcccccttcacctggctcacctgccatggggaggaagtaagttagtggaacctggctgacggcagtgtttactctctgcttctcccttccttcctcccaccatcagaaagaggagtagagggagtggggcttgcctgagaaggtgggatctctaacctcaggggtgtgcctcacctgtgcccggcggatgctctctcgcacttcctgtaacctctgttctatgcttggagcctcccgctctgaagcctgctgccgcctctgctccagtcgttgcagtacctggttgggaaggcagagaacaggggtgggtggaaatactgtggggcatgacttactatgggactggtactttgctagttgcatcacatacattatgtcatttaatcttccctatgaggtgggtgctattattggccctactttagtgatgaggaaattgaagtccagagaggttaagtcactcccttacctggggctacagaactaggaagcaacagaagagaatttgaacctatgtcggtctagctccaaaaactgtgctcttaactattgtgccacactgttaccttaaaatacctttccctcccctctgtagctccatgacaccctcaatggctccaagatcccctctctcagctcttcttgctgagacaagaaggtgcacatgacacctgtgcccccccacctcacccgatgcccatggttctggatcttgtagtcacgggcagctcggctggtcaagcgctgaacctctttctccaggccactcttgccagccacgccttctgctccccactccaggacacacacctgaatgggtcagggggtgctgtgaggaggacctgaggctgctccttctctccagttccctcctttttccactctatcttgacctccaaggacaaggacaaagagaaaggggcacatgcctacagtcatggacacaggtaatgtggacacagagatacagagcttcagaaatgggatccaggtcaagggacagaggtagaatgaaaaggatggcgcagtcaagtgactgaaaggtggactgaggtgtgtttttttgtgtgtgtcctgttgggagggaggtgagctggagttctgaaaccccctctccacggtgtacactcactaagttaacacaaaacaaagataatggaggaggcctaaatcataatcgcctttatatgtggcctggttccaacaagcaggaagatctcacctgatcagtccctgctggctgaaactgctgaggtggggtgggggaaaatacaccaggctcctgaagaaacagcttcaggtcttgctcccagcttacctaggggttgggaaaagtcaaagtcactcattcactgactcactctccaaccctgtccctagcacttcttggaagaaaaaggacaatgtgtgaagcaaagagggctgcattgggagggaagggtaaaaaggatccccggggaagctcttagaggccacagccctcacctgggaggttgtctgctccccgcggtgggcatgctccaggatgacctctgcggcttccagctcagtgtggctcagggaggtcagggggtccctcaagtgctctgacagctcactgaccagggcctagagagaaccccaagatactgacaccacccttcccccagacctctactgtaaaataggctcgttccagatttgacaggtgatgggcatgaggtataggaaggagagaagaagacattcttcatgagaaaggccctcgtgtgcagagcacttagaagtttaaaacacgttcacatccattctctcctttgagccccactagtgctataagataggcagagaaagggttatccctgatgaggaatctggggttcggaagagtttaagtgtactgtacaatgccatgcagccagctaggagcagaaccagagtgcatgtatgtatcatctactcactctaaacagacaagatcccctgcaccacccactgtcatggggatcaagaagcagggggaggtcctcctttccctccctgctgagggataggggtgtctgggttaaaactggccttgagcagagctggcagttcctcctggtagtaatggtcgaggtgggcattggtagccaccaagttaagcaggtactcattgcgggctgcttgcagctgctgggagtactgggctgactgggcggacagctaggagggtaaactgatgtcaataggaagccctagacccccagagtccttccaagaccaattgagaagccagatccagaatggattctcacattattgagtgc

SEQ ID NO: 888 - DNA, 800 bp, Homo sapiens
  misc_feature (1)..(800): DMR5:142129301
tttaggtgaaccatggtcccaagaactctatttaagtaattcctagttcggtgtcccaggagcatttggctttactgcacctattttggccacatgtctttgtttaaaaggaaaaattatcttaggttataatacagctattttgggagtaccttaagtttaacattagattactaggattcgaaaaaatgtacccagatggtagatgctgatgagaatttgacacaagaattcatttgaaattgaagcttttgtagtattagtcagaaaaatttattgacatctggttttgaacagcatagtgagtggagattgagatgatcagttaaaatttaatggattgtggccgggcacaatggctcacgcctgtaattccagcactttgggaggctaaggcaggcatatcacctgaggtcgggagtttgagacgagcctggcccacgtctactaaaaatacaaaaattagccaggtctggtggcatacgcctgtagtcccagctacttggagtctgaggcaacagaattgcttgaacctgggaggtggaggtttcagtgagccgagatcccaccattgctctccagcctgggcaacaaaagcgaaactacatctcaaaaaaaaaaaaaaaaaaagaaagaaagaaaatttaatggattatggagctctacttcacattagtacacctcggtctctctgtttttctgtctcaattcaagatagagttctttgtagcggtatggtttagaggtggtatgtattttacaagtatgtcagttggctctgtatatcctgatgataccga

SEQ ID NO: 889 - DNA, 200 bp, Homo sapiens
  misc_feature (1)..(200): DMR5:142659001
gagaacaattacataaccaacaatgctgaagccttgcatttgctggtgttggcgtgtgttgggggaagaatgtctgaaatgagctctcattcaggttctttatcactttggttccatggtcgccatccttgttatagtgaaacaggcatgtatttttttttttacaaataaaagataataattttttttgtatttttctt

SEQ ID NO: 890 - DNA, 100 bp, Homo sapiens
  misc_feature (1)..(100): DMR5:142777401
aggaagaactgttatcaccattgagctactggggaaagcaagttgtaaaggggactttgttatcctgtcaaggtcattgcatttctaaaaattagccagt

SEQ ID NO: 891 - DNA, 1000 bp, Homo sapiens
  misc_feature (1)..(1000): DMR5:143529101
gagataatcaaatatctaactaaaaagaattcattgcagtaggtctaaaggaaaatattgtacatctatctacatcaatgcttaaaacttctatttttagaagtagaaagaaatgccatagacgaaataaaaagatgaatgataaacgagaaaaaaattcactgcacacatgacaaaggccactgttagacagagatagcttataccagtcactgcacaaaacagaaaaattaaaaaatgagcaaaagtacaaagcagaagttcacagaaaggaaaatataagcaataatcgtgaaaagatattcaacctcatcagaataaataaaataaatcactttcaccaaattgacaatgttgacatttggtaaaactcagcattggtgagtatgtggggaatatcagcactgttgtaaacgattggtataaactttttcaatggaaacttggcaatatttagcatttagcatttaaaatgagtattttctttgctttggcatttcaaggtttgaaaataatcttatggttatacttactcctatatgcactaatatacatttgaagatataaatttttatagtatttatttggttatttttataatagcaaaaaattaaaattacccagataaccttcattagggaaccaggtttataattgtggcccattcagaggagtatgaaccctgaaatatcatgcagagggtggaaaattaaacagtgctgagaaagagaaggataaacgccagccaattcatagactattaaatagagcaagaaagtgggggacaaaggaagaacatgacatcacagtgacgaattcttcacaaaaggtgatagatttgcactaaagagcaatgggatatttgtaaagaagatatcatgttattagtgacctatttgtatcccattggttttctaacctcaagaacatttaaaatctcagacttaaaatttctatctaaacataacaattgtaagcacactgttcatgatacttgctc

SEQ ID NO: 892 - DNA, 2600 bp, Homo sapiens
  misc_feature (1)..(2600): DMR5:143586601
tgcctttggaaaattcaaaatgtgtcatttctgtctcaaaagtcctgtattttgtcttgcagttcagagactggagatgggcagtgtcacccatatcaggtatgtggttgagtaatgtcttagaaacaaaatatgttcctctttggttccagatgcttgggtttctagagtctggcaggactagtaatcttgaatctgtctacttcacacaaagtttgaccaagtctcacagggtttgggaccctcacagttttgtcaggaaaccagcctaccttttttccctactcctcttccctccctccctcttgccattcattcaaacagtggtacaaagaacactaacaggtgtcatacactgaggtatgtgttgggaatagagatgagtaaacatggtgtctgcctgaggagcttattccctaataaaggagtcaaacatgaatagataagttataatatggaaagatgagtgttatgaagaacccagaactgtgggagcctgagtccagctgcagttccctggcaggggagtgtcaatacccttccagttaaggtggggtggagggagctcaccaaatgcctccagagagccaggcgccagagtttatcagctatcaggaagttctgataccaagaataatattttagatggaaagaaatactttcctgcagtggtttgaggagatggtgttgcaaaattttcacattttcttttatatactgtagtttagagaggaaattatccttttcttctgggggtggggggtaagttggcagatttttctgtcaaaattaaaaatagacataaaaatacacatccttggactctgcaattctatttctaggaatattccctcagatacagtcagaagaatatacaaggataaatgtacaagtaagttgattataacattgtttgtaacagtaaaaaactaaataatataaatatctaattataggggaatggctaaataagttatggtatactatggaatgccatgcaacagtttaaaacaatattatagagctctatatactgaaaagaaagggattgttaaggaaaaaagaatgctgcaaataattgatatagtctgatgtcaactatgatttaaaaaaattctacacacatacatatacatccatctatctgtctgtctgtctgtccgtctgtctgtctgtctgtctatctatctatctaaatatatggaaaaaaagcactgagggatgtgcactaagctgataaaagcagctatttctagggaggggaataaggttgggagtggggaatgggatgggtaaaagggatattaacttgtatatgttgctatatcactggcatttttcctgaatatacattcttgtatcactcaggctaaacataaaaacattttcaattcctatggcatctgaaatgctaccatgggcataagctgcataaaaatggcctttaatgcttatatgctgtggtgggaacgtaaattagttcaaccattgaggaagacagtgtggcaattcctcataaactaaagacagaaataccatttgacccagcaatcccattactggatatatagctgatatggtttggctgtgtccccacccaaatctcatcttgaattacagttctcataatccccatgtgtggtaggagggaatccagtgcaaggtaattgaatcatgggggcagtttcctccatgctattctcgtgatgctggtaagttctcaggaaatctgatggttttataaggggcttcccccttcactccccctcagccctgcagaaccatgagtcaattaaacttcttttctttataaattacacagtcttgggcagttctttatagcagcatgagaacggactaatacaatacccaaaggaatataaatcattctattataaagatgcatgcatgcgtatgttcactgtaacattattcacaatagcaaagacatggaatcaacttaaatgcccatcaatggtagactggagaaaaaaatgtggtacatatacaccataaaatactatgccagcacaaaaaagaatgtgatcacgtcctttgcaagaacatggattgagcaggaagccactatccttagcaaactaacacaggatcagaaaactaagcgctgcatgttctcgcttgtaagtgggagctaactgataagaacacatggacacatagaggggaacaacacacgcttgggcctattggagagtggagggtgggaggaggaagaggatcaggaaaaataactaatgcgcactaggcttaatacctaggtgatgaaataacctgtacaacaaacccccataccacaagtttacctatgcaacaaacctgcgcatgtaccctagaacttaaaatgaaagttaaaaaaatggccttcaacattctgaaagttccccaaagggaaaagacctcaaacttgatttttctaaatcatacctaaggttctaggaaatgagttagacacacagcaatgctcatgcaaatgcgtgacacctccaagctgagcttctttgctctgcgcaaatggtaccacagtgacaatgtgaaaagagaaaagtttggtcaatttaactagctgcttcaactaccaa

SEQ ID NO: 893 - DNA, 800 bp, Homo sapiens
  misc_feature (1)..(800): DMR5:146354401
cataaactcagcctaaacatacacttagggtacttgcaaggcgaaaatacccaaaataagaaaaggtgctttggaagtcttcactatttggtgttaagaaaaaaagcatcctagtaatcaaattcagaattgtgctgggcctcctctcctgtattttatgttgtagtatttttgtttttaattacatacaggggaaaggataacaaagtatttgatgctgagcacttctaaagatcttcatttgacccaacataaaataaatagaatgattaaaatgattatgaggctgatcatgcttgtaatcccagcactttgggaggctgaggtgggtgaatcacctcaggtcaggagttcgagacttggccaacagggcgaaactcagtctccactaaaaatacaaaaattagccaggcatggtggcgggcgcctgtaatcccagctactcgggaggctgaggcaggagaatcatttgaactcagaaggcagcggttgcagtgagctgaaattgcgccactgcactccagccttggtgacagagtgagagtctgtttcaaaataaataaataaaatgattatgaataccctgaagtgcacatttatttatttcttttaattggcccccagattatagatatgtatgatgtacgacgtgatattttgaaatatgtatgcattgtggaatggccaaatagaactaaataatgtctgtgtgacctcatatacttaccattttctgtagtgagaacactttaaaatccactctcttaaagagattttcaagaataaaatacattgttatg

SEQ ID NO: 894 - DNA, 900 bp, Homo sapiens
  misc_feature (1)..(900): DMR5:147243301
gttattggatgtcccttgagataagctattcttgccagaattcatcctgacacttgtatttcatgttgttccatctgatatctgatcttgaacacataattttattagttacttatgttgatctttattcagcaaaaacaaagtaggagattttcaggctaggcatggttgcttacgcctgtaatcccagcacttcaggaggccgaggcgggcagatcacgaggtcaagagatcgaaaccatcctggccaacatggtgaaaccccatctctactaaaaaatacaaaaaaaattagctgggcatgccagtgtgcgcctgtagtcccagctattcaggaggctgaggcaggagaatctcttgaacctgggaggtgaagtttgcagtgagctgagattgctccactgcactccagcctggcaacagagcaagactctgtccaaaaaaaaacggcttgcttatttgattatataagatatctttcataaattagatctcaaattatactattgttttgcagttttagcttttatgttttagggcaaatcttaagtcctaattactttttttttattattgtggtaaaatgtatataacaaaatgtaccatttaatcattttagaatatacggtttatgacattaagcacattcacgttatcatacaaccatcaccactacccatcttcagaacatttctcttctcgaattgaaactttgtacctctgaaacaataacatccacattccatcccctccccagtccctgttaacaaccatttgactttatgtctctatgaatttaactactctatgtacctcatataaatggaacatataagatttgttcttttgcatctggtttatttcatttagcatatatttttaaggttcatccatgttgca

SEQ ID NO: 895 - DNA, 300 bp, Homo sapiens
  misc_feature (1)..(300): DMR5:150042401
ggaaagggcatttgtattttatagagggcagtgaggggggaaggcccctctgatacagtagcatttgagtagagatctgaaacccatgtggctttgtggaggaatattccaggcagagggaacagctcgaacagggtctgaggaaggcttgctgggtatgattgaggaccagcaaggagaccagtggtgcagctcagagtgtgggagggagggagggagtggtggggtgtatgaggtccagacagtgcaggaggccgacgctatgtagggtaacatgggctattttaaggacttacacag

SEQ ID NO: 896 - DNA, 1000 bp, Homo sapiens
  misc_feature (1)..(1000): DMR5:151531101
tttcctagttctctctctcttcaagagaataagggaaaattaaggggtgccaggatgtttggagtggatgtggggactccaggagggaagcaggcagccttgtccagggttgcttaagccccagattccagcaagggctccctgcctctgcagccaagccgtttctgcctcctgcgctgggcctgagctgagaccatgaagccgctaactgtgtgggaggagagtggatcactgagggtcctggacacagagacctggctgcggacgtgggagggtcccgtttaagggaggctcccacataagctggccccagggtggaaggagggacctggtactcggagagaagcagaagagaatggagaaacgaccagaggaggtctgctctgggaggcgctgcacagggtagatacccacacaggggaggaacccagcgctcccagaaaccctgtacgcgatgctttggggcttggtggatcaggctctcacctgtgcgagcatccaggcggaacctgccttgctcgttcccgctgaccacgcggtagccggtcttctctgcgcccgggcgagtgagggtggccagctgcagcacctccgtgccaggtggggcgtcctcgggcacctgcacgctgtgctcggtgttcaggaacacgggcaggtagtcttctaggcccaccaccgagactgtgacggtgcccagcgtggacagcggtattggggtgcccaggtcagaggcacggaccgtgagctccagtggtgcctggggcctgacctgcagcggcttttccaggcggatcacccccgtggtggcgtcgatggaaaagtggccttcggctgaatccggcagagagtaaaccacctgggcattggcgcctggcagggagaccaagggtgtgatccacactgagggcgcctcctctggacctgcctgcagcaaaccctgcagccacaggaggggctggggaggggctcccatgaaggcggacaagctggcttgggtata

SEQ ID NO: 897 - DNA, 400 bp, Homo sapiens
  misc_feature (1)..(400): DMR5:153084201
tcctgattgcccttaataaacctggctaaagttctggcaccccttccatggcagcacatttctctagaggccacaggaataaaaaataaaaagcctctctctagaatgttagcagaggatgccaacacttaaaacatgagtgggagggaacccaaggaggagagagaaatgctgagagagtaagagaaagaaagcaagtagcaacagagagcatgggaaggctgaatacctatgttgctatctaaatagggcaacctgcaggatatttttttctcctgaaaaaataagtaaatggatcacctgcaccgataatgcatccttccctttatttcacaagaaagaaaagtacgttaagtatatacgcccagaagcgcagttgcttaggagtcctgatcaagag

SEQ ID NO: 898 - DNA, 3100 bp, Homo sapiens
  misc_feature (1)..(3100): DMR5:158288601
cccaggattccagaatccctttcctgatgtgttcccattagggtaggctgcagaaagtttcttttcataagatctggagactggagctgaagcagtagccattttgtagcttccacacactgtcagttgtctgtaggctcacctctttggcatgaggcagcagctaggcaggtctgcatagcttctccaacttttgggctatgtgtgtgcctatctccaagatgaagggctctggcctctgtaggaaaagcagaccatcaaggtcagaggcagtgagcactgacataggttccagtgcatccttgtgagcatcagcttatgcagtggctttcagcttcttgctctcctttactttacatccatcttccctttccccggcctgccttgcaggccctaagctccagtataagatgggaagacaacagccttgagaaactgcttaaccagtgccacaattaagtaaagtcaaatccctgtaagaaatcctttcatatgcttgtatacatatcccttctagtagttctgcctctctgattgagtcctgacagatacagtagatcctcagctcctcaccttgctgacagagtgattccttacttgctagcaagatggtaagtgattctgtcttctttttggtatccagatcctctgctcaaacctgtattctttgggtggaaatttcttgtatttttggtcttctttggattaccctctacctataggtacagtaaattaattcacgcgaaggtgttagcagctagaagaccattgagtgattagggacaaccccccaaatgtcctcctagcctgcctttatctcctactgctcctctctttgctcatgacagtgcagctatgattatcttcttccagagtcttgaatatgccaatatgatttcatatttgccacttcttcatgtactgttccctctacctggaatgttcctcctctgcctcatcacatgtcttctgtcttcactttatctttaagtcttattcaaaatgtacctttcttgaaggggccttcccaaataaccacatattacattgaacctgtggaagcatgaaagttatttggaacattgtcttaaaaaggagctagaggctgtatttgggtttgaaaggagagtgtgcggtgattgattagcaatgtctgccatgggtgtaggatatagagctgtgggattgtttctgtgtattttttctcttcggcttaaaggatcttgcattaactaaaaccccaaattctagtgttgctgctgacttgctatatgatcttcacttattcatgtgaccagtgcctaacctacctcaccaacaagtccccacagttaggtcatagatcatcagcacatgcaggtagtggtgggtgggtgggtgggagtggaggagggtgtccaaaagataaatgtgaatattcaatgacatttgaagttcttaaggaagcaagacagttttagtgccttatgtttagaaattaaaaagaaaacaaaagaaaaatccacatggaaatgactcctggttgcccattttctgagggaactaaaaggaaggaggaaagaaaggggatatctcacagtgctggttgtgcagttactaaccagcactgtgaactttcagcaagtccatcaacctctcaggacattggttttctgatccgtagcagacatattgcacttactctaagagtcagtcaaactttctataataaaaatgttggcaagatggagagattctgaaagtggtgaaattaaaggataggaaagagattctctggggaaaatagtggacttactggctgctgatgcaggactgcagcattgctttagggaaggggggagtcttcaaatatctttcccctgatgtctctcaccagttttgatctgtgacttcaaattagtgtgtgaatgacaagacactacaaagaaacattaggtgtttctgcaggcatcctttgtgtgtccaggggaggagagagggcagagctggggatcggcgttagtccagagagataccactgcctgccaactgccccttggggagctcagcagtaagctggggagttacatgactccaggccagtctgatcaataaagggcatccttactatagcaacacagcacagtggcggggctgccgttgatcacgtgcccccttcccccgacgctgtggagtttggagcaggcaattagaacttggaggcagcttccctcaaaggttgaagagctgacagatgagcaaagagctttcctgctcctccatcccagtgtagccatggaaagcttttagcttactcacctttggtattagccattgttgggttatattagaaaaatcaccgaagtggcttgggaatgaggcttagcatggagaagtcaccaaaagaagagaattcttttaaataatagcaataacaataatcatagttaacttttattgtctgcgtgactatttgattaatgtctccccctctagcctggagtttccagtagtgaagagaagacaagtattttcacactcttttatatccactgtcttgtggccattccatatttactgaatgaaagagtcaactgttaattgtgagttaggcaccattggcatagatcctcttgttcagtcctgacaataatcctctaaggcaaagactgttattacccccatttgattgacagagaaaaaagaggcagcaagggttttatagttattaaagcagggtttcttaactctggcaacactgtcattttcggtcagacaattgttgtggggggctgtcctgtgcattgtagaatgtttagcagcacccgttgcctctattcacttgaagccagcagcacagcttcccctccccatttgtgacagcaagaaatgtctctagatgttgccaaatgtccccttgagggagaaataacccccactttttagtaggaaagatggcacgtcttgcctgcccttcaccgtgtgcatgaatggtgatatgtgctacatttattttaggtgatgtgttgctctggtgcagcttaagtgggggtcttttgttaggctgcttgagtgtgtttttgtgtgtgtgagcaggggatactcagccaggaggcatatc

SEQ ID NO: 899 - DNA, 2300 bp, Homo sapiens
  misc_feature (1)..(2300): DMR5:158428501
ttcatgtgctctcgttccatgctttacacctggccaaacacctttcttttctaatccttcccactatgccctccaaaacttccactggatgagtaacatactgccctccctcctcaacctcttcacatactcaaccccagcctcttcatgagtccttctcacacctttgagctgaaactggcatctctgaaattctagatgtgtatgtctatatccaaatatttgttcaaactttccacttgatggtcctagagacacctaccacccaccatcttacagatgaaatatttaccttcctcagactcactccactgctgtgctgacttcagtcaaagttctccatatatacacatatatatatatacacatatacatgagtgtgtgtgtgtgtgtgtgtgtgtgtgtttatgcacatcacatttatattctggacatagattatttaattgaactccaagaaaaacactaattggtaagattttaaaactataatactcttgatatgcttaaattaatactcatattaattacaagagcattaacttaagaacattaaattcttatgtcacagccaggcgtggtggctcacgcctgtaatcccagcactttgggaggccgaggtgggaggatcacaaggtcaggagattgagaccgtcctggctaacacagtgaaaccccatctctactaaaaatacaaaaaatagccaggcatggtgacgggcacctgtagtcccagctactagggaggctgaggcaggagaatggcataaacctggggaacggagcttgcagtgagccaagatagcaccactgcaccccagcctgggtgacagatcgagactccgtctcaaaaaaaaaattcttatgtcataagtcaagagaggatattatcagtatgtctcaagaagtgatagcatacatgctctgcagggttttaatagatatgctcagaagtgctccaagctaaaagaggctggggacactggcttaaacaacagattgttttgctgcaggacttctccaggctttaaatatgctcattcacactgtgactctagaaaacaggaaaaagtatgcagcatttttagactttttttttaaacaatggaaccttctctcccacttcatctacctcctcccctacacacacacacatacacccacacacacgcacacacaattaattgtctacagaataaactttgagaaatacttgcactggcttgtctggttctcttaaacaaatagtattcaccttctccaaaacgtttcatcccagtgattaatagtttacttcgtgtctgagatgagttttaccgtcttagaaagccacattcctcagatcttagagggaaataaaataaggaaattaccatcacatgaagcaaacagaaaacagttggaatcatttcagcagaccagagaagagggtagcagacactgttgatactacccaccatccattcctccttcctttttcttagaggaaccctgactttgttcaggtatcaacctctcccccatgaagacttgtgccttgaaaaacttgaccccatctccagccccagaagtgggcctgattgggttactaataatctcattccccttgtctgtgattagttcagcaagggcacatgacccagtcctggtcaacatgtaagaagtctgattaccttgaagccaccatgctgtgaggaagcccaagatacacagagaggtcatgtgtagggtctctgggcatcagtcctagctgaaggtcagccttcacgtcatgccagcctaggccttgacatgtgaatgaggaagcttccagatgatttcagccctaagttattttagtgaccctcagctgaattatcccagcctgctgaggtcctggacattacaaaacagagataaatcatctccaccatgtctggcctgaattcctgacccacgatatttgcaagcacagtaaaatagtggttgctttatgccagtcagttttggggtagtttgttatacagctataaataactaggacacctgtcattcttagtttggtttcataacttagtggctcatggcctaggcctcctttttaaaacaaaaacaaaattaaataattttgagaagagtttagatattttgtgattcaccctttccaactctgatgcaattggatactccctggttggagatggtgtttgatattttttcagttcagtttcctccatctagaattctgatatagacatatagatgcagctgttgatactctgtatctgaaaactgatagaatgttctgaaatttaattcca

SEQ ID NO: 900 - DNA, 400 bp, Homo sapiens
  misc_feature (1)..(400): DMR5:159368301
tccacagacataaagcaaagaatggttaccgtctttggaaaaaaaaaaggaaaaaaagtgggggcagaatttatgtaaaaagaatgttatatggtaaattcttatcctgaaataaattaactggttgtttaaaaaaagaaatgtttgtaataagtcagaaagttgaggcatgtcgaagaattgtctgctaaagtcgtgaaagagaaaaatattataaaaaaagaatttatgcaagaaatgttgtataatttaaaagtaactaggcctcctgaaggtaaaaactattgagaaagaaaacagtttatgtgcatggtgtataaggaaggtaaaatatacctttagtaagaggattataaagaggcataagaatgtaaatttttacctacattaaaacattaaa

SEQ ID NO: 901 - DNA, 800 bp, Homo sapiens
  misc_feature (1)..(800): DMR5:162807701
atcaagtagtcattgctcagaactttgagagcctttaagaagggataggtgaagtatttggaaactgtgtcacaggaacaaactttgaaaccaccaaggatgattacccaggacaagtaaagctttagaagtattgtcattagaacagtacattagcaaaagaaatgtgaattaaaatatggctagcaagacagatcacgaggtcaggagatcgagatcatcctggctaacacggtgaaaccccgtctctactaaaaatacaaaaaattagccaggcgtggtggcaggagcctgtagtcccagctactcgggaggctgaggcaggagaatggcgtgaacccaggaagtggagcttgcagtgagccgagatcgcaccactgtactccagcctgggcgacagagcaagactccgtctcaaaaaaaaaaaaaaaaaaatatgcctagcaattatagctctacacaagtaaaaagatgatgcaacaaagtaatgaactttctgtcattagaaacgttcaggcataggctagataatcaatcaactgacagagtgctctagagaagatatcctaggtatactccaaagacttacaaccagacaattttaaaattgaggctataacagtaatttttaaactaattgtactggacaaaggaaagactttgtcatcctgtagaaatagatttctccagtataaaaatctttgagtaatacgctaacatgccattattctgaggatgatgcttccggatggtaaaaggagacaaatggaacaattacttcctgttcaccacaccatttt

SEQ ID NO: 902 - DNA, 800 bp, Homo sapiens
  misc_feature (1)..(800): DMR5:162993101
gaaaaagaaaattatgcaaagaatttcaagctaataaagtttgtggaatatggtaggtaatgaataatgttaactgtatttaataccgttacagaagtttagagtatcatttaaattccttcatttcctggaagtagaatatagattataaaataatttttctcataaacttccaacctcactcctaatatctccatgaaggttaacattatctcactatggccgggcgcagtggctcgcgcctgtaatcccaacactttgggaggctgagatgggtggatcgcctgaggtcaggagttcaagaccagcctgcccaatatggtgaaaccctgtctctactagaaatgcagaaaattagctgagcatggtggcgggcgcctgtagtcccagttacttgggaggctgaggcaggagaaatcacttgaacccaggaggcagaggttgcagtgagctgagatcgcgccactgcactctggcctgggtgacaagagcaaaactccatctcaaaaaaaaaaattatctcaatatgtgggaattccctgtagcaaattactttacatacttgtttaaatatagtttttaaatatagagagcattagttgacaattggaaacacagtatatacagaataattttattttaattatatggctagagagtatgtgttatttgttgttcatatctttcttttggcagccttctctcctgtactccatgtaatctggggaactaagatcaagaactgttaggatggcataaatataactctttagggagcctgcctttgccctcacatgaaa

SEQ ID NO: 903 - DNA, 200 bp, Homo sapiens
  misc_feature (1)..(200): DMR5:163886601
gtgcctggcctataatacgttttattcacacatgtttcatatgactttgaataggccatgcctgtatatacataaacaaatagttgtcctataatgaattttgcagtctaaaaaaactcctaatatttgtcttccttcatttcttcatctctaaaatgacccagaacacccaatgaaattaatgttagatatgatcaaac

SEQ ID NO: 904 - DNA, 1700 bp, Homo sapiens
  misc_feature (1)..(1700): DMR5:166891101
cttcattccattttaccagattgccttcccaaagcaaaaataggctcagcatttcataaaaagcctcattttttcccccggaacatgaagtaggcagggctgatggtttattcctgtttaataaaaaggaaaacgaggccgggcgcggtggctcacgcctgtaatcccagcacttcggaaggccgaggcgggcggatcacgaggtcaggagatggagaccatcctagctaacacggtgaaactcggtctctactaaaaatctaaaaaaattagcctgtagtcccagctactcgggaggccgaggcaggagaatggcgtgaatccgggaggcggagcttgcattgaacccaaatcgcgccagttcactccagcctgggcgacagagtgagactccgtctcaaaaaataaataaataaataaataaataaataaataaataaataaataataaataaaaacacgaaagttatgaaagttaaataacctggccacctcgacaatctctaaaagcagatgagatatgagatttaactcactgtctcagtgtgacttagtgctctcgccaccactcggaactgagtttagcaaaactaatgctggtgttaatgaaaacatcttaactttattcttttggaaagggtctttacagtttattgattaccttcaatcactgaaatatgtgaatatactaaacacctatatttattgattgtacagttggagttctttgacaatctaatggtatctctttatgtatttccgcccgacttaaatcctaattgtgatagcattttccccaagtaacacacaattgctaataattttcacttttcacttgatttttatttgatttttttttccttagttgctttctcccttccgtcaaaccactcgtttggaaacaaggaactatctcccctcactcagtttctctcattctgatgtagacaatcaatctctcttgtcaataccatatttctctgcccactttgtcatttattgttgtattggattgcctttcactttatttctgtggtcctttttcttttgaatctttaaaaatttatttctcccaactgaatcatttcagttctgaggaatgagattttacgtgctttttctccctcaacatgttatgtttatcatgagattaacatctttattttttggctctgaagactcttgaacattctctcccggtcatttttattttctttcttgcttttgtggctctatgttgttaacagttcttcatggcctgctctccacctatcttttggtttgccctgttttcctacatcagcttcttgggaggttttattcttcaatttttttacatgatgatatcacaaatctttgctaccaggtacagtcaaagaattataactcctctggtctgttccactctctgcacatgtttattagtaagcggatagtattggaagagtttccaatcttatactctgcttgtccagagcttatatttatttttaaaaagtacttcaatctaaaagaaactatatctcaaaataagattcaggtttattcgctgctattcgagtggtgtttgcaacccacaacccctacccatattcttctgagtaattgctttgtacagagatgttttaactttttttttttttttttttttttttgagacggtgtcgccctctgtcactcaggctggagtgcaatggcgc

SEQ ID NO: 905 - DNA, 2300 bp, Homo sapiens
  misc_feature (1)..(2300): DMR5:167860801
gggcggtgcaagatgtgctttgttaaacagatgcttgaaggcagcatgctcgttaagagtcatcaccaatccctaatctcaagtaatcagggacacaaacactgcggaaggccgcagggtcctctgcctaggaaaaccagagacctttgttcacttgtttatctgctgaccttccctccactattgtcccatgaccctgccaaatccccctctgtgagaaacacccaagaattatcaataaaaaaaaaaattaaaaaaaaaaaaaaaagaaaacaacgtcaaaataaatcctttctcattttcacccctagcaatcgctcacttggctatgtctatttcagggtgtctgcccacatctctctttatttactccttctctcctttctctctcttctccatagattttctcatctaatgcaaaatgtcctcaagaaggtgggcaaaggcctctcagggttgtagggggtggaaggagaaagaaccaaccatttcctagtgcacgataatgtttcagtaccacggagagcggtgccgggcgtggagaccagggaaaaatctgtcagccttgcgggtggttttcaggcaccatttggagccccacaggtagtggaaatgacaaacgtctacaaagaagctttgcagtaagaaccactctccccagagcctaagagccaagccttacatcgtcacatgcgaagaacagattgcatctgggcccgggtgcccgtcctaatgtcagcctgcttggcatttaccttcctttcccaggctgacctatgaagatggggcaggctctgggggcattgttctagccatgcaaacgctgtggccattgtgtcagcatggaagagctgccggttcctttccagctcaacactgtaattttatcaactctggctcagagaaacctatatttataatgctaattagaagggcacacatttaatttgagtggaagactatttgtatctcgctgagcctgatagcacagggctcaagcgacagcagtcagaagcaaagcaggcctttctgccttctccaagtatttgaaacagggcttactcttgccaaacaatttctctgttggattaaaaagagagagcaagggagagtgctgaatatgctggagctcagaaaactttgtgtttatctcctgcctgcataatatatttctctgtgcactgagaaaacatgcctcttatgttatctaattgtttcctgacacatttagcaacatttcacactctttaaagtgacattaacattgctgacagtggaggtattttcattagatgggctttgaattttaggcaggatgcactgcaggtcttcaaataggcttgtaaaaagtgaggaaggcattatttatgaaaatagagacttggccaacagtgccctgtggatgtgtattaattttgctgactctagtcaatttagagtatgtgtgtgtgtgtgtgtgtgtgtgtgtgcatatgtacatgcatttgtgcacacacacacatataacagcaacttgttgggagccgaactaaaacatcttcattatccagcataccactaggctccgtgagtatcatggaaactcccaaaacatctctccatccacatctttttagccataactaagcaatgtgctatttcagacaaaaatcagtcactttgcacccaatcctgaggatgagtagccatgtggctcatgtatataggcagcatgattatcactctcccagtgtaaagttaaatcctcctccttgttttctcccttcatgcttctttgtgccccaaggccatttttcttatgtcttcagctgtctgccttgatgcatagttttccccggagagtgtcctaagtgagccttcagagaagagtaccttgaaagcacctgcctctgcggggcctgaagagagacatttggaggttcattctgaccttgacgaagaaagtaagccaggcttggagaaggtgaggaagatgcaattcgggttgtgaatttctgctagggcacaacctcacatggaatctcgacccaattgttgatctccatacttgtcatgagaatagaataatatttagacattcaaagctgaagaagagagctcgctgcagactgtctagtcatcttgacactactaccatttccagtcagccctcctgccctaccctagttaaaattactcttctctgtttgcatctccaacattgcaatgactctatgtagccatacaatgcttaattagagagctctgagttcatatcttggctttgcgcattacttactgtataacctttgtcaagtccc

SEQ ID NO: 906 - DNA, 300 bp, Homo sapiens
  misc_feature (1)..(300): DMR5:168710901
actggaagcggtgggttggggtggtgagcaggagcctgtcagccatgggctcagggctactgcagcgggcgatgccaggctccttgtaccccgccttcacccactccgacagccaccgaagactgcagtcacagtggagtgggttggttcccagcgccctaggaggcagaacaggaagtcagggccccctgcccagcttggccagtagccttcatatccttggctctctggaaatgcattttcagactttggctagactggaggtatccaatatggggccagcggagtagtcgtctccac

SEQ ID NO: 907 - DNA, 200 bp, Homo sapiens
  misc_feature (1)..(200): DMR5:174055801
actgtgtgacctgtggcaaatccctttcccgctctatgcctcagtctccctatttgtgaattgatgaggttggacaacactgccactaaagtcttttgagcactgacattttaccctgtgttcacggcccaataccaaccttcaaggcccaggaaaaaacttgaatccaaagagggagtgtggagtgaggagcgagaggt

SEQ ID NO: 908 - DNA, 600 bp, Homo sapiens
  misc_feature (1)..(600): DMR5:174624001
aagcaatgtggtagcagcgtgacgatgatgtgccatgggagacaggtggcaacatcaaaaaaggtagactgcccccgccctccgaagaggtggcatgtgagcaagaaggagccagccaatggaaagctctgaaagcagagtcttttaaaaacaaaacaaaatcaaaaaacaaaaacagggctcaaagaagatgtctgcacttctgccagacggggcagaaagaagataatggtgctccaatcagggagactgtggaggcagtacaggtgacaggaggcagggaaacgagaattagccagaaacacagtaggtttgccatgtcagtcagacactcgagtgtgttcttgctcttctcaacaaaccataaagtaaggacgatcagtgtttcccattttacagacaggaaaactgaagctcgggaaggctacccaggtacataggggcagtggtgggatgtgaatctatggtttaggatgctgacgccagcactatcccacctgcctcatggtagagcagtgtccagacacagaggtggcaatgcagcagctcaagtggcagctccagcactgcatgtgttttgtccgttctacatgggtttgg

SEQ ID NO: 909 - DNA, 100 bp, Homo sapiens
  misc_feature (1)..(100): DMR5:175198401
aaacatgacctgtgctgggccaatgaagatcttccctgggacttttgctggacctcttgggaaacaggctttctgtttccatgggggtttagctagtagt

SEQ ID NO: 910 - DNA, 4000 bp, Homo sapiens
  misc_feature (1)..(4000): DMR5:177430201
cctggtcatctcacatctggcccacgtttcccacacctgttgggctctgcaggcaatcgaactgctgctgtgacctcagctgctgcagatggggtgtctgcgaggtcaagcaagacaggcaggggaccggggaagccccagtgtgcaggggacggggagtcctgggtgccagcccccttgcccctgcctcatttgagcgtctgatatctctgatgtggggcctggtgatagaggcctgggagcctccttgtccccatgctgccctgtgcgtctctcaggcctgccccactggcctagaatctctccctcccgggccttctgcacttctcagcactgtgacgtccttctcccctttcttcaccgggggaactcctacctggcgggaagcaactggggctggacccattgttggagctacttggaacactgtcctcccgcagcgacctcactgcctctcttggctctcccagtgcaggagcctgaagcaggagaagcacgtgtgtcctggaacgcagcaagggcgtgctggagcgtgcagagggaaggcctgaggtgctgttctgcctcagctctgccttggctgggccctagaggccgtggaccgcactgaggacccagaggcagttctgaggcagtgggactcgagacccagtgtcctattgctcccacaggtggcggtggaaatcgcaaaggcaaaagcaagaaatggcggcagatgctccagttccctcacatcagccagtgcgaagagctgcggctcagcctcggtgaggcctgggcagagactgggggtgctgaggcgaggggccctgctggggccgggggagcctcccctgagaccttgccccggagcagaggggcagacttgggggctccagtgagcaggaggatgaggactgcaccattcagcccagtttcagttcctgggcttgggacgggtggagagcagacagcaaacagggtcacaccgagggtggttgaagcgggtgtcgggaatagggcaggggcagattggggcagttgattccactttgaaaaggagagccagctagggtgagcagggcccacaggacagagggagcagcagctgggccagcccacagactgactgccttgggacccccaggctggggcgtagcctcccaggcccagccctgaggggtgcccagcaaatccttgaccagaagccctcagcctgggcagtgtgacagggttactcctgggaggggacagaagggcccaggaccccagttcctgccaatcttggccaaggccccaggtctgagcagcacccaaggttgctgaggcccccggtggcctgcacgtgcgcagagcacacccgggctgcttccacctcctgggaaggaggcccagctgagagcctgccggaagccacagcttcctctcgcactttcgccaggcaggcagcaggtgtgggcctggccccggctgggctgggccggaacctcacggaccgcacccaaccccagtaccgtgacatacgcaagtcgtgtaaatcaggagacaatgcagggaggtggatggaggcctgggctctggagccagactcccggctgtgtgacactgagctagtcagttagcctctctgggcctcacagccccaaaacagctgtgcccacctgagggttgtggtgagggttctgaagaagattgtggctaccacactgcagagctggaagctgttgtgggggcccagggcctggtggtgtgggcacatgccccacccatgtgctctcgggctgtggacccagcagcttccatcactgccaacagagcgtgactatcacagcctgtgcgagcggcagcccattgggcgcctgctgttccgagagttctgtgccacgaggccggagctgagccgctgcgtcgccttcctggatggggtggtgagtgcagcccagccctgcccagccccgcgggtggccgaggtcctggccccatgtgcccctcctccccacacctgctgcttgccctgcccagacctccagcttctttgctttccaccctgcaggccgagtatgaagtgaccccggatgacaagcggaaggcatgtgggcggcagctaacgcagaattttctgagccacacggtgagtgagcagcgatggagagatgatgggagccaccagagccccgtgtcaggcacaggagtgaccacagtgtcaggcttctgagggtggtctcttcatacagacacatgtaacacacagcctggacagagagtgccctggagctgctccaggcagcacggcgggcatgcagcccagggtatgggctgggcttgggccaggcggcctcccagtggctctgctgcgctctgcctcatgggtgggcagcaggaaggacttcagcaaccaggctggctggcacaccctggcctgcagcctctcatggcaccagcccgagttgcctgacccctctcccctggaagtgggcagccatccaagggagcccctgcactgacctgtctggggcttgttcccagggtcctgacctcatccctgaggtcccccggcagctggtgacgaactgcacccagcggctggagcagggtccctgcaaagaccttttccaggaactcacccggtaagcctgtccctgcccacaagcctggaattatgcccagcggagggggcttctgggggccaggaagactgtgaacagctcggtggctggtgagggagctcagctgcccagccctggccttgcccctgctgtgtgacctgagcaggctgcctcccctctcagtagcacccacagcttcagcacaggctgtgtgtctccccgctcaggggttagcaggaggactggccgacgacgatacctgtgggctaagcctgtacagaacgggaggcctggcccagcaagccaagagcctgaggtgtcaggggctggcgggtgagctgggcctgcctttcctcaacaggctgacccacgagtacctgagcgtggccccttttgccgactacctcgacagcatctacttcaaccgtttcctgcagtggaagtggctggaaaggtgagctccctgaaggctgggccgggacaggccaggtcgccggggttcttcataggccttgggctctcctgctcagccagcgtttgcttccccaccccttgccacaggcagccagtgaccaaaaacaccttcaggcaataccgagtcctgggcaaaggtggctttggggaggtgagtggccaggccagagcccctgggagagtgaatagggtgggtgtgttgggacctggaccaccccctggatgcccagcaatggcacagctggcccccattcgcccctgtctgtctggccacaggtgtgcgcctgccaggtgcgggccacaggtaagatgtatgcctgcaagaagctagagaaaaagcggatcaagaagcggaaaggggaggccatggcgctgaacgagaagcagatcctggagaaagtgaacagtaggtttgtagtaagtacagaaggagactctcccttccccttggccacactggcgcaccgaccgtccccaccccccaggccccaccctcccatgtgggatgccaggaagggcgggtttggggtgttgacaccaggcttggggagcaggctgggcccaaggagtggcaccgagaaggcttttttgggcagccctgccgccaagcgccccgcagctcctgcctgagggctcgggtcccctcggccacaggtgagcttggcctacgcctatgagaccaaggacgcgctgtgcctggtgctgacactgatgaacgggggcgacctcaagttccacatctaccacatgggccaggctggcttccccgaagcgcgggccgtcttctacgccgccgagatctgctgtggcctggaggacctgcaccgggagcgcatcgtgtacaggtggggagggctcggccaccccaggggcttagtccttccctgccagcgactgcagctgggcctggacgggggtggccaaggctgccgatcaggcca

SEQ ID NO: 911 - DNA, 500 bp, Homo sapiens
  misc_feature (1)..(500): DMR5:177790501
cccactctcttctggcttgtagagtttctgccgagagaccagctgttagtctgatgggcttccctttgtgagtaacctgacctttctctctggctgcccttaacattttttccttcatttcagctttggtgaatctgacaattatgtgtcttggagttgctcttctcaaggagtatctttgtggcattctctgtatttcctgaatttgaatgttggcctgccttgctagactggggaagttctcctggataatatcctgcagagtgttttccaacttggttccattctccccgtcactttcaggtacaccaatcacatgtagatttggtgttttcacatagtcccatatttcttggaggctttgtttgtttctttttattcttttttctctaaacttctcttctcgcttcatttcattcatttgatcttccatcagtgataccctttctcccagttgatcaaatcggctactgaagcttttgcatttgtcacgtagttct

SEQ ID NO: 912 - DNA, 1600 bp, Homo sapiens
  misc_feature (1)..(1600): DMR5:177816401
cactttttaatagggttatttatattttgcatgttgatttaagttccttacagatgcagatattagacctttgtcagatgcatagttggggaatattttctctcatttcataggttgtatatttactctgttaataatgtctttcgctgtgaagaagctctgtcattcaattaggtcccacttgtcaacttttgttggtgttgcaattgattttgaggacgacctagtcatagattgtttcccaaggccaatgtcctgaatggtatttcctaggttttcttttagagttcttatggtttgaggccttacacttaaatctctgatccagtggcaagacccaccatcttcaaggactcatctcacgtgtaacaacatccacaggctcaaagtaaagggatggagaaatatctaccatgcaaaagtcaccattttttttttttttttttttttttttggagatgggctctgtcaccgaggctggagtgcactggtgtgattatggctcgctgcactcaacctcccaagtgatcctcccacctcaacctcctgagtagctgggactacaggcatgcaccaccacacctggttaatttttgtattttgtggtagagatggggttttgccacgttgcccaggctgatttccaactcctgtgctcaaacaatccacttgcttcagccttccaaagtgctaggattacaagtctgagccaccgcgtccagcccaggcattgctattcttagataaaacaaatggtaaagcaataaaaattaagtaggacaatgaaggccattatataatgatgaagggtacaatccaacaagacttaactatcttaaatatatattcacccaacgttggaacaaccgattcataacacaagttcttcttggcctacaacatgacttagacaaccacacagttgagggagacctcaactccccactgacagcgttagacagatcattaacacagaaaattaacaaggaaactggacttaaactcaacacttgaccagttaacctaatagttttctacagaacactccactcaacaaccacagaatatacatttttctcatctgcacaggtaagactctctaagatcaatcgcatgctcagtcatgaagcaagcctcaataaatttaaaacaaacctggacgggtgcggtggctcatacctgtaatcccaacactttgggaggccgaggcgggcggatcatgaggttaggagttcgagaccatcctggctaacacagtgcaaccccatctctactaaaaatacaaaaaaaaaaaaaaaaattagccaggggtggtggtgggcgcctgtagtcccaactactcgggaggctgaggcaggagaatggcatgaacccgggaggtggagcttgcagtgagccgagattgcgccactgcactccaggctgggcgacagagcgagactgtctcaaaaaaaaaaaaaaaaaaaaagaatgtaaatttattttctgatagttctagaggctaggaaatccaagatgaaggtgctggcaggttagggcctggtttctctgcttccaaggtggtgccttgagcactgtgtcttccagagaggagaaacac

SEQ ID NO: 913 - DNA, 2000 bp, Homo sapiens
  misc_feature (1)..(2000): DMR5:177976201
aaaccaaaaagcttgtgcatggcaaaagaaactatcaacaagagtaaacagcctacagaagaggagaaaatatttgcaaactatacacgtgacaaaggtctactatccagcatctataagaaacttaaggctgggtgcagtggctcacacttgtaatcccagtactttgggaggccgaggcaggtggatcacgaggtcaggtgatagagaccatcctggctaacatggtgaaaccccgtctctactgaaaaaaaaaacaaaaacaaaaaaaattagctgggcgtggtggcgggcgcctgtagtcccaactacttggggggctgaggcaggagaatggcatgaacccggcaggcagagcttgcagtgagctgagatcgcaccactgcactccagcctgggcgactgagaaagactccatctcaaaaaaaaaagaaaaaaacttaagcaaatttccaagaaaaaaaccaagcaactttattttattttttatttattttttatttttgagacagagtatcgctctgttgcccaggctgaagtgctatggcacacaatctcggctcactgcaacctctgcctcctggggtcaagcaattctcctgtctcagcctcctgagtagctgggattacaggcacccacctgtaatccaccaccacaccaggccattaattttttgtatttttttagtagaaataaggttttgccatgttggccaggatggtctcgaacttctgacctcaggtgatctggcctcagcctcccaaagtgctgggattacaggcctgagccaccgcacccggccataaaacaacaatattccaaagtgagcaaagggcatgagcaaacacttttcaaaagaagacaaacttgaggccaaccagcatattaaaaaaagcttggctaggcgcggtggctcacgcctgtaatcccagcactttgggaggccaaggcaggtgtatcacctgaggtcggcagttcaagaccagcctggcgaacatggtgaaacccgcccccccaacccgtctctactaaaaatacaaaaattagctaagtgtggtgatgcatgtctgtaatcccagctactcgggagggtgaggcaggagaactgcttgaaccgggaggcgggggttgcagtgagccaagatggcaccactgcgctccagcctgggtgaaacagagcgagactctgtctttaaaaaagaaaagaaaagaaaagctcgatattactgatcattaaagaaatgcaaatcaaaaccacaatgagataccatatcgtatcagtcagaatggctattattaaaaaataaaaaaataacagatggtggcgaggttttggagaaaaaggaatgcttatacaccgttggcaggagtgtaaattagttcaaccattgtggaagacagtgtggtgatttctcaaagatataaatacagaaataccattccaccctgcaatcccattactgggtatatacccaaaggaaaataaattgttgttataaagacacaggcacagatatgtttattgcagcactattcacagtagcaaaggaaaaaaaaagactccaggaggcgtccctgggagactttctccagcctcatagcccatcttgcacccaagtgacagcacgtggctttccttttgtgaggggagcccatgggattcactcccttttcctatttcctccggggtgaagcctcatgtgtcgggacaatgtgggatcagggactgtctgggtgaccctggcgagcctctcctcacggagttctagcggccatcagggaaaggggagcacgcccagggcggccgcccccaggggtgtttgaatacaggccaggagcaggctgctctgtgatggtggggcgggaggtgatgagactcccctgagaggctcccttcggtgctggaaagatgggacatggggaaccgcctcctgcctggaccagttgatgcccagagccactcccctgggtcctcatcgctccttccaggcagtgagga

SEQ ID NO: 914 - DNA, 2900 bp, Homo sapiens
  misc_feature (1)..(2900): DMR5:178094001
ggagaaaccccgtctctactaaaaatacaaaattagccgggcgtggtggtgcatgcctgtaatcccagctactcgggaggctgaggcaagagaattgcttgaacctgggaggcggaggttgtggtgagccgagattgctccattgcactccaacctgggcaacaagagcgaaactccatctcaaaaaaaaggttgggaagcgctgactcacagtatgttccatgaggcctgtgctctagagaaaaattaccctaggtaaggacaatagagatgcagcaagtgtaaaggccctgcggtgggccagtgtgactggagcttgaataacgggacagtgggagaagatgaggtcagagtcaggatggagccacggcagctatgacctgataggacatggtaaagagggggctgcgggaagccactggaaacaatgaagcagagaaggaacatgaccagattcaaggcttagaaagccacttcggctgctgtgtagagaatggactaggtggagtgagacaggaagcaaggaggcaagctgggtggttcctgcaggaagccaggtgggagggggcaggcgcttgcactgagggctgcagagacaaaagaagtggagggatgtgagacatatctggagagagaatctatagagtttgttcatgaatgggatgggaggggtgtgatacgaggcgagggaagaaattgaggctactagcgggtttgggcttccgctatggagtggatggtcgtagcacagactgcagtgaggaagacaggttcgaagagggaaatcaagcatcttgttcaggacctatgaagttgtggagcccagccaacatccaagtggggacagcccataggtggtatttgttgactgcgtaagtgagctcagttcttctggtggggaacacggtctgtagtaaggcggagtattgagttttagacaactctgccgaaaccccttaggtggagaagacttcggctgccctgggccttgcacccactggttctggatgtgccatctcccgggctcacatgctggattcacgtcagtcctccctcctccatggtcactcttcagatggcttcacatcggtcctccctgctccatggtcactcttcagatggattcacgtcagtcctccctcctccgtggccactcttcagatggcttcatgtcggtcctccctcctccgtggccactcttcagatggcttcatgtcggtcctccctcctccgtggccactcttcagatggcttcatgtcggttctccctcctccgtggccactcttcagatggattcacgtcagtcctccctcctccgtggccactcttcagatggattcacgtcagtcctccctcctccgtggccactcttcagatggattcacgtcagtcctccctcctccgtggccactcttcagatggcttcacgtcggtcctccctcctcagtggccactcttcacatggattcatgtcggtcctccctcctcagtggccactcttcacatggattcatgtcggtcctccctcctccgtggccactcttcagatggcttcacgtcggtcctccctcctcggtggcctctcttcagatggattcacgtcggtcctccctcctccgtggccactcttcagatagcttcacgtcggtcctccctcctccgtggccactcttcagatggcttcatgtcggtcctccctcctccgtggccactcttcagatggcttcatgtcggtcctccctcctccgtggccactcttcagatggcttcatgtcggtcctccctcctccgtggccactcttcagatggcttcatgtcggttctccctcctccgtggccactcttcacatggattcatgtcggtcctccctcctccgtggccactcttcagatggcttcatgtcggtcctccctcctccgtggccactcttcagatggcttcatgtcggtcctccctcctcagtggccactcttcagatggattcatgtcggtcctccctcctccgtggccactcttcagatggcttcacgtcggtcctccctcctccgtggccactcttcagatagcttcacgtcggtcctccctcctccgtggccactcttcacatggattcacgtcggtcctccctcctccgtggccactcttcagatggcttcatgtcggtcctccctcctccgtggccactcttcagatggcttcatgtcggtcctccctcctccgtggccactcttcacatggattcatgtcggtcctccctcctccgtggccactcttcagatggcttcatgtcggtcctccctcctccgtggccactcttcagatggcttcatgtcggtcctccctcctcggtggcctctcttcagatggattcacgtcggtcctccctcctccgtggccactcttcagatggcttcatgtcggtcctccctcctcggtggcctctcttcagatggattcacgtcggtcctccctcctccgtggccactcttcagatggcttcatgtcggtcctccctcctccgtggccactcttcacatggattcatgtcggtcctccctcctccgtggccactcttcagatggcttcatgtcggtcctccctcctccgtggccactcttcagatggcttcatgtcggttctccctcctccgtggccactcttcacatggattcatgtcggtcctccctcctccgtggcctctcttcagatggattcacatcggtcctccctcctccgtggccactcttcagatggattcacgtcggtcctccctcctccgtggccactcttcagatggcttcatgtcggtcctccctcctccgtggcctctcttcagatggattcacgtcggtcctccctcctccgtggccactcttcagatggattcacgtcggtcct

SEQ ID NO: 915 - DNA, 100 bp, Homo sapiens
  misc_feature (1)..(100): DMR5:178972001
tcggctccctgtaaactcagcctcctgggttcaagtgattctcctgcttcagcctccctagtagttgggattacaggcatgcaccaccacacctggctaa

SEQ ID NO: 916 - DNA, 200 bp, Homo sapiens
  misc_feature (1)..(200): DMR5:179574801
agctgtcttatttatcaattctactttgggagtagggctttatttgctttctaatccattgatttttgctttgggtattaattctttctcatctttctgttgctttttcctggctgtatttttttatgatttggttttttattataaaagaaatgcttgcttgttgaaaaaagttaggcaataccaaagtatataatgtg

SEQ ID NO: 917 - DNA, 800 bp, Homo sapiens
  misc_feature (1)..(800): DMR5:180569101
ctaatgtagccggaaagccacatcttggaacagaaaaacaacttattcttgtggctaacgcccacatgcattgggaccctgaatactctgatgtgaagttggtacaaactatgatgttcctctcagaagtgaagaacattattgataaagcctctcgcaacctcaaatccagtgttttgggagaatttggaactattccacttgtgttatgtgcagatcttaattctttgccagactctggtaagaaaataatgtgattttatgtagaatattttttgacataagatgatttagtaatgttttgtttctgatcattccaaattaagtccaaataaaaattcagtttgtaatggcagctatgagcaggttttaaacatcatgttggggtggaggggccattttgaagatgaaacgatattatggaaacttgaggagaaggatgttaatcatcttgaataaacacataagcaataacgtgaaataactctttaaagaacgtatgtagttccattttattactccaaagtcagagataattatggttattaagacagcctctttgggattccagcgtgtggtaatataatcatagtttaaatttgagttaaaattatagaatctcaattttgcatgtatttataacttgattagaaaaatacacctcaggtggaaaatgagctcctttatttgcacacatatcagtcaagcgattttgacaaagagcaaggatcttgatttttattaaaatgtagaatacagaaagcctgatctggagcgctctttccgtggatagtatacaa

SEQ ID NO: 918 - DNA, 600 bp, Homo sapiens
  misc_feature (1)..(600): DMR5:181142701
cctttacggtcactcttgagagtgaaaggcagtgcagcctgtgcctgcacgggtggcagcatcggaaccgtgcacctcagccctctccccagcaacccacgaaggcactggccctgcagaaatgcctgtcagggtttgtgatgaccgaggcccacatgcctccacccgactcctctggatgtggtgctgttctttccctcccatgaggtatgagatggagaccccatgagggcgctggggctcactgggaagtgctgaatgtggggatcctgtagaacaccaagaatatcctctgcattcctgtgtgaaaggaaaataaatcctggggccctaagatcactaagctaaacggaaaagtcaagctaggaactgcttagggcaaacctgcctcccattctattcaaagtcagccctctgatgcatcttctgagtgcctcctttggagaggctcatcaggaactcaaaaaaatgcaaccatttttctcttatttacccatgagctggaagccccctccccacttcgagttgtcctgcctttgctttgagttgccctgcctctccagaccaagccaatgttcattttttacatatgctgattga

SEQ ID NO: 919 - DNA, 1900 bp, Homo sapiens
  misc_feature (1)..(1900): DMR6:684801
aaaatcagaaatgaaaccacaactgaaagtagttttagaatcataaaagcagtactttttactatttagtaatgaagagtttcgctgatttcaacagcagacaagaaatctgaacaaaatgagtgatcacggtctcaccttgtcatgctcccagatgttcttctcagctagagaaggccaggaaccagaaaaatacagaagttctgactcactgaagactaggataacctctactcaacaggccacggaaggcctcatgatgtgaaaacactatttcgctaacagatcagactatagaaaggtgattttccccacaatcatttgaaaacacacacacacacacacacacacaaccctcccaaacgtccacccttccccatatatgcctcaacctggcagcactggcatcaccagggaacaaatcaagcagaatctcagtagccttagctgtccagaaccactttgggtccagaggaccccagaagaatcctgttgcagagctgcctagtgagtttcaacagtaaaattaggctcagccaactctcagggcaccataaaatataatcaaagtagagaattcaccaaatctttctagagtcaggcccaacctaacctaagacagacttgtccctgctgggctgggttgggctggacccaaagggattgcccagagatattggggaaagggttcgggaaaatggtgattttcttccccagttctctataaacacagactccacacttcctgagtgagatcaagtgcaagttacattagcactgccacaaattctaccatataacagcacacagtgggacaagtctcagagacagggtcatgaactctgtaatccagttttccaaattaatcctcttgctcctcctgctccatccccaaatcatagttaacaaaaatacaagcatgcacagatctgaaagaactcataggggccaaattgtatagagttacggcctgataagggcagaagactcgctgggtctcagaagggccatttgcagaaggggaggactgaacaggtaagaagtaatgtatcctgctttcctggacctcttttttttttttttttttttttttgagacggagtcttgctctgtcgccaggttggactgaacaggtaagaagtaatgtattaatgtatcctgctttcctggacctcttttttttttttttgagacggagttttactctgtcactaggctgaagtgcagtggggctcactgcaacctccgactccttggttcaagcgattctcctgcctcagcctcccaagtagctgggattacaggcatgcgccaccatgcccagctaatttttttgtatttttagtagagacggggtttcatcatattggccaggatggtctcaaactcctgacctcatgattcgccctcctcggcctcccaaagtgctgggattacaggtgtgagccgccgcgcccggcctcctggacctctttttatacttcttttccttctctacctctacaaacaaaaaaatacatgaactactatctatggtttcaaatgaaagcatatttgtttatattttaattcttttgggaaaataatccaataatttaaaccatataactgataaatgacacttgatttttatttatttattttaggaatgggaataaaggccttccctccctctacaatgtttggaggtgagagattaaggggacgagaatgtgcatgagatgactaggaaggaatactggaagccagacaagtatatagggaatgcctgacaacttagctctcagagcccccataaaagagatctgttatatatataccggattactcagctgttctcataaaacaagcactggattctatcttaattggaaaagttacttagaggtctgctttattc

SEQ ID NO: 920 - DNA, 1100 bp, Homo sapiens
  misc_feature (1)..(1100): DMR6:1514701
tctggtttgttcttatgctttccccaaagcttagagacagcttttgaatccaccagcttgaatatgcctttttctctctgaggccatttaatataccggggacaagtatttttatcttgaagtagatctaaaagaaactcccacaaataggttgtgtttccttttccttctctcagtttctttatacctaactcaggagatccactggaaattggtgattgctgggtctttggtttatggccaactgttttctttttccttggttcacagctatctggtgatgtaggaataggagaggtatccattggttcagactcttcagttgacgcctccactgtagtttctgtaatgacatctggcctcatagcagcatggataaattctggagttgatacacaggagggacaaatacttccacaggacttctcgaatccctcaagcaggtaggagattccacatgaagcagggcttcagcagcttcgactgtcttatctgtacagtgtacattactgctgtgagcagatgcttccacccccgagatgagcagatccagctggttcatgggtccctcatgcagagacgttgccacgttcatcccggggctggagctgctgcttcacactgacttacacggtgagcagcggcggcaggggaggaggtggaacccgcggcgagctgctgcttcacactgacttacaccgtgagcagcggcggcaggggaggaggtggaacccgcggccggagacacacgccgtggggtcggtcaacacacactcacgcacttgcacacgctccaaggcccggaaggaagctgaggccggcccgcctcccgccaaagggccgaggaatcccgccacctaacggcaggggcaggggccacagctggcaacgcctactttaattttaaaaataatcactggggcctggagcagcggctctcgcctgtaatcccagcactttgggaggccgaggtgggcagatcacctgaggtcaggagttcgagtccagcctggccaacatggtgaaaccccgtctctactaaaaatacaaaaattaactgggcctggttgtgtatgcctgtaatctcaggtactcaggag

SEQ ID NO: 921 - DNA, 1200 bp, Homo sapiens
  misc_feature (1)..(1200): DMR6:1557601
ataagaatgatggttgcaaagccaaataacaccaatgtgctcagataaaagagtttttaaaatttagttcatactgaagacctttctacagtgagttattcccagagttttacaattaacttatcaattgagactataggccaggtgcggtggctcacctgtaatcccagcactttgggaggcagaggtgggcggagcacttgaggtcaggagttcgagaccagcttggccaacatgggaaaccctgtatctactaaaaatacaaaaattagccaggtgtgatggtgcacgcccgtaatcccaactactcaggaggctgaggcaggagaattgcttgaacccaggaggcagaggttgcaatgagccaagatcacaccactgcactccagcctgggcgacagagcaagactctgtctcaaaaacaacaacaaaaaaaattaaaattaaaattaatgaatataaaaaataaatttagactatatttcaacttaactcataatgaaacatttcagcatttatttatgtcaggttaaattaagtctaaatggatcatgaagtctttatgcttcccctgaaaatgaaaaacgagggctacataatttttacatgtgaaagatttaagctttacaatgccatataacaaaaagatttcccattccaagacagtgttcccaaggaaattaagctttcttttctccaccatgatagtttactcaaacaaacaaacaaacaaataaactaaactttgaaagaataataagtttaagagagtgggagaatgaatgagttcaggcttttatgtaattgtcattccaccaagggggttcaggcagcgtcaagacagttagactaggtagtctttattgcctctgtttgggtggtttggatctgtgtccccgcccaaatctcatgttgaaatgtgatcctcattgttggaggtggggcctgagtcacgggagaggatatctcatgcgtggtttagcaccattcctttggtgctattctcgtgacggtgagtgagttctctcaagatccggtcgtttaaaagtgcgtgtggcacctccccgccccctgctcctgctcccaccgtgtgagacatctgctccctctttaccttctaccatgactggaagcttcctgaggcctccccagaagcagatacctgtgtatcttcctctgcagcctgcagaaccatgagcc

SEQ ID NO: 922 - DNA, 300 bp, Homo sapiens
  misc_feature (1)..(300): DMR6:1707401
ttcagtgacagactgaacagccacacagttgagagaagtaatcataggacactctctcaaaggccctgctccagagccctctcctccatggcgttgtccagggtgagcaaccagatggaggtgggctccccaccttcctcctcccaggcagcctggcatggcccaccacacacaggcctgggaggagctccccaccttcctcctcccaggcagcctggcatggcccaccacacacaggcctgggaggagctccccaccttcctcctcccaggcagcctggcatggcccaccacacacagg

SEQ ID NO: 923 - DNA, 2300 bp, Homo sapiens
  misc_feature (1)..(2300): DMR6:2851901
ggtgaatagagacatgcagggactcttgtccacatttgcccagttggctgatagcacagtgtacaaagtctgtctgcagcaggtcataatttcacagctctgccacatgcatgtatatcactgtaccaagcgtgttcacatggtatggtgctgacacatgttgacggaatgtggtacagaccctctgtgtgaagtgtgttcacacagtgcggtgctgaccctctgtatgaagcgtgttcacacggtgcggtgctgactctctgtatgaagcgtgttcacctggtgcaggacagactctctgcatgaagcatgttcacacagtgcggtgctgacccgaccctctgtatgaagcatgttcacacggtgcagtgctgactctctgtatgacacatgttcacacagtgaggtgctgaccctctgtatgaagcatgttcacgtagtgcagtgctgactctgtatgaagtgtgttcacacaatgaggtgctgacctcatgtatgaagcatgttcacacaatgcggtgctgaccctctgtatgaagcgtgttcacacggtgcggtgctgactctctgtatgacacatgttcacacaatgcggtgctgaccttctgtatgaagcgtgttcacacagtgcagtgctgaccttctgtatgacacatgttcacagagtgaggtgctgatcttctgtatgaagcatgttcacatggtgcagtactgactctctgtttgaagtgtgttcacatggtgcagtgctgacctgtatgaaggatgttcacgcggtgcggtgctgactctctgtataacacatgttcacgcagtgaggtgctgatcttctgtatgaagcatgttcacacagtgcagtgctgactctctgtatgaagtgtgttcacacggtgcattgctgaccttctgtatgaagtgtgttcacacagtgaggtgctgatcttctgtatgaagcatgttcacacggtgcagtactgactctctgtatgaagtgtgttcacacggtgcggtgctgactctctgtatgaagcgtgttcacacagtgcggtgctgactctctgtatgaagcatgttcacacggtgcggtgctgactctctgtatgaagtgtgttcacctggtgcagtacaggctctctgcatgaagcatgttcacacagtgcggtgctgaccctctgtatgaagcgtgttcacacagtgcatgtgaaaccagaaccgacagtcgaacccaagcagaagtcttgaccaagcacttccctcctgggaatgcaccatgatatcaccacaccgaagtccaggctggcaaatagggacatttaagtgacatttaagctcgtggtggccctatgaggagtcattgctgactgagatgggattttaaggtgttgcctgcctgtgtgttctcagaccctctcctgaagccccaccccttcccctgatcctctcctgggacccccctcccctatccctgaccctctcctggagcccccctcccccctccctgtccctctcctgaagtcccctcccctgaccctgtcctgggaccccctcgcctttccctgaccctcacctgaagtcccctcccctttccctgaccctctcctggagccccctcccctctccctgtccctctcctgaagtcccctcccctgaccctcacctgggacccccctcccctttccctgaccctctcctgggaccccctcccctttccctgaccctctcctggagccccctcccctctccctgtccctctcctgaagtcccctcccctgaccctctcctgggaccccctcccctttacctgaccctctcctgaaatgccctgcctgcaccattgtcttatatttttctcatggttagactggggttatggttttttctgggaaaggccacagaggtaaagtgacatctcattgtgtcatattcagggtccatgccatcaacatgactcatcagtgctgacgcggtgatgacctgggggacgcagtgtttctcaggttcccccactgagcctctgcaactccagtagtgacaaaccgctccaccccccgccatccattttcttaattgttcaattgctagtatcacatttcatcaagagacgcatagcagagtccaaccaagactccatgatagagaaaccaggcaagaactactgtctcgtcgcaacttgaggagacaatatttcttgcctggtttccctatcatggaaactgagtcccccacagtttcgtttcctcaatcgagctaattactgaggttgcttagcagcctccggagtgagcacagcggaaactatc

SEQ ID NO: 924 - DNA, 1000 bp, Homo sapiens
  misc_feature (1)..(1000): DMR6:3463301
aaaggatgacaaaatgtaatgggatatgctggataggatctcggaacaggaaaagatgttaaggaaaaactaaggaaattgcactaaacagtggacctagattaataataatgtatccatactgattcatcagttgtgacaatgtatcagactaatgtaagatggtaagaaggcaaactgagtgtgaggtatgagggaactccctgtactatctttgtaatattttttataagtctaaaactattctaaaattaaaagtttacttttgtaaaaaaaaaaatgacatctcaaacattaatatttcatttcaagttctaaatcagtgatatggtttggatatgtttccccatcaaatcccacatcagattgtaatccccactgttggaggtggtgcctggtgggaggtgaccaggtcatgggggcggtttctcagtaatggtctaacaccatccccttaatgctgtcctcaagacagtgagttctctggggccgggcgcggtggcgcacgcctgtaatcccagcgctttgggaggccgaggcgggcagatcacgaggtcaggagatcgagaccatcctggcaaacacggtgaaaccccgtctctactaaaaatacaaaatattagccgggcgcggtggcgggcgcctgtagtcccagctactcgggaggctgaggcaggagaatggcgtgaacctgggaggtggagcttgcagtgagcccagatagcgccactgcactctggcctgggtgatagagcaagactctgcctcaaaaaaaaaaaaaaaaaagatagtgagttctcttttggaatctgtttgtttaaaagtgtgtggcaacccctccacccaaaatgtgttttgggcttctctgaacatagcagaagccgaacccctaccccgactcttgctcctgctctggccatgtgaagtgtctgctccctctttgccttccaccgtgattgtaagcttcctgaggcctccccagaagctgagcagatgccca

SEQ ID NO: 925 - DNA, 300 bp, Homo sapiens
  misc_feature (1)..(300): DMR6:5092901
gtgcagaacctaagattagtaagtttctatttgctgcattaggattgtaaaagcatagatccaactgggtgtgaaggtccccacgatatctgtgaatatacttgggtattaaattgcagacaagtgttaacaatgaaacacacaatatgttctttggaaataaaataacttagtacacatttagaaaggtctgtgagtcccccacccgcaacccctcccaaaaaaccccacctgaactagatgttgcttttgtaaccagaatcctgagttattttggattgtgctgtttaccaaagtaat

SEQ ID NO: 926 - DNA, 4400 bp, Homo sapiens
  misc_feature (1)..(4400): DMR6:5664201
tctatgctaattttatgctgaaaataggaactcccctgtgctggagaggagagaaagggcttggaagtcaaagactatccaagtggctgagaatcaagtggacccccttgactcatttccacttagaaaatgctttcaaggcagccagtgttacaccgagggtcctgccaggggagccgaggcctttgcctgtcaccctgggagctggcttccaggccttgggcatggatccctcgcccagagtctgcttggtcttgcaccaatgatttcacaggttatatccagacctcatgcttgataataaggtagtaagctgacttcccttggtttcctccacttctgttttaaatgaataattaatccattaaaagcatcatctcaaaagcacaaaatatcctataatctatgactataagttcttagaataagaagtggacattgtgttatgcttacttgtagactggtctgtctctcttagtaggacatgagatgttgaggatggatctcatcctagtcctagtccttaagagcaccaacatggacgcttcctcagcgtaggcatataactgtgatctctgaagattcctatgggtctatcattcagtagctcaagggcagctggacggagaagagattagaagtcttgttcctgcttcttaacttgttcacaaagatacttcatttttattattttggtcctgccagttctcttcatctggtttcctgtatcctttcatatacagtgatgctgaggcattttttcatttgtttgttttatttgttgttttaaagagaaaagggagtatacttgttgcttcagggcaaaacaaagaccagtgggaagaaagttatcaaaggttgatttcagctcctcacaaagagctttctaaggacaggctatttgtgaagggactaaatgtgtttaagtagagctgggcggtcacatgagaccattgtcctgaggaagctcacccaaaaaccccgatggccaggatgttgactgatggctcaccctggagagttgacatctggagcctccgctgacaagcagcatggtccgctggcaggtgaataggggccatggttctgcgggctctctccaggggtggctgaggctggcactccacagtgctgctaagcacatgggtcacagctgcaagaatgctggggtatgctgactaggcaggtgtgcggaggtcacgatgcagctccatcttcaaaacaggaagcatttctcggagctgtagtctcacagactctagagagatttgagaggagactgtcagagagacacagaggcctgggtgtgtgtggatgaggtgatttctaaccggttgataataaggtagtaagctttatgtttctatcatatttatttcccccctcagatcaggttgtctgagccagaaccacatatcccagagcaggcatgttagtgatctgggatagagagaaggacgttctaaacaatgtctggaaacataaggggctgagatgcatttagccatttgaaaagataatggaaatttctttcaactaattcctttgaggtttaactgtatagtattgcctttttcatcctttcacaaaacagaccctggaaggactcaaattggtaagtgagaagccagttactaccaactactgggcagcttcttggcaggaggtgagagctttctgcttcctttttaggacaattccacccttccttgagtgggaggagttggtgaggtggctgaatgtcatgagggtttggagaggaggtggctgtaatcgcacaggcactggcattgaagagaccccgggaagggaagtacctctggctccatggcaggatctggagggaggaagggaagattcatagcatagcaggtctagcgtaccgcacttgaaaagactatggtatttattggttcattgaactcaactaaacccaaaatactgggtacctcatgtgtgcagttcttagtgccaggaatgatgggctgtgtaaggaagaatccagtaactccctcaactaacttagaatatttatttcctaactaaaagaaacataagtaagagtcaacaatattgtttgttttgctttttatgtagtgtcaggcacagaaatatgctcagtaaacacttgctggttaatggccactgcaggtccctgaatttgcgttgagttgaaagaaatgccaccaacctgcccctccactgccaggagttcaagtcaggagagcagccagcctgactatagaagaactacacagtgcctaaagttccaggaaaccttccagttgcaaggagagagagcagtgctattttaataaatagtacatgatagttttgctgtataccaggcctacacagtgctagacactggaggcaaagacagacaaacagacaaaataattaaaatgtggttaagatcatatccaaatgtaaattaggtccaccactgtggaaaacagtgtggcagttcctcaaagacctaaaaacagaactaacatttgacccagcaatcccattgctggatatacacccaaaggaatataaattgttctattataaagacacatgcacatgtgtattcgttgctattcaaaatagcaaagacatggaatcaacctaaaggatcatcaatggtagacgagataaagaaaatgtggtacatatgcaccgtggaatactatgcaaccatacaaaagaatgcgatcatgtcctttgcagaaacatggacagagctggaggacattatccttagcaaactaacacaggaagagaaaaccgaatattgaatgttctcacgtacaagtgggagctaaatgttgcaaacacatggacacatactggggcctatcggagggtggagggtgggaagagggagaagatcaggaaaaataactaatgggtactaggcttaatacctgggtgacaatataatctgaataccaaacccccatgacacaagtttccctatatgacaaacttgcatatgtacccctgaacttaaaataaaaattaaaaaataaaaataaagattaaatttggctgggcacagtggctcacgcctgtaatcccagccctttggggggccaaggtgggcagatcacaaggtcaggagttcgagaccagcctggccaatatggagaaaccccatcgctactaaaaatacgaaaattagcctggtgtggtggtgcatgcctaaagtcccagctgctcaggaggctgaggcaggagaatcgcttgaacccaggaggtggaggctgcaatgagccgagatcacgccactgcactccagcctgggcaacacagcaagacaccgtctcaagaaaaaaaaaaaaagattatattctttgttgaatataacaaagtgaatataaacaaaatgaaaatttgggggaaaagtaaaatatcatttggcattaaagataaccccttaagaaaatcactatcagtaccaaacatggagccatccagccaaacccatagaattctagaacatcagagctggataagcccttagaacaatctgtccaaatctgttattttgcagagggggaagtggagacccagccatgcaaaggtattagcaacagttagtttacatttctttctggctgcatttacagtgggtaaatacatcttaactttagtgggttgaaaaagacaggtgctatttcctcaaacaatattttggctgctggtgatcgactcttagagcaagagaaacactttctaacatcgatgtgggattttgtgtgtgatgtgtgggtttcctgagctgctgagcttttccacaatctcctgctctattacttcgtagcccactttcctttaatacccaccgtcagagaggttctctttaccattcctctgctcagctccttcagaagtctgtgtacaccgacaataaatggtaggtctgaaaacagatgagaggtttttaaatttgaaaacagatgagaggctttcttccctcaagggatgatgtggggtttagtagcttcagctatgttgaattttacttataaatggtgatgacttgcttataatgtgaggtttattttctgttttatatgtatcttataagcagccacatgagcaaatatttaatttattgtcactcttgtactgttggacagcagcagctcatgtgaatgatactataccaattcaagctcgggaatgactattggacacccagcacactgttagggttatctgcgtgtgtccatgtgatactgaaatggctggtcccctggtcaaatagccagagaaaccagagggaaagtgaattcctgaacttcattcaattaaatgaattgaggtttagatgttttttactgtttaattcaggcgaaacatttgttattctttatgtagaaacagctgaggcaaaaatggatggc

SEQ ID NO: 927 - DNA, 2400 bp, Homo sapiens
  misc_feature (1)..(2400): DMR6:5792601
gctaataccaaagagctttttccctatgttttctcaaaatggattaaagacttaaacataaaacctgaaatgtaaagccacattccatcattttaatcagtccctggcaaatacttacaactcatttgccctgcttgtcgctctcatgcttgcctggaaaaatccctcccctggtgtctgcatctctgcacccacccacacgtgtgaacccaaacagcctggagacaaagcccaaccagtgccaatgggtgtcactctgcgttgctgactggacctcagtggcccctaattattgccagccaatcccactgcagtttattaatcagctggctcctccttttcctggataccagctcatactcctctgtcctggagcctccaatgctccttcctcctgctctcactcgaggggagctgggtcccattcccaacttacctgggacatggaagctgtcagaagagagtgcctttatgctcccgtacctcacctcccgtttcctacacaagtcactgggtgtctaccacagcttgtgtcccccttcgtctattccaggatttcactcagcccttatccattttaataagtctgatatgtccacactttgaaactgcttggcctaaagagggtgaggctgtgctttgatgccatgagaatttcctgagcagccttctcccgcctcctgtggggtctgcaagggaaacctgagcaggaaaccccaggcaccagagggacgttcagcagccactttcagtaaaatgccattgcctaacagcttaattacgagctgaaatgaaaaaaacaaataaacaaataaaaccctaacctccttttctatgcttaattccattcctagtgaccttctttgatggaaatagagaaattctgttgttgtattgaagaagtatcaaatttcccacatgtgcatttcagcttctcagaactcatggttgccatgggctgtggtgcaagcttatctgcccctggcccacacaatgtccaatgtcatgtcatgggacccctgccactttgtgacataaaatgtaagaacattgaatgctactggctgggtacggtggctcacgcctgtaatcccagcactttgggaggccaagacgggcggatcacaaggtcaggagatagagatcatcctggctaacacaatgaaaccctgtctctactaaaagtacaaaaaaattagccaggtgtggtggcatgtgcctgttgtcccagctactcgggaggctgaggcaggagaattgcttgaactcaggagagggacattgcagtgagccagcattgcgccattggactccagcctgggcgacagagtgaactctgtcaaacaaacaaacaaacaaacagaaaacacgtaatgctactttgaggctaatgtagacaatatgtgtttccctgccacaagccagcctacatttggctgtgccaaggtagagggcaggagcttgcctggagtaggcaatactgtgggatccatcaggaaagccaccccctggtctgcagaggactgttctgtgaccgaagagcttacaggaaaggtcaatgtcgactcaaggttaacttaggtcattcagtgtgttttgactgagagtttatcacatattgggtgcagtcctaggcaagtgaaggtagtgtcactgtcaacaaggatgtcacagccctgccctcatgttgcttatatgccagtgggagggaaacatgaagacagataagcaggcaaataactatgtgcaattgtagtgggggctgtgaagaaaatgagcataggcctgaaccagagtggcagtggttgcattttaggggtattggtcaggagagtgtctccggaggttgacattgaagctgagacccagtggatgagaaggggccacttgagtggaagacatcatcctggccaagggcagacccagaacaaagacccgagatgaggcagagatgggtgattatgaaacagaagacccatcagtgtggcccctggagcagagggaccagggagaggcaatgcaatgaagctggggagaagggccttgcagccagatgaggagtctggatttcaatctcagagaaatgggaagcccttggaaggtttgagaaagagtgagccattgtctgatttgtcatctaagcagtttagtcttgctgctttgtgtgaatggattcaagggggtaaaagtggacatgggagaccagctggaggaggctgtagtcatgggggttggaggtcagggtgactgggactagggagggagaagaggacggagttgagatgggttgattggatgcaaagaataagggaggggtggcatcaagtatggcaactgtgttttagggcccatggatcttggtgtctggcagaaaaagctggaggtgcatgagttttaggg

SEQ ID NO: 928 - DNA, 200 bp, Homo sapiens
  misc_feature (1)..(200): DMR6:7158401
ctacaccccctactgccccagacccaaccccaactctcccacctcctgtaatttgcccactccacacacaccctctgtaatgaggcccctgcccttcagcaggacctggctcctgggcttcttgtggtacttcctgggtatcagctccctccagcctccacctccatacccttcctcttacactaccccagtccactaat

SEQ ID NO: 929 - DNA, 200 bp, Homo sapiens
  misc_feature (1)..(200): DMR6:7482201
gacagggccacaaggattaccgatagtgtaaagaacatccgtggtgatcgaatagatggggttcaggatggtaaagagaagcacactgttcacgctccggatcatccgagttcccggggcgggagatcttctggctggtagagtagttgacaaaagctgggtgaccggcaatatgtatttggttgtcggctgtgtagttc

SEQ ID NO: 930 - DNA, 400 bp, Homo sapiens
  misc_feature (1)..(400): DMR6:7490001
aatgaaattgcaggctgggcacagtggctcttgcctctaatcccaacactttgggaggccaaggtgggaggatcacttgagcccaggagttcgagaccagcctggccaacatagcgagacctcatctctactaaaaatacaaaggaacggctgggtgtgatggtgcgtgcctgtagtcccagccattcaggaagctcacggggggaggatcgcttgagcctaggagattgagactgcagtgagccatgatcatgccattgcactccagccaggacaacagagtgagaccttctctaaataaatagaaaaaaaagaacaaagaagttgcagaggtacttgaagaggctggtaataaataaggaccatatgctctctcttttaaaaatgtacctgtctgaag

SEQ ID NO: 931 - DNA, 400 bp, Homo sapiens
  misc_feature (1)..(400): DMR6:7691701
ccgctgtctcagatttctgattcctcattcctatttggccagcctgggtcaggtgtccaccttgggatgagcagaatgcactaacacagataaggctgcctgccaggcccctccgtgtggtgagatgacggcctggtaagcacgtagttcttagagcattgaggctaagatggcccccactgaaggcaccgtgaaaaggggattttcagccctgggtcatgatcctgctccaaggtgctccgtcgttctgggttgcagcctattggggaaatgcctccatgggcgagacatctgttgccagtgccacccccagctcctcccatggtcctcaggtgtggagtgtgaagggaaagatgtcaggagggggagaagcagatgacatgggtaagaggagaattct

SEQ ID NO: 932 - DNA, 800 bp, Homo sapiens
  misc_feature (1)..(800): DMR6:7849201
aaatgttttcataggtagtgaagatctgtgtctgttagaattcagactctggtactttgatgtctaaggccttcctacagaaaacctttgcaaaactttgttgatctcttgaccaaccactgatctattaacagtttttctagaggaggggaatagaagggaagaaagattggaataaatttacacaaaagtattatatatttgtcagtttacttctttactattttttctgtattgcatgcatactaagctgacttcacaccgggagtatagactgctctgaatgacttctgacctttcatagtcacctatggtagcatcatgagtacatgcttttcacaacatgcactcatgatctttgttctgtagcacctttatatgaatagtgacattttgaggtctttagagaatatcattttcttctacgttttttacttggttaaaggcatacttttactgttgtaattgaattttgtatacctagaagtcaaagagcatctcttgaaagccaaccagaaattttaacagacacgttcaatatctgaaccgtggtcctgtttggtccatgaagatcggccacacttgtctctgctagttttgaaattccgtgttctgctctctgtgttttggcatttgcattgctcggcagtgatggtctatattctgtgtgtatgataacttttcttctccatgttctatcatggtacaatcttttgggagacatttgaagaattaccaaatttaaaatttatgttccatttaagcaatatcccaggttactcctctgtttagaaataggc

SEQ ID NO: 933 - DNA, 1500 bp, Homo sapiens
  misc_feature (1)..(1500): DMR6:9877001
acaacatgcaggtttgttacacaggtatacatgtgccatgttggtttgctgcacccatcaactcatcatttacattaggtatttctcctaatgctatccgtcccaagccccccacccccgaacaggccccagtatgtgatgttccccttgctgcatccatgtgttctcattgttcaactcacacttatgagtgagaacgtgcagtgtttggttttctgtccttggaatattttgttgagaatgatggtttccagcttcatccatgtccctgcaaaggacatgaacccatcctttttaatggctgcatagtattccacggtgtttatgtgccacattttctttatctagtctattattgatggacatttgggttggttccaagtctttgctattgtgaatagtgctgtaataaacatacgtgtgcatgtgtctttatagtagcatgatttataatcctttggatatatacccagtaatgggattgctgggtcaaatagtatttcttgctctagatccatgaggaatcaccacactgtcttccacaatggttgaactaatttacactcccaccaacagcgtaaaagcattcctatttctccacatcctctccagcacttgtggtttcctgacttttgaatgatcgcctttctaactggcatgtgaactcacagtttctacagaaagaactgtgtcttatccatgagatgagtcaaagtgaccctcctgcaaagtgaccctttgtaaaagccatgtaaaacattgagaatactgccagggataaaccacctggaaacaaagaacaagggtgggtctcatgatgaccagcatgcagattttgatggttgctctgcattccagccaatggaggcaccacaccagagaaaacagccaacagcatcatgttggaggaaacaaggtccatagatctaacaagcttgaattcctagccagcttccttatgcaacctggctaatcttgctaagtcttccccaggtcaaagggcaacttctggtctttttctctcttttccagcatctacccctgtccaaaccttcccaagcagtggagagatgatccaactaagtcttagtggtcttgttaagtctcttccaagtcaagaggcaactgcaggttagtgagtactcttggaagtattatagaatctgcccccccgcccccatttcccagctgctgggtgataactgcatcaaacctcagtactctgtttcagcctatcctagttctggaggcaagcccaagtccacatatatctgtggaacacagcctctgaccctactcactctgtgtggccaagcagcaaccccagaatcctcatgtagactcaaagcccatcccacagccctgcccaactacagattacaaacggcagtactagccagccaaggaaaatgacctgatcagagaagattgcagagcctagccagtagtctcacctaactacaaagcacagcattcagtaccattcaacctcagagcaga

SEQ ID NO: 934 - DNA, 1700 bp, Homo sapiens
  misc_feature (1)..(1700): DMR6:13577101
ttcctttcactcaagactgctttggctatttagggtcttttgcaattccatatgaactttaggattgttttttctatttctgtgaaaaatgatattggaattttgatagagattacattgaatctgtagattgctttgggtagtatggacactttaacaaccattaatttttctaatccgcgaacatgggatacctttttacttatttgtgtctcttttctcacatcagtgttttatggttttcagtgtacaggtcttatatctttggttaaatttacctgaagtggttttttctttaatgctattataaatgaaattgttttcttaatttctttttcatatagttggttgttagagtatagaaacaccactgatttttatatgtgattttgtatcctgcaacttccctgaatttattagttctaacagttttttttggttgagtctttagtgtattctgtatataaaatcatattatcatcaaacagggatcatgctgataacatcttatatatagaaatctcatatatcttatatgtctctctatattatatatatatttatatatccctatagatctctctgtatatcttatatacatagatattatatatctatattttatatacatatctatattatatatagatcttatatatagaaaacatatatagaaaaattcttcccttcctatttggatgacttacttcctttccttgcataattgctctggctaggacatctagtactacactgaatagacaatgtgagagtgagcatcattgtcttgttcctgatcttagaggaaaagcattcaactttttaccgttgagtatgatttagctgtgagtttgtcatatttggtctttctgtgtcacagtacttctatacttattgagagtttttattatgaaaagatgttgaattttgtcacatgttttactgcatcttttgaggtgatcatacagtttttgtcctccattttgttaatatggtatatctcatttattgatttgtgtatgttgagccatctttgcattccagggataaatctcaatcatgatgaatgatccttttaacgtgtcagtgaattcagtttgttagtattttgttaagaatttttgcatctatgttcatcagggatattggtctgtagtttttcttcttgtaacgtccttctctggctttggtatcagggtaatactggcctcctaaaatgagtttagaagtatttcctcctctttagttttttagaagagtttgaaaataattggtattgggaggccgaggcaggcggatcacgaggtcaggagatcgagaccatcctggctaacacggtgaaaccccgtctctactaaaaatacaaaaaattagccgggcgtggtgtcggttgcttgtagtcccagctactcgggaggctgaggcagaatggcatgaacccgggaggtggagcttgcagtaagtggagacggcgccactgcactgcagctggggggacagagcgagactccatctcaaaaaaaaaaaaaaaaaaaaagaaaataattggtattagttctgctttaaatgtttggtagaattcaggtcatcagtgaagccatcaggttctgagttttctgtaaatttttttccctcaaatttctgatataatctttcacttctatctttcagaattggtagggtgcccccctttttcacag

SEQ ID NO: 935 - DNA, 200 bp, Homo sapiens
  misc_feature (1)..(200): DMR6:14313701
ttgcaggtacagcccctaatccataagactatccccatagttggtgggattctctcttctttagggaaaaggaaatagagtagaggaaggataagtgacttttaagaagccccacagtgagtaagtggtagagaaggtggtcaggcggcctgaggctggctggttttggagccattttgccccagaagcattcattcagt

SEQ ID NO: 936 - DNA, 100 bp, Homo sapiens
  misc_feature (1)..(100): DMR6:16877001
gataatggcctccagctccacctatgttcctgcaaaagacatgatttcattcttttttatggctgcatagtattccacgatgtatatgcaccacattttc

SEQ ID NO: 937 - DNA, 3400 bp, Homo sapiens
  misc_feature (1)..(3400): DMR6:18323801
accccaccagctgtgccttggtggttctgtgcattttatagacctgagcatgggccatggcagacctagtcggtgaatcccaagggttcagagcagcagctgttggagagctctcttgccaccataagtgctatccttggacagagttgaacttggaggctcttgtctgagggtctttttttttttttttttggtaagcaagtgccttgctgtttttgaaagggaaacgtgttagttccattgcatgtggaaaggattggggaaaatagaaatgggtccacactagccgccttacagatttaaccgcatgtgacatcttggcttgtgtgtcatacagtactagacaagaccatggtggaagctgaaaacataaagggctactaaaccaatcctagcttattttagtgcaaatattaatggtgactctccattaaagtgaaacaatccaggaaaatgttaaaccagacaaaatagcaggataatacgcctaaaccagggctgtccagggcagaaaaagaccctagttataaggatggcacattatctcgggagtttttgcataggaacactagagggcgctttagactatagttaagaatcctgctttgatttacagaaggaaacttactgtatcagattgatgttataaatttcagcagtggttggtttatacattggtattcctagaacatggaaaaatgcaatacaaatgttttcgtgttcccccttcccatgctggagtggttacgataatactgtttgtgttttacttcagattaaaatcttcagaagtgccctttagttgtcaaaagtgtcaaacactggggataaaaaggtcacacactgttagtgagcaatgaaaatttagtatgataaactgattcagaaaacaacttgctttgaatgttcttgatgtgctaggtatgttttcctaaaccttttatgcaggacacatttaattttttattacaattctgtgagataggcacgactgttatttactttgtagatgaggaagccgaggcactcggtgttgaaaagactgcccagggtcacatgtcttgtgcatagataatgtgctgttaaccgttgtactgtgcaactgtgcaacacagttgcatggataataattagtgaataatacctctatgaatgaatgaataaatattatgttacatagatactaagcatatgggaaaggagtagggaaaattgcacttcatatttttttcctagtggctggtccaattatttaatgaatcccattccagctctcaagagtccagtggagtccactcagggttggaaatggatttgtctatgttacattatggcttacctgaaaatagtgaatgggagttcacggtcactcagtcatccaactcttgagaatctggcctggggatggaatagaggagcatgaggaaccaagagtgggaggaatggggtccacttttggagaaaacaagaaaaatgcaaggaggaaaaattgcttcagctccctggcagactcgttctctaagaccgactcaggagacggtggaggctctctctgtgtccctccaggggctgctccaggaaccaggctcctttggggtgacaaatacgtccacccctagtagaaccagagaatatgaatagatgctgaagtcctaggactaaaactggtttcagtgaggaatgggggaggtcctactacaggttggggaggaatggatgagattgtccccctatttaaacatttcttttgttgtatttttttattatagtaaaatatacataatataaaattgaccatttcaccagtttcacgtgtgcaattcagtggcaataagtaattcacaatgtgaatgacttttttttttttttttaagacaagatctcactctgtttcctaggctggagtgcagtggcactatcttggctcactgcagcctcctcctaggctcaagtgatcctgtcactgcagcctcctgagtagctaggatcataggtgtgtgccaccatccctggctaatttttgtattttttgtagagacagagtcccactatgttgcccaggctggtcttgaactcctgggctcaaacagctctcctgcctcagcctcccagaggtgctgggattacaggcacgagcctccatgcccagcctgtgaattactttttcataatcacaaatagcaactctccatttcctcctctccccaacctctggaaatcaccgttctactttctgtctctaatgaatttgactaccctaggtaccttgttaagtggaatcatacagtatttgtccttttgtgactggcttatttcatgtagcctaatgtcctccaggttcatccatgttgaagcatgtgtcagaacttaattttttggttaatgttagaagactggagaggagatggaaggacatgttcgggcttgcactccttgggtggcagtgggagaaagacagtaggtgtgggatgcctttctcctgcccttcaggaaatatcatgcttccttctaaggccatcaagtggtgtgattgatcaggcaacagaaaaccagcctcccattcccaaaacctatcccccattccttctccatactgcctaaaatacacagacttggagactggtttgatttaacaatgagagtgcatggggaattgaggtggggagaagatgctgtcaattatttactttattaagtattactgtaatgtgaattagaatatcagatcattttccacctctgtctaccccagttgaactaatgaagcaggagttatagagttggagtggagagtagagaagggatgccattttgggcacgtatatgacaggctcataccacacaatgtgagcctcaggaatccggggagaatgggagagagaagttttttttttttttttttttttgagacggagtctcactctttcacccaggcctgactgcagtggcgctatctcggctcactgcaagctccgcctcctgggttcacgccattctcctgcctcagtctcccgagtagctgggactacaggcacccaccaccgcacctggctaattttttgtattcttagtagagacggggtttcaccgtgttagccaggatggtctcgatctcctgacctcatgatccgcccgccttggcctcccaaagtgctgggattacaggcgtgagccaccgcgccaggccaaagcgggtgttttaagagcccccagctctggttctagtaccagaccagctaacaatgctgccccgatgcgaagtgaaggggagctgggcatgggtgttcactgtgtgcctttcacaggatacgtctacttggagggtggcctaaagcctagttctccaacctgtaaccaggagggctctctcacaggaaccttgtttatactggcagatacc

SEQ ID NO: 938 - DNA, 900 bp, Homo sapiens
  misc_feature (1)..(900): DMR6:18876801
ctacctttattgctttttaagatagaactttaagtcatttttaatgtttaatatgtacatttaaacctataaatttccctttagacactgctttccacaaatgtcggcatgttttatttttgttgttttccattcaaaatgtatcttaatttctgttgtaatattgtctttgacccaagcattatttcaaagcatgctatttagttttcatatatgtgaagttttctgaggtatcttgttattgatttcaaatgtaattgttttgatcagcaacttgctgtgcatgattttaaactttatgaatactaatttaatggtccagcatatcatctaatttggtgagtatatcatgagacataaaagaacatgaaatctgcaattgttaaatatagtattctataagtatcgattaggtgaaggtggtttataatgttgctcaactattccatgaccttaccaattttgttttatttaattattcaatccattgctaagagaagaatgatataatgcactagtattatctagttctccctctaactctatcaatttttactccattattttgaagctgtttcattaagcacagttacaatttttgtcctcctgttgaacttttcttttatcaatatgaaatgtccctctttacgtctgacaattattttttgtcttgaagtgtatttagtctgctatgaatttatttaccatagccttctcatacttattatttgcatggtatgtggtttcccattcacttagttctaacctccttgggtatttttatttaaaggattttccttataggtagtacttacttgcttcaatttagttctactcccttaatttttttgttttctgtttttcttttcctctcttcccactttctttccttcttttgga

SEQ ID NO: 939 - DNA, 1800 bp, Homo sapiens
  misc_feature (1)..(1800): DMR6:19477101
ggagtgcacaacatcgatccctcctgtgcacagttcaaaataaggtttatgctcctatgagaatctaatgccactgctgatctgacagaaggtggagctcaggcagtaatgagagtgatggggagtgactgtaaatacagatgaagttttgctcacttgcctgccactcacctcctgctatgcagcctggttcctaacaggctacaaaactggtactggtctgtggaccaggggctggggaccgctgtgctaaagtatttacttcactacagtttttgatactggatggccttggagagcaatgccccaaaatgaaggctgcagaagcagctctctctgacctcctgccctcctgtctctgacctctcattctcccctgaggctagcaatagaaactagaatccctcttccccaagtcaggtcatagaatctagaacccctttttcccaaagccggccacataacctaaaaatgttgttctaacttttcctttatctttctgtgtaaaaactgacggtaaataaattaatctgacttaccttatttgactgtaggtcataagactctcattctagagagggttatgccccatacccagaaggaaggaatgctgcttagagaggccaagaagaatctagacagacaggacttgctgcattttcccactcagtctattggtattagatgacacccttgttgtccaatcacagttctacatggcagttcatactttattgaacctaagcatataaatggacagtttcctctgtacctttgggtattcattttgaaggcactcatggcatgtaaaactatgaccaagtaaatttctatgcctttgctcctattaatatgccttttgtcaattgagaacctttagaggttgaagtggaagatcttcccgtggctcctttaatactttgagtaccatttgtcaaaaaagtaaatatgtataatattgtgagctacacggtttctgttaagaagctatttaaagactgttgaaaatatctaaaaccttacttaccattatttcttcccaagacaaatctttccaaggcattttttgcagggaggagttactaatacagagtagaaataacccttttctataggatgtctccgttgtctcagttaagttctgctggagtttgtggtgggtcaacttgaggaagataacaccacatagacttgaatccccttccctgtataattctagtttcaagtagactccaaagaggatatggagcagaagtgaggcagcggccagtacactctgaatgaagtggtgagaagtagatgctggtgttcccagctcatcttcactcttctctattctgtgtccagttcctctgtcccagtggacactgttgaccaacggcagcctggggcccgccagcaaatgtttggcagcaaactcacagaagcagctgccacacagaggcacgctccccaaggccctgcatggcctccccttcccatccacctcagacttcctgaccactgactcttctgatgcccccactcctgccttcccccactcccccagctccttctacactggaaaagctctcattcctgtaataaacccctggtcccgtggctcacagtggttccctgactgatacaggtacatactgtagacactccaagtgacgaagaaaacttgaaaaatgattctccagtaaatgtgatttttcttgtaagtaatttccttatgggaacattgaactggaatacaaagtatctgtcattaattagttctgttttttaaaaacatcctagaccattgctccttaa

SEQ ID NO: 940 - DNA, 1000 bp, Homo sapiens
  misc_feature (1)..(1000): DMR6:19657501
atgaaaaacatatattattaatatgtgtatatgtttgtgtatgtacgtatgtatgaaaaagatacatatgtatctttttctctctgtctgcttttaagatcttctgtttgtctttggtgtcttgaatctactctctaatatccctatgtgtagatttctttgtgactatcgtatgtcatttattatggtctctggctttgaggattggtaaccttaatagctggaaaaagtttcatcgattatttatttaatgattgcctcttctccattttctcctttaaggaccctgatttattttcatctctctttcttatttttcacctgtttttccttattctgtattacaaataatcttagattattatatctctgtcctaatgtgtataatctgtttgtaccatttgttgaatgtttattttcaaatatcacctgtttccgtattcctaaaaactaactatatttgattttttaaatctacttgatcatgaagtctcttgctcattttcaattccctttttaatctttaagcatattgataatgtatattttattctacctgccagataactctaatatttgatgtctttgagattgtactaacctttgtttacaccaaggctcattcacagtgccttatttccttgtatattttgttatacttgtatctgagtgatgaggttcagggtatgttacctcaaaacatggcaccttggcatttgaaaaaaacagcagaagcaagaagttctcactgaccttctcctgccattctccactgaagcaggccatccagaaaagaattttctgaacttcccctagagtaagtcataagacattgaggaaaggaataaagacacagagttgctaagaagcatccaaacaaacagatcatgctaagttccccctggtttgttaccattagatcatacccttttgtcctccaatcatatttctgcaatagtcattcataaaaacagatttccctgtttctttgtgtcttcat

SEQ ID NO: 941 - DNA, 600 bp, Homo sapiens
  misc_feature (1)..(600): DMR6:22282901
ttgcagaggttcttgaatataatcatttctctggtttgcttaaataatttttgatgatttttttctggtccaaattcaatgaaatacaggaaaacaaagtttgtatgcatttggaaagaacattgacctcatcctctcttctctctgactttcccatcatttgtggctcttgggtgtctgtttgactcttctatctatatcatgtcctccatatagtccaggcctattgatgtttctatatggcccatgtcctttacttttttttttttttagatggagttttgctctttttgcccaggctggagtgcaatggtgagatctcggctcactgcaacctccgccccccaggttgaagcaattctcctgcctcaacctcctgagtagctgggactacaggcacgcgccaccacacctggctaattttgtatttttagtagagatggggtttctccatgttggtcaggctggtcttgaactcccgccctcaggtgatccgcccgcctcagcctcccaaagtgttgggattacaggcatgagccactgtgcctggctttacttctttcctcttggcagagccctttttgattttctcttagagta

SEQ ID NO: 942 - DNA, 900 bp, Homo sapiens
  misc_feature (1)..(900): DMR6:23750601
tttgggttatttttaaattaacttatctatgcttttgggttgtattctttatatattttggatttttgctcccttattagatgtatgacttgcaaacattttttctcccattttgtatattgtctcttcactctattgatctttttattctcatggagaagcttttcagtttgatatgatcccacttctctatttttgcttttgttgttgcgtttttgaggtcatacccaaaaagtcattgcccagaccaatgtcaagacgcttttccttcgtgtcttcttctagaaattttacagttgaaagtctgacatctgaatttttaatgacttttaagttgattttatatatggtgtgagataagggcctaatttcattctcttcatgtgaatatcaagttttctcaacatcatttattaaaaagactatccttgccccagtatgtgttctttacacctttgtcaaaaatcagttgactgtaaatgtgctaatttattcctgggttttctattctgttccattggtctatatgtctgcttttatgccagtgccatattatttaattacagtcgtgttgtaatatattttgaaatcaggaagtgtgatacctccagctttgttcttgctcagtgttgctttggctatttagaatcttttgaggtttcataaaaattttaggattgttttttctccgtttgagaaaagtttcattggaattttgttaaagattacattgaatctgtaaatcacttagggtaccatggccactttaataatattgattattccaatccatggacgaaaaaaatatttccatttgtttcttcttgaatgttttcatcaatgttttaaagttttcatgtacagatctttcacctctttggttaaatgcattcctaagta

SEQ ID NO: 943 - DNA, 100 bp, Homo sapiens
  misc_feature (1)..(100): DMR6:24333801
actactgaggcaaatcaggcaaggtgtacagtagcttgggttatgatggtagaggtggcagaagtggagagaagagggtgaatttcagaaacaggagtta

SEQ ID NO: 944 - DNA, 100 bp, Homo sapiens
  misc_feature (1)..(100): DMR6:24871101
agagtacatttaagagctgacatttatttacagtctgtttctagcattgcatgcagtcctccctgccccttgggatctctaaagttttcacttgctttga

SEQ ID NO: 945 - DNA, 2200 bp, Homo sapiens
  misc_feature (1)..(2200): DMR6:24872801
ctccccagccccatccagtaaaagaagctatttggctaaaaagaacagtgttaacatcataatgactgcatagtacctaccaggcgagagtttcttttcatatcttttaactgagctgtcaacttgtccagctccgtctggtgaacctccagatattcactgcaaagataagacaagatgtaatcgtaatctctgcgcctgttaagtggaatctggtgctgttgctgacttttccttctcaaaggggattaagaattgaaccttgctctgtagttgggcaggaggctttgtattttcccagtctttcaacattttgaaaggtctagcagtggcactggatactatccagctgggaaagtagaaaaggagaaaaaagctgaaagtcgagaaaagaaaaaccagtggggaggcaaggggcaagaggtctgtagagtcagccctggctctggcctgacagaattctatctagtcaaatagaacaaatagtgaatgtcccattgcacactaggaaagtcttattctgggttcacaatccctgtaagatatcagggaggtttcagaaccctccttcagcaatgtctagaatggatatgtctgtccatcattgtttaagtgaaactcaatactgcacagggttccaggtctccatcaatgttatgaatatgatgtggaataccaatatatttcccatctctgggacttatgtcaggcttccctaattgtggtacaagaataaaatacctcctacagaaatagacatctgaaaaatgatctcataagaccagcttttctctgaccccttgggtctttccttaaagtacattatcaggttcaagttcttactcaagtccatttttcaaggccctgtagacttcttccacccttttaggctgaggctctttggggggattgttgtttttgtggcctaaattgtgcattttcttcagtttggcctgaggcttcttgagagcggaggaattttcaatgaaggagttacacctatggaaagaacagaagaaattgtgaggattgggcatccaaaaggatttgaccaaagaaaaatgtcttctattatttacttgtttgttttagagacaaagtcttcttctgtcatccaggctggagtatggtggtgtgatcatagctcactgcagccttgaactcctggactcatgagctcaagtgatcctcagcctcccaagtagcatgtgccaccacacccagctaaatagtttgttgttgtttaaagagagggggtctcagtttggtgcccagggcaaagtgcagtggtccaatcatagctcactgcagccttgaactcctgggctcaagtggtcctcctgcctcagcctcccgaggtactgggaccacaggcatgcaccaccacacctggctaattttttttttctttgtagagatagggtctagcttcaggcaatcctcctgctgtggcctctcaaagtgctgggataattttttaaaacattttttgtagagatggggtcttgctatgttgcccaggctggtcttgatctcttggcttcaagcaatcctccagccttagactctcaaagtgctgggattacaggcatgagccactgtgcctgaccaagaaatgtctttgtaatcatcttgtgttcacactagtgtcctttgcagaaggtaatgttcccagatctgagccatcctgcatttagtttcttagtattagatttgttaactgctgaaacctgaaagctctgttgggcagaggctacctagagtcaaagtctggcttcagggaatgtgtattctgagtggaaatgtattgcttttctaaaacatcataggaagctaagggcaaagagttccaggtggacataataaacaggcagaaggatataatccaactaaaaagatacatgcactatgcaattttaggtacaagtgtctatgaaattcaacgaggatgtgaataaattcttttcgataagggaccataagcatgacaaatagctaattctatatgacattaaaatacacgtagcttttttaaaagctttatttttaggaagcaaattactgattaggtataacttataaaatttcaacatctctagtagtgccagggatacagcttgcagcggtaagatggatatctgataacttaaaaccagagtactgatctaattaggagatgcagaggctaggccactcactg

SEQ ID NO: 946 - DNA, 700 bp, Homo sapiens
  misc_feature (1)..(700): DMR6:26438901
tgagcaaatgaacatttaaataaataagtatgatggataaatagggaatgaacagtggtatggattataataaagtaagaaagtttcgtaaaatattaagtatatcactataatctacatggtaggcatattggtattcaccaaaaattctttcacctttgctttatgttttagaagtgttatggtaaactgttgggaaggaaaagggggagggaagaattgtgggattctgttggtaacagagaccagaaataccattggcttaaacaaaacaagggttttcttgttttttcttgatgttgttgtttgttttcatgtaaaatgaatttagatggcggtagtccagggctgacctggcagctcagagatgtcattcatgccccagcctgcttctgacttcattctctgctgtctctgcatgtggctttcaacctcaaggttgcctcatggttctaagagggctgccgcacctctagttcaaaagtctacatccaagacaagaggaagaaggaagtacggagagtgtacactcacactcccagctatcttggcctccattctgaaggatctctgggagaaacacaagcccacaactttacctacaaactattgattccaacttagtcccttgttctctggtatctatgagatagcagagcctattgaagtacccaagaaaattaggctttatcaccaagaa

SEQ ID NO: 947 - DNA, 400 bp, Homo sapiens
  misc_feature (1)..(400): DMR6:27882001
tttgctcttgttgcctaggctccagtgcaatggtggatctcaagggattctcctgcttcagcctccggagtagctgggattacaggtatgcgccaccgtgcctggctaattttgtattttcagtagagacgtggtttctccgtgttggtcaggctggactcctactcccgacctcaggtgatccacctgcctcagcctcccaacgtgcggggatctcaggcgtgagccaccgagaccgccctccgccctcttgcctgacgtttactatgccatatgttccatattctttgagtgcttatggctttggttttttggagacggagtctcgctctgttacgcaggctagagtgcagtggcgcgatgtctgctcactgcaacctccgcctcccaggttcaagca

SEQ ID NO: 948 - DNA, 300 bp, Homo sapiens
  misc_feature (1)..(300): DMR6:30996901
agtagtagagaatgctttacagcaggtggaattgctaacaaagacccttcccatgactgtgagaataggtctaccaatcaagggatggttagaaggatttttaaacaacccacctccgctgtagccccaacacctaccttgaataaatggcatgattatttgcaacaaggaagaatgctagcaatgagtcccttaagcccagaattacatactgcattaggctctgttatgacgtgaacaaacaaaggataccacctgaccctctccaactccagcacctgacatggtaagcatccagat

SEQ ID NO: 949 - DNA, 700 bp, Homo sapiens
  misc_feature (1)..(700): DMR6:31061201
gaaacagaaaatgaagtataaactccttatgcttatagctctactgttccaataacgttagaagtaacagcagtagtttaatgtaatgcatgatatttctttactgaagaattcttcgctccaacattaatattgtagtgattgctacagcctagtttctcaaatctcatttgccacttgatgttttccttctttcatggatcgtctctgtacaagctctctcaagaccttcagtctctcagtcagctgcgggattattgggcccttaatgcaaatgcaccgtttaaattttaagacagttctcgttctactcttgttaggctgtgcaattgtaaagactaatcatttctattagctttatgttggttttatattggtcatcaatagaatccaggaaatgcttatattatggggattttcaagattattacctgaaggaaaacgtgacagaaacagctctagtctccccttcccttacacttggagaacctgagttttgggggtgatggtaatgtgcccagctgaagaaaaccatttcccaaatccccaatttcccggtcccccttgcagccagtgcagtgaggagatacagctctggccaatgtgataaaggcataagttcctggggatggtgtcccttccagatgaaaaggccaaagctcatgaggagaaagccctttgccccttccccttcgttcct

SEQ ID NO: 950 - DNA, 1400 bp, Homo sapiens
  misc_feature (1)..(1400): DMR6:31080501
caattaatattttcataaacataagagacgatattttctccatggtaaaagaacacattattaaataaaaaatttaaagttgaagaaatcttctaaaaagaagcaaagggtaaagaaatgtagatgggaccgggcacagtagctcaggcctgtaatcccagcactttgagttgcggaagtgggtggatcacttgagattaggagttcgagaccagccttaccaacatagtgaaaccccgtctctactaaaaatacaaaaattagccaggcgtggtggcatacgcctgtaatcccagctacttgggaggctaaggcaggagaatcgcttgaacccgagagaggtggagattggagtgagccgagatagtgccactacactccaacctgggtgactccatctcaaaagaaaaaaaaaaaggaaaagaaatgtagatggtatagaaaatatatgaaaattagatcatctggatgaataggaggatttctagaaagaatagacagagggaacagaagggatgaaattatcaaagaaataattcaagaacttttctcagaactgagagatatggttccaaagtgagatagacctcaagtgtctaacagaagtgtctaacaaaaggaatgaaatccaaggcatactaccataattttaaaaatactgaggacaaaaagaaaaatcccaaaattggacaaaaagaaaaaaacaggtcacatgaaaaagatcaaaactcaaatggtatagggttttctctttttttctttctcttttcctttttttttttttttttttttgagacaggatctcactctgtcacccaggctggagcgtagtgatacaatcatggatcactgcagccttgaactcctgggctcaagggatcgtcccctctcagccttctgaaaactacagacacgtaccaccatgcccagctaatttttaaatttaattttattttttgtagagacgaaatcttactacgttgcccaggctggtcttgaactcctgggctcaagcaatcctcccactttggcttcccaaagtgctggtattacaggtgcgcaccataacacctagctgaggacttttcaacagtagcactggaagctggaagatagtggagcagtgctttcctaatttaggtgtaaattttacaacttggaattttattttcagtaaaactattaatcagatgtaatcataatataaaagacattttcagacaaaatttcaaaaattgccctcccttgcccctttccttaggaagttccatcaaagtaagggattagatcaggagagataaagatgtgggatcctccaaagagtgaggagaatgaaaatcccaggaggttgctgtgtaggagaactagggatccgcaggtccagattaaaatggtttgga

SEQ ID NO: 951 - DNA, 1000 bp, Homo sapiens
  misc_feature (1)..(1000): DMR6:31326001
tattcctgtcaaactgccactgacattcttttttttttttttttgagatagagtcttgctctgtcgcccaggctggagggcagtggcgcgatctcggctcactgcaagctctgcctcctgggttcacggcattctcctgcctcagcctcccaagtagctgggactacaggtgccagccaccacgcccagctaattttttgtacttttagtagagacagggtttcatcctgttagccaggatggtctcgatctcctgacctcgtgatctgcctgcctcggcctcccaaagcgctgggattacaggtgtgagccaccgcgcccggccactaccactgacattcttcacagaactagaaaaaactattttaaaattcacctgaagccaaaaaagagcctgaatagccaaggcaatcctaaacaaaaggaacaaagctggaggtattacactacctgattttttttttttgagacggagtctctaccctgttgtccaggctgggatgcaatggtgtgatctcagctcactgcaacctccgcctcctgggttcaagtgattctccttttctcagcctcctgagtagctgggattacaggcacgtgccaccacgcccagctaattttttgtatctttagtagagatgggtttcaccttgttgaccagactggtctcaaactcctgacctcatgatccacctgcctctacctcccaaagtgctgggattacaggtgagagccaccatgtccagcctatgctacctgatttcaactatacttcaaggctacagtaaccaaaacagcatggtactggtacaaaaacagacatatagagcaatggaacagaatagagaacccaaaaataagaccacacacctacaactatgatctttgacaaacctgacaaaaacaagcaatggggaaagggttccctattcataaatagtgctgggataactggctagccatatgcagaagattaaaactgaacccctttcttacacca

SEQ ID NO: 952 - DNA, 3700 bp, Homo sapiens
  misc_feature (1)..(3700): DMR6:31814701
ccattctggctgctccgaccaatcaatctgaagccatcttagctttccccaagtgctcctcctacccggatcagccaacgcccacatacctcaggcttaaaccaactagggaactttccagtactttcccaaacaaggacctactgagcctttcaggttcacaatcaatcagatccctactggctcacctagtctcccgacgccttcgcttcagtttggaaacgtccagattacgcagccccagcgagtaggtgggggctccctcaatatcaaactgcacaaccggggtccccccaccccccaccccgtccctccctgcaaatttgagacggctccaactcagtaatctttttccaaactggcccatgaggtcagagacagtatctccattgtaacgtggccgggcggtgtcaacacaaacgcccccaccctcccctggacgcgcgtaacccgctccccgcaccagccccctgcccacaactgcgcaggcccagcaagcccccacaattaaaagcccagcgccgacccttcctgtcaattaggcgctgaagcgcaggcggtcagcatcgccatggagaccaacacccttcccaccgccactcccccttcctctcagggtccctgtcccctccagtgaatcccagaagactctggagagttctgagcagggggcggcactctggcctctgattggtccaaggaaggctggggggcaggacgggaggcgaaaaccctggaatattcccgacctggcagcctcatcgagctcggtgattggctcagaagggaaaaggcgggtctccgtgacgacttataaaagcccaggggcaagcggtccggataacggctagcctgaggagctgctgcgacagtccactacctttttcgagagtgactcccgttgtcccaaggcttcccagagcgaacctgtgcggctgcaggcaccggcgcgtcgagtttccggcgtccggaaggaccgagctcttctcgcggatccagtgttccgtttccagcccccaatctcagagcggagccgacagagagcagggaaccggcatggccaaagccgcggcgatcggcatcgacctgggcaccacctactcctgcgtgggggtgttccaacacggcaaggtggagatcatcgccaacgaccagggcaaccgcaccacccccagctacgtggccttcacggacaccgagcggctcatcggggatgcggccaagaaccaggtggcgctgaacccgcagaacaccgtgtttgacgcgaagcggctgattggccgcaagttcggcgacccggtggtgcagtcggacatgaagcactggcctttccaggtgatcaacgacggagacaagcccaaggtgcaggtgagctacaagggggagaccaaggcattctaccccgaggagatctcgtccatggtgctgaccaagatgaaggagatcgccgaggcgtacctgggctacccggtgaccaacgcggtgatcaccgtgccggcctacttcaacgactcgcagcgccaggccaccaaggatgcgggtgtgatcgcggggctcaacgtgctgcggatcatcaacgagcccacggccgccgccatcgcctacggcctggacagaacgggcaagggggagcgcaacgtgctcatctttgacctgggcgggggcaccttcgacgtgtccatcctgacgatcgacgacggcatcttcgaggtgaaggccacggccggggacacccacctgggtggggaggactttgacaacaggctggtgaaccacttcgtggaggagttcaagagaaaacacaagaaggacatcagccagaacaagcgagccgtgaggcggctgcgcaccgcctgcgagagggccaagaggaccctgtcgtccagcacccaggccagcctggagatcgactccctgtttgagggcatcgacttctacacgtccatcaccagggcgaggttcgaggagctgtgctccgacctgttccgaagcaccctggagcccgtggagaaggctctgcgcgacgccaagctggacaaggcccagattcacgacctggtcctggtcgggggctccacccgcatccccaaggtgcagaagctgctgcaggacttcttcaacgggcgcgacctgaacaagagcatcaaccccgacgaggctgtggcctacggggcggcggtgcaggcggccatcctgatgggggacaagtccgagaacgtgcaggacctgctgctgctggacgtggctcccctgtcgctggggctggagacggccggaggcgtgatgactgccctgatcaagcgcaactccaccatccccaccaagcagacgcagatcttcaccacctactccgacaaccaacccggggtgctgatccaggtgtacgagggcgagagggccatgacgaaagacaacaatctgttggggcgcttcgagctgagcggcatccctccggcccccaggggcgtgccccagatcgaggtgaccttcgacatcgatgccaacggcatcctgaacgtcacggccacggacaagagcaccggcaaggccaacaagatcaccatcaccaacgacaagggccgcctgagcaaggaggagatcgagcgcatggtgcaggaggcggagaagtacaaagcggaggacgaggtgcagcgcgagagggtgtcagccaagaacgccctggagtcctacgccttcaacatgaagagcgccgtggaggatgaggggctcaagggcaagatcagcgaggcggacaagaagaaggtgctggacaagtgtcaagaggtcatctcgtggctggacgccaacaccttggccgagaaggacgagtttgagcacaagaggaaggagctggagcaggtgtgtaaccccatcatcagcggactgtaccagggtgccggtggtcccgggcctgggggcttcggggctcagggtcccaagggagggtctgggtcaggccccaccattgaggaggtagattaggggcctttccaagattgctgtttttgttttggagcttcaagactttgcatttcctagtatttctgtttgtcagttctcaatttcctgtgtttgcaatgttgaaattttttggtgaagtactgaacttgctttttttccggtttctacatgcagagatgaatttatactgccatcttacgactatttcttctttttaatacacttaactcaggccattttttaagttggttacttcaaagtaaataaactttaaaattcaagtgatgccttttattcctttatttgggggtcagtagggtctgcataggttgtttttcccatagcgtctaaaatggaatggcatttttgcttccagtaagggcagattttgcagaggtgtgactattgtaatgtgatccatttgtgttagacaaatggtatcctccagtaaagcttcttgattctggccaggagtggtggctcaagcctgtaatcccagcactttgggaggctgaggtgggcggatcacttgaggtcaggagttccagaccaacctggccaatgtggtgaaaccctgtctctactaaaaacacaaaaattagctgggcgtggtggtgcgtgcctgtagtcccagggaggctgaggcaggagaatcgtgtgaacccaggaagcagtggtagcagtgagccgagatcacgccattgcactctagcctgggcatcacagcaagactccgtct

SEQ ID NO: 953 - DNA, 1600 bp, Homo sapiens
  misc_feature (1)..(1600): DMR6:31828001
cgtgggggtgttccaacacggcaaggtggagatcatcgccaacgaccagggcaaccgcaccacccccagctacgtggccttcacggacaccgagcggctcatcggggatgcggccaagaaccaggtggcgctgaacccgcagaacaccgtgtttgacgcgaagcggctgattggccgcaagttcggcgacccggtggtgcagtcggacatgaagcactggcctttccaggtgatcaacgacggagacaagcccaaggtgcaggtgagctacaagggggagaccaaggcattctaccccgaggagatctcgtccatggtgctgaccaagatgaaggagatcgccgaggcgtacctgggctacccggtgaccaacgcggtgatcaccgtgccggcctacttcaacgactcgcagcgccaggccaccaaggatgcgggtgtgatcgcggggctcaacgtgctgcggatcatcaacgagcccacggccgccgccatcgcctacggcctggacagaacgggcaagggggagcgcaacgtgctcatctttgacctgggcgggggcaccttcgacgtgtccatcctgacgatcgacgacggcatcttcgaggtgaaggccacggccggggacacccacctgggtggggaggactttgacaacaggctggtgaaccacttcgtggaggagttcaagagaaaacacaagaaggacatcagccagaacaagcgagccgtgaggcggctgcgcaccgcctgcgagagggccaagaggaccctgtcgtccagcacccaggccagcctggagatcgactccctgtttgagggcatcgacttctacacgtccatcaccagggcgaggttcgaggagctgtgctccgacctgttccgaagcaccctggagcccgtggagaaggctctgcgcgacgccaagctggacaaggcccagattcacgacctggtcctggtcgggggctccacccgcatccccaaggtgcagaagctgctgcaggacttcttcaacgggcgcgacctgaacaagagcatcaaccccgacgaggctgtggcctacggggcggcggtgcaggcggccatcctgatgggggacaagtccgagaacgtgcaggacctgctgctgctggacgtggctcccctgtcgctggggctggagacggccggaggcgtgatgactgccctgatcaagcgcaactccaccatccccaccaagcagacgcagatcttcaccacctactccgacaaccaacccggggtgctgatccaggtgtacgagggcgagagggccatgacgaaagacaacaatctgttggggcgcttcgagctgagcggcatccctccggcccccaggggcgtgccccagatcgaggtgaccttcgacatcgatgccaacggcatcctgaacgtcacggccacggacaagagcaccggcaaggccaacaagatcaccatcaccaacgacaagggccgcctgagcaaggaggagatcgagcgcatggtgcaggaggcggagaagtacaaagcggaggacgaggtgcagcgcgagagggtgtcagccaagaacgccctggagtcctacgccttcaacatgaag

SEQ ID NO: 954 - DNA, 500 bp, Homo sapiens
  misc_feature (1)..(500): DMR6:32631801
ctggagtgcagtggcacgatttcggctcactgcaagctctgtctcccaggtttacaccattctcctgcctcagcctcttgagtagctgggactacaggcgcccgccatcacccctggctaattttgtttttgtatttttagtagagatggggtttcactgtgttagcgaggatggtcttgatctcctgacctcgtgatccgcctgcttctgcctcccaaagtgctgggattacagtcgtgagccaccgcgcctggcctcctcatattattttttattgtgcagtttattcaagtgagttatttaaaacaactagttcacacacataggagttgttgctgataaagaattggtggaaatgatattaaataacaattgtttttataagtttcctctgcttcattaattttatgattgtgagaggccatgtgactggatatcagcatacaggactttgtatcagaatatgagcttggcagtcataagagattacttacaattc

SEQ ID NO: 955 - DNA, 100 bp, Homo sapiens
  misc_feature (1)..(100): DMR6:33310201
acaaagtatattaagaaagtataggcctggcgtggtggctcacgcctgtaatcccagcaatttgggaggctgaggtgggtggatcacctgaggtcaggag

SEQ ID NO: 956 - DNA, 1200 bp, Homo sapiens
  misc_feature (1)..(1200): DMR6:33632201
ccagggacagttttctcatccacagctgaatgggggtggggggagggttgttcagggtccctcggggatttccccagtctgtcattcccccagtctgtcattccccctcccatggtgctctgatggtggccaaggtggtaggttttgagtcaggctccttgatagtcacctgccccacttctatctagctcccttcctcctccttatctaatctttccagacagcactgacccaccctgctacctttcccatggcgcccacctggatctcaaagtccacgcagggtggaatggggcagaatgggatgcagctgtcttcctctcctacctcagatcaaggtcttggggtgtagaccccgtgggcatttcagggactgtgccctcctgcaaccctagaacaagctgtcaaccagctcctctccagagggcccagaacagccctgcctgcccacaggcctccagccaggaccctttccctgtagccccatcctcctgctccctctgctgttcagactggtcttgtgcctcccagtggatggaaggcgcactgcagggactgttgtcctctgggctcctgagcctctgctgggctggtcctggaggggagaaggggacacacaggtgtagacagggctcctgtcctcggcactcagcgtggtcgcaggagatcccagagggtggggaccacacccagcacatagtaggctcgtggtgaggtctgtcgagtagatggaggcctgggttgtgtctgtgccattctctgaccagctgtgtggctcaggggttccatccactctgtgggcctcactctggactgtggtaagaacacaatgagatactggatgtaaaaacgattgataaactatagagtcgcgcgatggaggggcagtttttttgtgatcttggctggggtaccaccggcctctaggtgaggggcgatgccggtggtgggcgtagcggggcgtgggcagggaaccacacgggagcctcagcttggccttgagatggcaggagtgggatggggcgtcatcctagtagaggctggacagtgagagatcggtgggctggtaaagggtgggaacaggtcttttctggggcccgtgggtggagggaccttgtggggaggcgttggcgagaggggggtgaagcgaagcggccacttacccctgtagagcgcggctctggtttcagcgcccggtgc

SEQ ID NO: 957 - DNA, 500 bp, Homo sapiens
  misc_feature (1)..(500): DMR6:33643501
gcacccacgctaggccagcccttgaactctgcctggctgtaacgtttcgggctgtggctgccgtgagtcccgagctgctgactgggctgagcctggggcacattccctctcctagccctttttccttcttttcctcctcctgttggggcaagggacctgggtagcccttgtctccaggtctacctcagggaagctcagagcctgcacccccagccccagtgcccccaagacatgtgtgtgggggcaggtgccagggaggagagtgatgaggtgactgccctccatttgcatgactggatgcccccttccctagcctacgcctcctctacctgtccatgctccaagcccggcttattgttattgtgattaagatatatttcaagtctacacgatagtaaagagaaaaatagggctgggcgcggtggctcacgcctgtaactgcagcacttgggaggccgaggcagtcaggtcacgaggtccagagttcgagaccagcctag

SEQ ID NO: 958 - DNA, 2700 bp, Homo sapiens
  misc_feature (1)..(2700): DMR6:36243601
gataaagggatgtggggttcagtagagcaggaccctactaccagagagcccagcagttagtctgcagggggctttgctctgggaggaagcatgggggctggtatcgcatttgactcaagacactcacctcccccaactctgctttgatgtggtatcctgcaggcatagggagtgccatggactggtgcctggggaattgcatgggaaaggaaaagatgaattgcatgtgccctccaggaagtttggaagctggtctggagagtgtgaagccagggctggctaaacatctacagcaaccatttctagctaagagctttaaactcattagtctcaatctcccaacagtccaggtgggttggaggcattatgtaattgtcatgcccctttcctgcacagattgagccccagagaggttgagtagcttgggcaaggtcacacagctgggaagcagtggagctggaattcacaagtccgtctgattctagagcccatgcacagcgtttctttctctcccttcctcttccacctcctttttctcctcctcctccttcctctctctctctcttagataattgcatttacatggtctcaaaatcaaagggtacaaaaggatatacagtgataatcctcttcctactatttcccagttttccttcctagagaaaagtaagggtactagtttcttgcaactagctttagaatattcaattcatatataaatgagtatattccatagatattcttccccattttttagacaaaaaaaatggtggcatcctatatgtactgtttggcactgagggttttgtttttttttttaacttagtatttcttgatagtctttccctgtcagttcataaaaagcctttccttattctgctttattatctgcatactcaactcatcctctatttggtggatgtagagggggctcccgaccttatgcagttacaacccattctgtgtgagcatccctgacctcaggtgcagaaggcatgagcagcacatctgtcagataacacatctgtcagatgacaccctagaaggggagatgctgaacacacttggtgccattcgttagcttctcctcaaatctgctcacagacttaaccataacgatacttctttcttctataatctggctgctccagcatgttcctctgacagcactttctcccacagactctgttgccaaacttgggtctgcccaccaggtgcagcaaagccaagcactgacattgggatttgcagcaagagaaagtgaggcatttactgcagggtgccaagcaaggagaatcgggcagctcatgcttaagccccgaactccagggtggctcacaggtaagggtttttaaaggcagggaggcagaggttacaggcaaagtcataaatcaatacatggaaactgtgcattggtttgacctaaaagggtgggacatctcgaagcggggcccgcaggtcataggtggattcaaagatcctctgatttgtgattggttaaggaggcaaagctttgtctaaaaacctggggtcagcagaaaggaatgttgagctctggcctgtgggtgtgacttcctccaggcccctcaggaagaaatgttgaacaaagaatggtggtctgagttcagtcctcggctcccaactgaagtctctgtgccagtggatggcattttccatttgctgggggcctgggtttctgaaaaacaactcaggaacatatattaagatgttatcttaagtttcaatagggaaccaagtattttgtgactctaacttccttggctattttttttgaaaagctattatttccttcttgcttatcatgttgttcatttactctcagggctagctaggtgcctggaacttcccttgaaagaactcaagatgttcctttatttctatgcctggcgagggagttatgcctggcaggcccttaaactctgtctcaactctggctatcaggatgctggtcctgccttccaggcactgctgcagggaggggtgggtggctctgcccctgtgcccagcacacagtaggtgagtactcagcacaggggagctgcatccgctcttctgtggcattgtcatttatcttcaaggagcatttcctcattcagtcctcacaacagccttgtgggtacctggcaggaaccgtcatccccacgttacaggtaggcaaacaggggctcagggacatcctgatttggccttggcctcattggctgaggaggaaacccaggctccctgactccccgcacagtttcactccccgccccccgccacactgcctcccagcggctgctgaaatgcaattagccagggagggacctgcttttcagctttatactgtctgttattccacacacagatatacgaatggcacagggccatctcagcctgtttttgtttgccaacaaacatgagaaagattaggatatctagccaacattttgtgagtcctcacaacactgcaggcaggtctctgtgcacatacacgctcatctacttctcagaaacagaggggtgagggctggtatcacccctgctgcacagatgagggtaatgagtagcagggagcagagccagggtttaaacagatcccacatttttggatttttttttttgacgaggtcttactctgtcacccaggctggagtgcagtggtacaatcacagttcactgcaccctccacctcccagg

SEQ ID NO: 959 - DNA, 100 bp, Homo sapiens
  misc_feature (1)..(100): DMR6:36786001
agactccgtctcaaaaaaaaaaaaaaaaaaaaaaatttaaaaagaaggaccacggtacatttattttcttctccttaaaatgtgctggattttccaaatc

SEQ ID NO: 960 - DNA, 300 bp, Homo sapiens
  misc_feature (1)..(300): DMR6:37443101
attgttttggtattctgtctccaaatgctaacccctgaatgtgtgaataatcacttttattggtcttcttgtatatcgttccttccaaaagctctttttgcaattataagaaataaaaatgttagccttataatggaatcgttgaaaatggaatcaggcatcagtgtttggatattgatgttctaataataaccaccagcagcagaaataacaatcatatcttcagtaaatacactttatatttgacaatgtactttctttttttttttttgagatggagtctcactctttttgcccaga

SEQ ID NO: 961 - DNA, 3700 bp, Homo sapiens
  misc_feature (1)..(3700): DMR6:37750901
gacgtggagaaacttttgagcctttggaagcaatattctttttttttttttttttttttttttgagacggagtctcgctctgtcgcccaggctggagtgcagtggcgcaatctcagctcactgcaagctccgcttcccgggttcacgccattctcctgcctcagcctcccgagtagctgggactacaggcgcccgccaccgcgcccggctaattttttgtatttttagtagagacggggtttcaccttgttagccaggatggtcttgatctcctgacctcatgatccacccgcctcggcctcccaaagtgctgggattacaggcgtgagccaccgcgcccggccggaagcaatattcttaagactggtcaggaccagcagagacagaagcttccttgagattagaggtgaggacaaactggaacacaaaaggtgagtcacaggggggccagtcacctacatcagccattcaaatacctaatgtgaattgagcatttcctacctgtgaggccctgtgggctaagcgctttaggggcataagcacatttaaacattttaacaactctgtggggcagatactatcatcagccctaattcacagatgataaaactgaggctcagaaatgttaattcacttgcccaacacatcatgcccagcatctgaccctttgtcatctgactccacagtctgtgccttaatgcatccccactgtcactgtggagggggaaaggccgcaccgggaaaaggaatagcagttctggggggttcataaaaccctagcctctgagaaaccgtaacatttgacacttctagtttgagggtactgggggagtgtgggctgggaatctagaaagatgggggtgatatcttctgtgactgccatcacgctgtccttccaggccaacccatctatgggacctgcctggcccgaagtcactgagacccccaaagcctcgggcttgcctcttctgagatcaggatctcctctgctctccccacccccttcaggtcctgctctgggtccttccacatctcctttcctctccttctccatcttctatccagcccataattgggtggtctagtgccaagagatcagaccccagggcagaggtccaggggcttgggacactgctgtttccttggaaaagaagtcggggaggagaggactgtctacagccagtgtccccaatgaacctcacgtattacagcctaaaagaatacttttgaattggggaggggaataaaagaggaagtcgataacttggaaaggattttgtgattgattgtctcattccccagtcccaaactaacatcagctaaacacttgcacaacccctcaccagtatctaagcccgtcctatatgagctccaacccggggccttcgtccagcctccgttccagtgctcattcttggccaaggccaagccaagcttccgcaatctcctgggacctcagtgactttcccagtggattttaattacctgacaaaagtaatgccaatatttataagggaacaaacacagataccataaataaatacattactgactcattgaattaattagtgtttaattacttgaaattactgtcagttactaccaattacctgaacaacaaatgcattctttctctattaccaatggcagttttcggagtgaaacccagagaccttgggctgtaggaagagacctcaggccatattagctctcacctggcccctccccactactgcctccctcttttggtcactcattcactcctcgagcacacatttattgagcatttatgatataccagtcattgttctaggcactggggatgcattcataaacaaaacagacaaaatccccagctttgtggagcttacaatccagtgagtaaggaaaaaaattatggatattttaagaagatgttaagtggtatacagaaaaacaagcaggagctgggcatgttggctcatgcctgtaatcccagctactccggaggctgaggtgggaggatcgcttgagcccaagaattagagaccagcctgggcaacatagcaagatcccatctcaaaaaaagagagaaataaggaagagggatggagtactgggggtttaaataatgtggtcactattcaggtgatgacctggacatccttcctttgccccctccagacccactctctactcttcttcacccaggtctgtgccctgggaggctggcctgcatggacggcatcacccagctccctgccctctggcttccatggaattcagccagtggggagtccccgagaagcccggaagcagagggtggatgcttcccttgaccaaggatctcagcctctatcaggtcaccctttccaggcagccctttttattttgggattctctaatagctgcctcccacaacctccccatcctgtctggccttgcaacagctgcacccacccttcttgaaccccctccccagtcaattgcctgggggtcctgcactatccctgtgggttccaaaccccctgcccacacctgtgtagactctcctcacaggatctgaatctatgtggcctgctttctgctgtgacctggcagatagagatggcttccttggtgaggtgactctggagcagaggtctgaagaaggggaggcacaaacacgtggctatctgtgaggaaagcgtcccaaccacaggaacagcaagtgccaaagccagaggccagactgtgcttggcatctttgtggctggagcacagcgtgagggaagagccatggaggcaaagccagcgagcaggcaggggcacgtggggggcctggccagagaccaggcaggggcgcgtggggggcctggccagggagcgggcaggggcgcgtggggggcctggccaaggagcgggcaggggcgcgtggggggcctggccagggagcgggcaggggcgtgtggggggcctggccaaggagcgggcaggggcgcgtggggggcctggccagggagcgggcaggggcgcgtggggggcctggccaaggagcgggcagaggcacgtggggggcctggccagggagcgggcaggggggcacgcgggcctggccagggagcgggcaggggggcacgcgggcctggccagagagcgggcaggggggcacgggggcctggccagagagcaggcaggggcgtgtgggggggcctggccagggagcggggggtggcctgggaggcattgcaaggacccaggctttcctctgagagaaagaaaccccttgtggcatttcaaatggcaaagtgacttggtcaacacacactgaaaagggtcactctggtggctctgttgaaaacggactgtcatgggagagacatctgggaactgcagtcatctggcagtggattagaccagcgggtgggagtcgtggagctggtgagatacataggttgaggtggaaccaaaggattcgctagtgcattagagtgaaagaaaggagctgtggccccagagcagtgactcacgcctgtaatctcagcactttgggagactgagatgtgcagatcacctgaggtcaggagttcgagaccaacctggccaacatggcgaaaccccatctctactaaaaatacaaaaataagccgggtgtggtagcacgtgcctgtaatcccagctactagggaggctgaggcaggagaatcgcttgaacctaggaggcggaggttgcaatgagctg

SEQ ID NO: 962 - DNA, 1000 bp, Homo sapiens
  misc_feature (1)..(1000): DMR6:37809601
tgcctttaagcaacaaatagaggacttaaaaaagagtgcccatgtaggcaattcaaacattagccaaggttaattcacatatttcaactgcattttagatatcttgaaaatcaaaattccgaaaccatcattctcagcaaactatcgcaaggacaaaaaaccaaacacctcatgttctcactcataggtgggaattgaacaatgagaacacatggacacaggaaggggaacatcacacactggggactattctggggtggggggaggagggagggatagcattaggtgatatacctaatgtaaatgacgaattaatgggtgcagcacaccaacatggcacatgtatacatatgtaacaaacctgcacgttgtgcacatgtaccctaaaacttaaagtataataataataataataataataataaagaaaatcaaaattcctagatacaattaagagacaaatgacagagaaagaatttgcagtgcatatgacaatgagttaatattcttaaaaccaacattaatggctgggcgcagtggctcatgcctgtaatcccagcactttgggaggccgaggtgggcggatcacttgaggtcaggagttcaagaccagcctggccaacatggtgaaacccgtctctacaaaaagtaaaaaagttagccaggtgtggtggcaggcgcctgtaatcccagctactgaggaggctgaggcaggagaatcgcttgaacccaggaggcggaggttgcagtgagccaagatcgtgccattgcactccagcctgggcgataagagcaaaactctgtctcaaaaaataaaataaaataaaataaaataaaataaaataaaataaaataaaccaacattaatatcttaagctaaataagaaaaaaaaaagctcctgtagaaaaacggacaaaggacataaacagataatgccatataaaagtaaattcaaattcaaatggtatatttatatacattaaaaaacccagacctcat

SEQ ID NO: 963 - DNA, 300 bp, Homo sapiens
  misc_feature (1)..(300): DMR6:39172401
cagcctttgctggcaatggctgccttttggggcccctgctctccatgcttgttttatctgagaagggttagggatggggtgaagcaggggctatggtagagcagggtttcccaacttcagcattattgacatatggggctggaaaaccctttgtttgcagggggccgacctgggcattgtaggacgttgagcagcatccctgggctcgacccatgagatgccagtggcacccctactccctcccacaagttgccaaacgtctcctgggagtgtgggtgaatcaatcctgactgaaaacca

SEQ ID NO: 964 - DNA, 600 bp, Homo sapiens
  misc_feature (1)..(600): DMR6:39654601
aaatgcttgttaaaaatatttacatttaaagtctcctttgaatataattctcctcctcatcctccaactttcaccatagttatcgctgttagttatcccttttgtatgcatacttccagacattttacatatagcacagcttcatgtctttttacctttttaaataattggcttaatattctacgtattcctgcgcaatttgttcactcaacaatgtctctcacatcagtagatccacctaattttttatactctaagtctgtatagtatttcacagtataaatgtatcgtttatttaaccaattctctgctgatgaacaactggatcctttccaattacttgccattacaaacagtgctggaaggaacaacagtctttaccatttctctatagtaggtatacattcagttttgatagatactgacaatgatgtcctctaaagtggccttgccaatgtatattcagacctgtaacagaagagttcctatttcctcacttgcttttgatattatcaaatttttattttgccaatttgatgaaagagatatttcttattttaaattttcttttatctgattgtaatgtgatcaaacattttc

SEQ ID NO: 965 - DNA, 500 bp, Homo sapiens
  misc_feature (1)..(500): DMR6:39771101
cttagatcacaccctcatcagcatcctcactgtcactgtcacctcgcttagcccaggtctccctcatcactcacttgaaggatgaaaacaactcctcatcagctttcctgccacagtctctggccaccatgatccatcctcctccaccctaccctggaccttcctaagcgttctggatcaagccacgcccctgttctaaagctccccaggcttccatggtatttgcaagacacagacaagacgacaagacttgtccttcatactttgacccctaactagctttcctaaccttatagcctattaactctcctcacacccctgcagtccaggctctggaatcagcttgctgagctttgaatcctacctctgtgggaaatgattttttccctaaaggagaaaggctattgtgagggatctggcaccctctgccacactcactgatagaccttcagaccgcaccagagtgatatatgtatatatacacacataaatgtaagtat

SEQ ID NO: 966 - DNA, 100 bp, Homo sapiens
  misc_feature (1)..(100): DMR6:39781801
ttataatttaattcctttgtgatcagtttatgattcaaatcctttaaaatttattgagacctgttttatgacctagtatatggtttttctcctgaagaat

SEQ ID NO: 967 - DNA, 200 bp, Homo sapiens
  misc_feature (1)..(200): DMR6:42209601
agccaggcgcggtggcgtacacctgtagtcccagctactagcgaggctgagacagaattgcttgaacccggaaggcagaggttacagtgagcctagattgtgccactgcactccagcctaggtggtgacagagtgagactctatctcaaaaaaaaaaaaaaaaaaaaaaaaaaaaaagagtagggaccatgactttatta

SEQ ID NO: 968 - DNA, 300 bp, Homo sapiens
  misc_feature (1)..(300): DMR6:43594901
gtttacacctgtaatcccatcactttgtgaggccaaggctgggggctggggaggtggggggcatatggggggggattgcttgagtccaggagtttgagaccatccttggtgacatggtgaaaccccgtctctacaaaaaatacaaattagctgggcgtggtggcatctgcctgtagtcctagctacttgggaggccaaggtaggaggatcgcttgagctcaggaggcagagaatgccctgccaaaagacaggttttttttttttagtttttttttcttttttgaggtggagtgtcactca

SEQ ID NO: 969 - DNA, 2400 bp, Homo sapiens
  misc_feature (1)..(2400): DMR6:43596601
agaaaataagccaatattaatgtggattttaagcccttaatagaaatagggagttggttggaaagaacatttgagaaggaagacaaagtttgattttagttatgtttagttggaaaccataattaaaaattcaagaaaagttcttctgtagggagtcaggaaaagttcttctgtagggaggtagagctaagggattagagtgtacatttggggataaagatttgtatgtactcagagtaagatattttcaaggtcctaagtcccaagcaacatctgacttaaaacagcttatcaagggaataaatctagtgcctcggagtggattttaagttactcagctggaatccacctctaaaaacatgtaaatgttaaagcttatattgaagcttgagttaattctgaatattttctaattgaaaaaaatattcttggagaagatgtttaagtgattaaatatagtaggagaaagaaaattcaagagaactggggagataaatgtgtttacattatttttttttatttttattatttttgagatgaagtcttgctctgtcgcccaggctggagtgcagtggcgcaatctcggctcactgcaacctccgcctcctgggttcaagcgaatctcctgcctcagcctcctgagtagctgtggttacaggcctgcaccaccatgcccagctagttttgtatttttagtagagacggagttttgccatgttggacaggctggtcttgaactcctgacctcaggtgatccacccgccttgctctcccaaaatgctgggattacaggcgtgagccaccgtgcctggccaaaaatgtgttttaaaatcattgctcatgaaagatgatattaatacaaaatatttgtcgtacattagcactataaaattcagcctatgctgaagctaagctgcgggaacactctgaaggagaaattgagctctcttataattggtcttctaagctggctgccatttttttgtgaaaacttatatgtctaaatacctgtaatctaagcatttctacattagatagcacaattaaataaataattttttaaatgtctaaatgtgagttcttaattcatttcagaggggatgcgaaaacaaggcttatttcaatggctcgattctcttcagattgataacctcacctctccagacctgcagctcaccgtgggagcagtgattgtggaggaaatgagagcagccatagagagggagactggttttcagtgttcagctggaatttcacacaataaggtgaaggctaatagtagatttcaaagagaaacattgatatccttagtcaaatacagtagggacagtgggacattgaaattattacacataggccgggtgcagtttcgcacgcctatgtgagtggatcgcgtgagcccaggagttgaagagcagcctgggaaacatgttgaaacccagtctctacaaaaaattagccaggcgtggtggtgtacacctacagtcccagctactcaggaggctgagatgggaggatcagctgagtccaggaggttgaagctgccgtgagccgaaatcatactactgtacttcagcttgggcgacagtgagactgtcaccaaaaaaaaaaaaaaaaagttgttacacatgtactttgaatggatttcttttaaaattcatgttgaggcccaaatcaaagcataagtaattctttaacatggaaatggacattaaatatgtactttcctaagaagcaagctgaaggccgggcatgggggctcacgcctgtagtcccagcactttcggaggctgaggcaggtggatcacctgaggtcaggagttcgagaccagcctgaccaatatggtaaaacaccatctctactaaaaatacaaaaaaaaaaaaattagccagacatggtggcgtgcacctgcaatcccagctacccgggaggctgaggcaggagaattgctttaacctggaaggtggaggttccagtgagccaagttgtgccactgcacgccagcctgggcgacagagcaaagactccgtctcaaaaaaaaaaaaagaaaaagaaaagaaaaaccatacactataagaacaatttatatagcatttacattgtacgttataggtgttataagaaattagagatgatttaaagtatacagaaggatatacaaaggttatatgcaaatactgcaccattttatattatgggacttgatcattttatatacgggacttggggttttggtatccactggaggtcttagaaccaatcccctgcagatattgagagatgacagtatttccttaatgactgaactgtttgttggaaaaaggaggctagtctttgcacttacatacattaatgtatttcttctattttcacttgctgaatttttttttttttttttt

SEQ ID NO: 970 - DNA, 2500 bp, Homo sapiens
  misc_feature (1)..(2500): DMR6:43722601
aagagtatatcttgaagaaaggagtagccagtggcgtcaatttttatttagaaagtgtccagtatgtctgtgtaagcatgggagaaaaaggcaagaaggaaacacagctgttaacaatgaggaataatggggggaggcttcgatagatctttgtttcaaaggacaggaacccaactcatacttgcttaagacaaaaacaacaacaaaaaagtaatttattggcttatatcactgaagagtccaggggtgagtctgtctttggcacagcccggacaatgtctgcagggcttggtctctgctctcctctgtgtgggcttccttctcgcgcatgttctccttaggcagtactcctggaaactcttggaatatacgtacccatttagtaacttcggagagagcagaaagccattcttcttcccagtggctccagtaaaattccaggattgactctgatgggcctggtttggtcatatgtccttcctgaaccaatcactatggataggacttttttttttttttttttttttttctgtgcttgagtggtctgaatcttcccacggagacagggagatggagtcatttccatccaagccacttttactgagagtgtagggactgcccagaggaaatcaagaggctatttatcagaagaaagaatgggttccgggggatgaaaacccaatctgtgttcccgttgactagggggaagggtataatgactggctaggtctgctcacaaggccatgcttggaggacatgaggcaagtccacttgagtcatcttccccaaaaccacgggcactgggcagaaaaaactacacttgaacactgtaggtggattgaggggtgggcagaagcaagaagagcaaaatagcacggggaaggaacgggtgggctcaaatccagaaatccagatttgaatctgagttttgccatttggtaatttttaaacttctgagcctcagtttctcattggaaaactggatcaatgcaggaacagtgcctgtagaattcttatgagaattaaatggaatactcgacataaaggattcagctctgttcctgaaaaagccaatgaatgtttgctgttatgatagtggtcttgaacttccatgcgggtgactgtgcccttgataaggggtcaggctgtcctcggagccctcttcctcatgccatcagggcctccccagcacaggcctcagaactcactaacatgttgctcagtcaaagcctggccagattccaaccccaggcatgaaggaaagcataaaggatctggtgtttgggtgtggtcacggtgggtcctgatggggctgcgtcaaggctaatgaggaagaggctggagggccagggattggcaaggaggaaggtgaggagtaaggggaggggtgattttggctagagccagcaggggtcactgcagatctaagtaacttcagggaagcggcagggccacccatgggccctcccacattactacctgccttcgtaactgggatacaggtcttggaccagttctggggagaaggattgggattggactcacgcagtgggaggtagctgcctagggcatctgcccttggtgtcctccggggcctaggctgtctctcctccatggaggctcttcaccaatggggtgtgggcctggcgtgccaccggactctgagttccagcagtgcctagtaagtgcatcttgagatgctcccctataaagagctctgagattaaatgcgtttccttgtctcgtccctcgtctctgagggttgtagcccagattagcatgttagaggctcagagaagtcctgcagtcaagaaaacctgttagactgtgtttaactcaggtttcctgtgcttatttgagcccgtttgccacaacatagttagggaaatgctggcttaagggtgggaaagggggtgtgcttgatacattaaccttccccaagagcatttgccctcccaacacactccctcctccacccattgcaagtagtgtgtgacacatgtctgttgtagaaaagtgggggaaaaaactacaaagaagaaagttacccatcccctgcctccagaagaaagttacccatcccctgcctcctgctccttagtctcttctcaaaagagctctggccactgtcctcggtcttcctggagaaagggtgatgatggagctcccctcaaggcacacccacttctactggggagaagccccaagaggaaagggcccttttagaggtcatcttatccacccctccgtctcctctctgtgcagattcttgcttccctctcttgctgacattcctacaggaagggagatggtggtggtggtttggagggtgttgaggggcgcagagggcaattgggtatgtagatcatcagggtggaaggtgagcttcctttctaggtggggaaacaggctcagagaggggccatgacttactggtgtttcacaatgagccagtggtggagctcacagatcctggccccagaccaggcaccctcctccc

SEQ ID NO: 971 - DNA, 2400 bp, Homo sapiens
  misc_feature (1)..(2400): DMR6:45598001
tgtaaattgatgttatcttagagccactccttcttccaaagggatgcctagccaagttgatgtgtgcatctattgaaatagatgtggccaccatgatacatgtgttttaccagtcacattctggagactatatcttaacccaaagtattaaatggggattttaatggtagtcaggaagaaatgcttgagcaagtagggcttttacacactttcgtattagaactcacatagtagttgtttatatctgataaacagatttggcctgcctgaagggggtgtatcttgcaaaagtcttgctttaactggctacatgaaccagagagaggtatggagacacagagatgagcagaatatggagcttaggcaccagggaggttggatggggaatctgctcttctaatttgggaagggcaggtagggctgaaagagtcttgcaagtcaccccctgcttttacctaagccatactatgaggagaattgaaaaacaattagttgttgaagaagattatgtaatcttttgagtaacaaactttaaagcatctcctgaatccttgaaagaagtgagatttttctgatgaaataaaaatatacttccattgctttgctttgctttttttccttcaatgaaataaacatttagtgcttatcagcaaatgttagtatcacttcatgtagttaaagattgctatttttagcccctctctagaccaaattgtccctcatgttagttttctccattgatttatagttctaaatctttcattatttttattaattttctcagggctctttccatgtttcccactttttttttagcaggatgacattccaattgagggagactattgaactatgtccaacactaggccttagaatctgaagtctgtgtttgaatcctgtctctagcacttaaaacatgagatgttcctgtgtctcagcttccacattttcatagtgggcatgactaggtctcactcccttctagtattgctatgaggattgcatttgaaatacagtagcacattgcttggcatctggaacatggggtgtacatcataaaaacaacttttatctgcatcatcaacaccaaaacagagttaccagaaccatcaagacaatagtgttgactcctaaccttgtcaagatatgcaaaattcttcaagatggcatctctataagagggtgcatcttcaaagaatcaggaacaattcagatccctggtgtagaatccacaaaacactgtactacctttgagaaatatgagtcatgacttccagcaaattacttaatcactctgaagtttgtttcctcatcatatattggtaataataaaattacctcatagtatttatgaagattaaatgaaatatagaatggagacttgtggaacttctggaatggtagaatgagaagcctgtccaacactccccaaatacaacaatgaaactggacaaaattgtaaaaaacaaccattttgggactatgaaaaattaactaaagatacacaacaaattgagaagtatttattcattacaaacagcagaaccttaattaagaacaaagggagtctgtgccacggtagactgggactgctcctacctccccaactctcactccagctccatcagcgcggtagttcctaacagggcaggataagccataaaacccagcaggtttgctgctggagggggttgacttgctttggagtgaagtgcaggaaaaccctgttaaaacagtaaccatgttggtggcgaatgaataagaaaggccaatacagcagccatcctgagtttgtaattctggttcagggaagcaacagaaaaggcaacttgccccaaaagaacaggaagatccaaggagtgggatagccaccgtggccattgataacatttttggaattgtggaaggctgcacacagatgcaaggctgtgcacacactcagtagtgaccagagagggccgtgattatccacacatctctggctaaacattaggtataggaagttaggattaaaaaaagaaaaaactttaaaacttcagcagatacatcagtggctacatactgcaggcagacagactctacagaattaatccaaggatgtcaccaaccaaccaaccaaagcagcaacaacaacttttgaggaggaggaatcagaatcgagactggctacaatacattaactgaaatgttcagttttcgacaaaaaaattgtaagacatattaaaaaaaaacagaaaagtatgatccatacatagaaaaaaaaagctgtctttgagaaaatccagattttggacttagcagagaaggacctcaaagaagatataataaacatgctcaaagaactaaaaaaaatcatatttaaagaatttaaggaaagtatggtgatgacacatcaaatag

SEQ ID NO: 972 - DNA, 700 bp, Homo sapiens
  misc_feature (1)..(700): DMR6:47891001
agtttgagaccagcttggccaacatggtgagatcttgcatcaactaaaaaaaaaaaaaaaaagtacaaaaaattaactgagtgtggtggcgcatgcctgtaatcccagctacttgggaggctgaagtgggaggattgcttgaacctgggaggtggaggttgcagtgagctgaaaccatgccactgcactccagtctgggtgacagagtgagactgtgtctcaaaaaaaaaaaaaaaaaaaaaagattgaggaaagaaatgcagcctctgagggctgggtgctgtcaagtaggccatggtgctgccaggagttgttctggcactcccagctgtgttgagtgttatcttctcgaccacagacaacctcgcaaaacagcatcagacaaggccattctgtgaccggcatgaaccgagacaaaacgagacccctccataatcagaaccaaatctgaaaaaaacacaaacattgcccaaaacgtaaaatggactaaatctcttcctttcaaaagtggtagtggtaattggccctcctttaccaatcacggcttacccttactctagtattttctccatctaggtataataattactaagataactattattaagataaccagtcatagaactaccctctcttcttgacagtaaacaaccatgctcccttgaattctcttccaaatcatctaacatttgcaacagtc

SEQ ID NO: 973 - DNA, 100 bp, Homo sapiens
  misc_feature (1)..(100): DMR6:48443101
tcattttgttgatctttgaatttctttaagtctatattatttatctttgctatgagctttattatttccttccatctatcaattttgggtttagtttgtt

SEQ ID NO: 974 - DNA, 1100 bp, Homo sapiens
  misc_feature (1)..(1100): DMR6:49340801
cctgcctccctttctattcaaagccaccctctgctcactgagttaaatccatatctgattgcatcctttggagaggctaacagaaactcaaaggaatgcaaccatttgtctcttctctacccatgacctggaaggccatccccacttcgagtcttcctgccttgctttgagttgtcccgcctttccagactaaaccaatgttcatcttgcatatgttgattgtctcatgtatgcctagcatatgttgtttgatgtctcatgtctccctaaaatgtaaaaccaaactgtgctctgatcaccttcggcacatgtcgtcaggacctcctgaagttgtgtcatgggcatgtgtcctcagccttggcaaaataaacttcctaaattaactgagacctgtctcagattttcagggttcacaaatggtaactgcttttcagttagaaaacttaagctgcaagctttcttcatcagtggttcagttaacgtatgttctttatcctaagtttattttaaatgcaaaatttcctccccaaatgctttctttgtaattttatcttagctaaaacagtgtcctcttagatgaaattaatattttgtttctcatttcaccgtaagaaatagctatttctcataattaagtcagtttcttgatttcaagattactctcatttatctaatcctaaattagtttaaaattaatcactacaaataaaatgaaatttaattaaaaaccaatttaaccacttcttgaagagctaactattcattaaaatctccaaactagatttcacactataatacaataaaatttttggtcagtgacactcaagtgatattatacttcagtgtatccaaaaaataaaaattaaaaattgggcagcaatgcacctgcttaataataaatatcatcgcttcaaggtatttaatctctaagtaaacaagagtgcaaattattttaactgatgaacatttaagtccatgaccgattgtaatatcccattcaagtccctcttttatttttttagaaatgctacgtatattttcactattaggcaaggtgatatagtttggctgtgtcccacccaaatctcaccttgaaccgt

SEQ ID NO: 975 - DNA, 1300 bp, Homo sapiens
  misc_feature (1)..(1300): DMR6:52785901
acttaaattcacctgtaagttctagaaaactgctctcaaaacattctgcctccctttggagcattacaatcttaaagaaatattgaaaagccaatggcatcaacacttgacaacaaatcacaaagcacttcctgaaagaagcattaatgtgtgatatctaccatcaagttgcaaattagacttgtgcttggcaggtgttggtggctcttttctcagcaggagatggaggtttggagaagcaactgcagacatggaactgtctagttgtatgtcccttttaccagtcattgggaattcccaagtctgtgatcttgccaaatgtaagttcacaataattgtgtgttgattacttgtctagaaaatgtaactttagcataaacacctacttttgctctggcaatgatcatattctcagatgacctaaaatgacattgacaggtgacagtgtgctggcagccctcgcagccctcgctcgctctcggcgcctcctcagccttggcgcccactctggccacgcttcaggagccccttcagcccgccgctgcactgtgggagtccctttctgggctggccaaggctggaaccagctcccttagattgtggggaggtgtggagggagaggcatgggtgagaacctgggctacgccaggcacttgcaggccagtgcgagttccaggtgggtgtggactcgccaggccccacactcagagtggctggccggccccgccggccccaggcagtgaggggcttagcatctggtccaacagctgctgtgctcaacttctcgctgggccttagctgcctccccgccaggcagggctcaggacctgcagcccgccatgcctgagcctctccccctaccccgccccctgactgtgggcttttgcatggcctgagcctccccaacgagcgctgccccctgctccagggtgcccagtcctatcagcggcccaaggactgaggaatgtgggcacatggcacgggactagcaggcagctccacctgcagccccggtgtgggatccactgggtgaagccagctgggctcctgagtctggtggggacttggagatctttatgtctagctaagggatcgtaaatacacaaatcagcactctgtatccagctcaaggtttgtaaatgcaccaatcagcaccctgtgtctagctcagggtttgtaaatgcacaaatgggcactctgtatctggttactctggtggggaggtggagaacctttatgtctagctaagggatcgtaaatacaccaatcagcactctctatctagctcaaggtttgtaaa

SEQ ID NO: 976 - DNA, 1200 bp, Homo sapiens
  misc_feature (1)..(1200): DMR6:54295201
tggtggcagcataggaaggcagggctgctggcatccatgtgtgcatttgcaccagcagcagtgtcagtgcaaaacatgggtcattggtggcctccatgcatgcattcaccccaatggtggtggtggtggtgcagagttgaggggctgggctgttgctgtccatttgcatgtctgcactggcagcaatggtggtacagggtggcgacgggcctctggtctccgtgtgtgtgcatgcattcatgctggtaatggcagcaaggctgggagagaacaaggtgtgctcatggtggcagtagtggcattgcaaggtgaacatgcccatgcacccatgtagggaaggggaggggagatcctcccatgcccatgtgtgctgacaaattgctgtggggggtgactgtgggcgagtgtgtgctggcaaagcagcacaggggaggcttcagttgggggaggctgccagtgggctggtgcacataggtgggggccattcggctggagctcttcagtggtcaggtatggtctgccagcacaggagctatgatgtggtgggcctctgggaggcaccctgattgggtatttgaggctgcactgcaagtaggctcagccaggctaggaccccaggaggggccagcagacagtggagcctcaggttggactggctgccatctcatgggcaagatcaccctgctctgttaaggtccaacagttccactaagactgaattctgcatggtgagccttgggggaaggacatccctggacattctccctgcagatgttcccacaccaaacattctgggctttgcacaggctggagtcctgcccctaccaccattctaagcaggtctatctggcagctcaagtgtctatggagggtgtgggggtctcttgctgccaggattccagaagtctgtggtgagagtgggtccttccttgcctttccaactcattccttctgcaggagtcactagaggccaggaatgagtcccagagcatggtagccccatgcagcattcccagttctctcccttttaaactcagtgtctgtgttcaccccccatccattctcaaggccttccctccaaagatctgctcagagtgcaccagtctccccgatgtccccatccctcagtggcagatgttcctcctggctgcatgtagtcagccattttgcctggcacacatttttatgtagataaaatag

SEQ ID NO: 977 - DNA, 200 bp, Homo sapiens
  misc_feature (1)..(200): DMR6:56177601
tggctaacacggtgaaacccgttctctactaaaaaatagaaaaaattagccgggcgtggtgggcgcctgtagtcccagctactcgggaggctgaggcaggagaatggcatgaacccgggaggcggagcttgaagtgagccgagattgcaccactgcactccagcctgggtgacagagcgagactctgcctcaaaaaaaaa

SEQ ID NO: 978 - DNA, 1900 bp, Homo sapiens
  misc_feature (1)..(1900): DMR6:56446001
tgttccgttccggcacccagacgggaattgtatttacagtcttcacaacagtctccagtaaacagatcacactgtgtgggagaaccacatttgaaaggggcctcagctgaactttcattatttgtcaattttcagcatgaagccacttcttaatgaatttcatgggacaggtcgttaataccatgtgctataagatatccactaaagaagaattttcctaaagtgttttattcagaaactttaagaaatatttccagagcgatggttttatcaacttcaaaatagggccaacttttaacttgtcttgtgtgagttggaggatattgcagaagctgtcataaatcccatctctaagaaaaacactcccattgccttattcttttgggacaaaacacaaaatatatttaacatgctgcatcttgggggttaaaaattctagaattcttgacagaaacacaatcctttatagagatgtgtttccaaggatccccaccaacatagttcaagaaaccttcataaggagtaatttgttgttctcttttgtaccctccactgtcccatgtacctaccagaagctggtgagcagtgaggtgatcctgccaaaggaataaaaaacaaggaatggaaagaaaactttaaagagctgctgttccttaaagccaagaactgtagagtcattcattttccccctacacctagcccagctctggactcaaaggagacagccatgaagatgatgaaatcacaacccctctcagatcctcaataccacatctccatgggagcactgatattttcgattaccagcacctggaaatacaatcgttctcaaggaggattgattgacagatttagcaaataaaaatacaaattgactgggtatggtggttcacgcctgtaatcccagcactttgggaggccgaggcaggtggatcatttgaggtcaagggtttgatgccattctggccaacatggtattttagtctctactaaaaatacaaaaattagctggacgtgagagcatgtgcctgtaatcccagctactcgagaagctgaggcaggagaatcgtttgaatccgggaggtggaggttgcagtgagccgagccgagatcggccactgcactccagtctgggtgtaagggcaagacactgtctccaaaaaaaaaaaaaaaaaaaaaaagtagaatgcctaatcttaaatttcatataagcaataaataatatttagcataggaattccctatgcagtatgtgggacatatactttaaaagtttttttagtgtttatctgaaattcaaatttacctgggtgtcctgtacattatctggcaaggcagatactttcaaggcagccatcttaagaacagatgtaatgaataaaaaattcttccttatgatgaaataaaaccttgtcttctacccattggtggtccttcaaatattcagaaagctacagagtcattaaagtcagagagacttgggtttggttctgttactatgtgaccttgggcagtttatttaacctctcttttttctggtctctaaaatgggctataatacctgcattacaggaaaaccatgattattataagctcaaatgatcttattcagcccaggtaaaataattgtaatcagtcacaattgtgaatgttaatcgaaatctagaaaagactgttctcttaagggtgaaccgctgagccgaccattatccctttcttgggggatggggagaaatatgagagaaatagagaatggctaccctctgattaccacggaatttaagttaactgtgtacatattctctatctggttattgtcaggttcctaaatctgttgcctaaaaagtacaaagagtgttcctacaatacatggaggttttaatattttccaagtgtacta

SEQ ID NO: 979 - DNA, 1100 bp, Homo sapiens
  misc_feature (1)..(1100): DMR6:57053901
gaacttgaaactgaaattattaaaattggtcgagtaatgggaccaagatgggcggcatgtagtttacaagctgctactgctgtatggcatgcatatcctatattatatatgcatttttctcattcttactctggtttggcgaagagattagctaacattaatttcttacaagaccttgctttaatgattgacattcttgaagaattttcagtactttcaactgcattacagtcaagatcaactaatattaagaaagcacaaaaattgatcaaacgtaccataagagctttggaaaatttaaaaattggtactggaaagtatgaatctcaaattgaagatttgatcaagtcagataagtttaaagatattccatttaataaaaacaataaatttaatgctcttcctaggagtatattactagacaatataattcagcacatgaacctacgccttttatctgacagaaaccatgaagatatttttaattactttgatttgctggaaccttccacatggccttatgaagaaataacttcaccatggatagctggtgaaaaaacattatttcatttgtgtaaaattttaaaatatgaagttgatttgaatgattttcgggaatttgtaaataataatataaaatcaaacaatgtttcaattcctacaactatatacaaagctaaaaagatagttagcaccattgcaatcaatagtgctgaagctgaaaggggtttcaatttaatgaacataatttgtacaagggtgagaaatagtttaacaatagatcatgtatcagatttaatgacaataaatttactggggaaagaattagcagattgggatgcaacaccgtttgtaaaatcttggtcaaattgcaaccacaggttggctacagatacaagagttcggcaaaagtcaacaaaagtcttccatgagaatcaattggctatatggaacttaaaatagaatattgtatacgttttttgtcatctgtaaattatgtactacacatcctttatatacataaaggtcttttttttttttggaaagccagttaaacttttatcagcatgttgctgtttaaaaggcgttctttaagaaga

SEQ ID NO: 980 - DNA, 1700 bp, Homo sapiens
  misc_feature (1)..(1700): DMR6:58449501
gcattcaactcacagagtggaacattcctcttgatagagcagttttgaaaccctctttctgtaggacctgcgagtgggtatttggaactccttgaagtcttcgttggaaacgggatttcttcatataaacctgcagagaagaattcacagtaacttactccgatgtgtgcattcgactcacagagtggaacattccctttgatagagcagttttgaaacactgtttttgtagaattcccaagtggatatttagagcactttgaagactctgctagaaaaggaaacatcttcatgtaaaaactcgatagaatcgttctcagaaactgcttgtgatgtgtgcgttcaactcacagagtttaacgtttcttttgatagaacatttctggaaccctcttttcgtagaagaagcacgtggatctatagaccaattgaggccttcgttggaaacgggatttcttcatgttactctagatagaagaattctcaaacactgctatgtgatgtttgcattcaagtcacagagtgcaacattcctcttgacagagcagttgggaaacactccttttgtagaatttgcaatgggatatttggacttctttgaggccttcgttggaaacgggatttcttcgtataaatctagacagaagaattctcagaaacttctttgtgatgtgtgcattcaactcagcgagtggcaccttcctttggatacagcagttttgaaacactgtttttgtagtatttccaagcggatatttagagcgccttgaagcctatgctagaaatggaaatatctccccataaaaccaagacagaagcaatctcagaaactaatgtgtgatggctgcattccacacacacggtggaccatttctcttgatagagcagttttgaaacactctttctgtagaatctgcaagtggataattggacctcctagaggccttcgttggaaacgggatttctccatctaaacctacagagaagaattctcagtaacttcatcggatgtgtgcattcgactcacagaatggaacattccctttgatagagcagttttgagacaccgtttttgtagaattcccaagtggatatttagagcactttgaagtctctgctagaaaaggaaacatcttcatgtaaaaagtagatagaatcgttctcagaaagtgcttagtgacgtgtgcgttcaactcacagagtgtaacgtttcttttgatagagcgtttctgaaacacccttcttgtagtagctgcaagtggatatttggacctattggaggccttctttggaaacgggatttcttcatgtaactctagattgaagaattctcagaaactcctttgtgatgtgtgcattcaattcaaagagtgaaacctcccttttcacagagcagtttggaaacactgtttttgtaggatttccaaggggatatttatagcgcattgagcctacggcagaaaaagaaacatcttcctataaaaactagacagaataattctcagaatctgctttgtgatgtgtgcgttcaactcatagagtaaaacttttcttttgatagagcagttttgaaacactctttttgtaatatttgcatgtgtatatttagagcgcattgaagcccacagtagaaaaggaaataacttcacctaaaacctagacagaagcaatctcagaaactactttgtgatgtgtacatt

SEQ ID NO: 981 - DNA, 2100 bp, Homo sapiens
  misc_feature (1)..(2100): DMR6:58560701
gtgacgtgtgcgttcaactcacagagtgtaacgtttcttttgatagagcgttcctgaaacacccttcttgtagtagctgcaagtggatatttggacctattggaggccttctttggaaacgggatttcttcatgtaactctagattgaagaattctcagaaactcctttgtgatgtgtgcattcaattcaaagagtgaaacctcccttttcacagagcagttttgaaacactgtttttgtaggatttccaaggggatattaatagcgcattgagcctacggcagaaaaagaaacatcttcctataaaaactagacagaatgattctcagaatctgctttgcgatgtgtgcgttcaacccacagagtaaaacttttcttttgatagagcagttttgaaacactctttttgtagtatttgcatgtgtatatttagagcgcgttgaagcccacagtagaaaaggagataacttcatctaaaacctagacagaagcaatctcagaaactattttgtgatgtgtacattcaactcacagagtggaactttcctctttatagagcagtgttgaaacactctttttgtagaaactgcaagtggatatttggacctctttgaggccttctttggaaacgggatttcttcctataaccctagacagagtaattttcagaaacctcattgtgatgtgtgcgttcatctcacagagtggagtcttccgtttgatagagaagttttgaaaccctgttcttgtaggatttccaagtggatatttagaccactttgaagcctatgatagaaaaggaaacatcttcatggaaaacatagatagaatcattctcagaaacaactttgtgatgtgtgcgttgaactcaccgtctttaacctttcttttggtagagaagttttgaaacactctctttgtaaagtctacaagtggatattttgagcccttggaggcattctttggaaaagggaatgtcttcacataaaaggcagacagaagtgttctcagaaactgctttgtgatgtctgtgttcaactcacagagtttaacattttcctttgagagagcggtttagtaacactctctttgtagaatttggaagtgtatactaagagcgctttgaggcctatggtagaaaaggaaatatctttccataaaagctagacagaagcaatctcagaaactcctttgtgatgtctgcattcaactcaccgagtggaacattcctcttgatagagcagtttggaaacactctttctgtagaatcagcttgtttgtatttggacctccttgaggccttcgttggaaacgggttttcatcttataaacccagacagaagaattctcagagtcttctttgtgatgtgtgctttcaactcaccgagataaagatttctcttgatagagcaatttggaaacactctttttgtagaatttgcaagggtacattgagagcgctttcagtcctacggtagaaaagggaatatctttccataaaaggtagacagaagcaatctcagaaactactttgtgatgtgtgcattcaactcaccgagtgcaacattcctcttgatagagcagtttggaaacattgtttctgtagaatctgcaagtggatatatggaccgctttgaggccttcgttggaaacgggatttcttcctataaacccagacagaagaattctcagagacttctttgtgatgtgtgaattcaactcacagtgtggatccttccttttgatagagcagttttgaaacaccgtttttgtagtatttccaagcggatatttggaacgccttgaagcgtatggtagaaaaggaaatatcttcccataaaacctagacagaaccaatctcagaaacgactttgtgatgtctgcattcaactcacagagttgaacatttctcttgatagagcagttttgaaaccctctttctgaaggatctgcaagtggatatttggaactcctttgggtcttcgttggaaacgggatttcttcgtataaatctagacagaagaattctccgaaacttctttggttgtgtgcattcaagtcacagagtggaaccttcctttggatagagcagtttgaaac

SEQ ID NO: 982 - DNA, 3200 bp, Homo sapiens
  misc_feature (1)..(3200): DMR6:58593201
tagagcagttttgaaaccctctttctgaaggatctgcaagtggatatttggaactcctttgggtcttcgttggaaacgggatttcttcgtataaatctagacagaagaattctccgaaacttctttggttgtgtgcattcaagtcacagagtggaaccttcctttggatagagcagtttgaaacgctgtggttgtagtatttccaagcggatattagagcgccttgaggcctatggtagaaaaggaaatatcttcccataaaacctagacggaagcaatctcagaaactactgtgtgatggctgcattccacacacacggtggaacatttctcttgatagagcagttttgaaacactctttctgtagaatctgcaagtggataattggaccgccttgaggccttcgttggaaacgggatttcttcatgttactctagatagaagaattctcaaacactgctatgtgatgtttgcattcaagtcacagagtgcaacattcctcttgatagagtagttgggaaacactcctattgtagaatttgcaatgggatatttggacttctttgaggccttcgttggaaacgggatttcttcgtataaaactagacagaagaattctcagaaacttctttgtaatgtgtgcattcaactcagcgtgtggcaccttcctttggatacagcagttttgaaacactgtttttgtagtatttccaagcggatatttagagcgccttgaagcctacgctagaaatggaaatatctccccataaaaccaagacagaagcaatctcagaaactaatgtgtgatggctgcattccacacacacggtggaccatttctcttgatagagcagttttgaaacactctttctgtagaatctgcaagtggataattggacctcctagaggccttcgttggaaacgggatttcttcatctaaacctacagagaagaattctcagtaacttcttcggatgtgtgcattcgactcacagagtggaacattcccttcgatagagcagttttgagacaccgttttggtagaattcccaagtggatatttagagcactttgaagtctctgctagaaaaggaaacatcttcatgtaaaaagtagatagaatcgttctcagaaagtgcttagtgacgtgtgcgttcaactcacagagtgtaacgtttcttttgatagagcgtttctgaaacacccttcttgtagtagctgcaagtggatatttggacctattggaggccttctttggaaacgggatttcttcctgtaactctagattgaagaattctcagaaactcctttgggatgtgtgcattcaattcaaagagtgaaacctcccttttcacagagcagtttggaaacactgtttttgtaggatttccaaggggatatttatagcgcattgagcctacggcacaaaaagaaacaccttcctataaaaactagacagaataattctcagaatctgctttgccatgtgtgcgttcaactgacagagtaaaacttttcttttgatagagcagttttgaaacactctttttgtagtatttgcatgtgtatatttagagcgcattgaagcccacagaagaaaaggaaataacttcacctaaaacctagacagaagcaatctcagaaactactttgtgatgtgtacattcaactcacagagtggaactttcctctttatagagcagtgttgaaacactctttttgtagaaactgcaaatggatatgtggacctctttgaggccctcgttggaaacgggatttcttcctataaccctagacagaagaattttcagaaacctcattgtgatgtgtgcgttcatctcacagagtggagtcttccgtttgatagagaagttttgaaaccctgttcttgtaggatttccaagtggatatttagaccactttgaagcctatgatagaaaaggaaacatcttcatggaaaacatagatagaatcattctcagaaacaactttgtgatgtgtacgttgaactcgccgtctttaacctttcttttggtagagaagttttgaaacactctctttgtaaagtctacaagtggatattttgagcccttggaggcattcttcagaaaagggaatgtcttcacgtaaaaggcagacagaagtgttctcagaaactgctttgtgatgtctgtgttcaactcacagagtttaacatttcctttgatagagcagtttagtaaccctctctttgtagaatttggaagtgtatactaagagcgctttgaggcctatggtagaaaaggaaacatctttccataaaagctagacagaagcaatctcagaaactcctttgtgatgtctgcattcaactcaccgagtggaacattcctcttgatagagcagtttggaaacactctttctgtagaatcaggttgtttgtatttggacctccttgaggccttcgttggaaacgggttttcatcttataaacccagacagaagaattctcagagtcttctttgtgatgtgtgctttcaactcaccgagataaagatttctcttgatagagcaatttggaaacactctttttgtagactttgcaagggtacattgagagcgctttcaggcctatggtagaaaagggaatatctttccatcaaaggtagacagaagcaatctcagaaactactttgtgatgtgtgcattcaactcaccgagtgcaacgttcctcttgatagagcagtttggaaacattgtttctgtagaatctgcaagtggatatttggacctctttgaggccttcgttggaaacgggatttcttcctataaacccagacagaagaattctcagagacttctttgtgatgtgtgaattcaactcacagtgtggatccttccttttgatagagcagttttgaaacactgtttttgtagtatttccaagtggatatttggaacgccttgaagcgtatggtagaaaaggaaatatcttcccataaaacctagacagaaccaatctcagaaacgactttgtgatgtctgcattcaactcacagagttgaacatttctcttgatagagcagttttgataccctctttctgaagtatctgcaagtggatatttggaactcctttgggtcttcgttggaaacgggatttcttcgtagaaatctagacagaagaattctccaaaacttctttggttgtgtgcattcaag

SEQ ID NO: 983 - DNA, 300 bp, Homo sapiens
  misc_feature (1)..(300): DMR6:58677001
actcctttgtgatgtgtgcattcaattcaaagagtgaaacctcccttttcacagagcagttttgaaacactgtttttgtaggatttccaaggggatatttatagcgcattgagcctacggcagaaaaagaaacatcttcctataaaaactagacagaataattctcagaatgtgctttgcgatgtgtgcgttcaacccacagagtaaaacttttcttttgatagagcagttttgaaacactctttttgtagtatttgcatgtgtatatttagagcgcattgaagcccacagtagaaaagg

SEQ ID NO: 984 - DNA, 1200 bp, Homo sapiens
  misc_feature (1)..(1200): DMR6:58734901
agaatcgttctcagaaagtgcttagtgacgtgtgcgttcaactcacagagtgtaacgtttcttttgatagagcgtttctgaaacacccttcttgtagtagctgcaagtggatatttggacctattggaggccttctttggaaacgggatttcttcctgtaactctagattgaagaattctcagaaactcctttgtgatgtgtgcattcaattcaaagagtgaaacctcccttttcacagagcagttttgaaacactgtttttgtaggatttccaaggggatatttatagcgcattgagcctacggcagaaaaagaaacaccttcctataaaaactagacagaataattatcagaatctgctttgcgatgtgtgcgttcaactcacagagtaaaacttttcttttgatagagcagttttgaaacactctttttgtagtatttgcatgtgtatatttagagcgcattgaagcccacagtagaaaaggaaataacttcacctaaaacctagacagaagcaatctcagaaactactttgtgatgtgtacattcaactcacagagtggaactttcccctttacagagcagtgttgaaacactctttttgtagaaactgctggtggatatttggacctctttgaggccctcgttggaaacgggatttcttcctataaccctagacagaagaattttcagaaacctcattgtgatgtgtgcgttcatctcacagagtggagtcttccgtttgatagagaagttttgaaaccctgttcttgtaggatctccaagtggatatttagaacactttgaagcctatgatagaaaaggaaacatcttcatggaaaacatagatagaatcattctcagaaacaactttgtgatgtgtgcgttgaactcacagtctttaacctttcttttggtagagaagttttgaaacactctctttgtaaagtccacaagtggatattttgagcccttggaggtattctttggaaaagggaatgtcttcacataaaaggcagacagaagtgttctcagaaactgctttgtgatgtctgtgttcaactcacagagtttaacatttcctgtgatagagcggtttagtaaccctctctttgtagaatttggaagtgtatactaagagtgctttgaggcctatggtagaaaaggaaatatctttccataaaagctagacagaagcaa

SEQ ID NO: 985 - DNA, 400 bp, Homo sapiens
  misc_feature (1)..(400): DMR6:58768201
tttgtgatgtgtgcattcaattcaaagagtgaaacctcccttttcacagagcagttttgaaacactgtttttgtaggacttccaaggggatatttatagcgcattgatcctatggcagaaaaagaaacatcttcctataaaaactagacagaataattctcagaatctgctttgcgatgtgtgcgttcaacccacagagtaaaacttttcttttgatagagcagttttgaaacactctttttgtagtatttgcatgtgtatatttagagcgcattgaagcccacagtagaaaaggaaataacttcacctaaaacctagacagaagcaatctcagaaactactttgtgatgtgtacattcaactcacagagtggaactttcctctttatagagcagtgttg

SEQ ID NO: 986 - DNA, 3400 bp, Homo sapiens
  misc_feature (1)..(3400): DMR6:58791301
attcaactcacagagttgaacatttctcttgatagagcagttttgaaaccctctttctgaaggatctgcaagtggatatttggaactcctttgggtcttcgttggaaacgggatttcttcgtataaatccagacagaagaattctccgaaacttctttggttgtgtgcattcaagtcacagagtggaaccttcctttggatagagcagtttgaaacgatctggttgtagtatttccaagcggatattagagagccttgaagcctatggtagaaaaggaaatatcttcccataaaacctagacggaagcaatctcagaaactactgtgtgatggctgcattccacacacacggtggaacatttctcttgatagagcagttttgaaacactctttctgtagaatctgcaagtggataattggaccgccttgaggccttcgttggaaacgggatttcttcatgttactctagacagaagaattctcaaacactgctatgtgatgtttgcattcaagtcacagagtgcaacattcctcttgatagagcagttgggaaacactccttttgtagaatttgcaatgggatatttggacttctttgaggccttcgttggaaacgggatttcttcgtatgaatctagacagaagaattctcagaaacttccttgtgatgtgtgcattcaactcagcgagtggcaccttcctttggatacagcagttttgaaacactgtttttgtagtatttccaagcggatatttagagcgccttgaagcctatgctagaaatggaaatatctccccataaaaccaagacagaagcaatctcagaaactaatgtgtgatggctgcattccacacacacggtggaccatttctcttgatagagcagttttgaaacactctttctgtagaatctgcaagtggataattggacctcctagaggccttcgttggaaacgggatttcttcatctaaacctacagagaagaattctcagtaacttcttcggatgtgtgcattcgactcacagaatggaacattccgtttgatagagcagttttgagacaccgtttttgtagaattcccaagtggatatttagagcactttgaagtctctgctagaaaaggaaacatcttcatgtaaaaagtagatagaatcgttctcagaaagtgcttagtgacgtgtgcgttcaactcacagagtttaacgtttcttttgatagaccgtttctgaaacacccttcttgtagtagctgcaagtggatatttggacctatatgaggccttctttggaaacgggatttcttcatgtaactctagtttgaagaattttcagaaactcctttgtgatgtgtgcattcaattcaaagagtgaaacctcccttttcacagagcagttttgaaacactgtttttgtaggatttccaaggggatatttatagcgcattgagcctacggcagaaaaagaaacatcttcctataaaaactagacagaataattctcagaatctgctttgcgatgtgtgcgttcaacccacagagtaaaacttttcttttgatagagcagttttgaaacactctttttgtagtatttgcatgtgtatatttagagcgcattgaagcccacagtagaaaaggaaataacttcacctaaaacctagacagaagcaatctcagaaactactttgtgatgtgtacattcaactcacagagtggaactttcctctttatagagcagtgttgaaacactctttttgtagaaactgcaagtggatatttggacctctttgaggccttcgttggaaacgggatttcttcctataaccctagacagaagaattttcagaaacctcattgtgatgtgtgcgttcatctcacagagtggagtcttccgtttgatagagaagttttgaaaccctgttcttgtaggatttccaagtggatatttagaccactttgaagcctatgatagaaaaggaaacatcttcatggaaaacatagatagaatcattctcagaaacaactttgtgatgtgtgcgttgaactcacagtctttaacctttcttttggtagagaagttttgaaacactctctttgtaaagtctacaagtggatattttgggcccttggaggcattctttggaaaagggaatgtcttcacataaaaggcagacagaagtgttctcagaaactgctttgtgatgtctgtgttcaactcacagagtttaacatttcctttgatagagcggtttagtaacactctctttgtagaatttggaagtgtatactaagagcgctttgaggcctatggtagaaaaggaaatatctttccataaaagctagacagaagcaatctcagaaactcctttgtgatgtctgcattcaactcaccgagtggaacattcctcttgatagagcagtttggaaacactctttctgtagaatcagcttgtttgtatttggacctccttgaggccttcgttggaaacgggttttcatcttataaacccagacagaagaattctcagagtcttctttgtgatgtgtgctttcaactcaccgagataaagatttctcttgatagagcaatttggaaacactctttttgtagaatttgcaagggtacattgagagcgctttcaggcctatggtagaaaagggaatatctttccataaaaggtagacagaagcaatctcagaatctactttgtgatgtgtgcattcaactcaccgagtgcaacattcctcttgatagagcagtttggaaacattgtttctgtagaatctgcaagtggatatatggaccgctttgaggccttcgttggaaacgggatttcttcctataaacccagacagaagaattctcagagatttctttgtgatgtgtgaattcaactcacagtgtggatccttccttttgatagagcagttttgaaacactgtttttgtagtatttccaagcggatatttggaacgccttgaagcgtttggtagaaaaggaaatatcttcccataaaacctagacagaacccatctcagaaacgactttgtgatgtctgcattcaactcacagagttgaacatttctcttgatagagcagttttgaaaccctctttctgaaggatctgcaagtggatatttggaactcctttgggtcttcgttggaaacgggatttcttcgtataaatccagacagaagaattctccgaaacttctttggttgtgtgcattcaagtcacagagtggaaccttcctttggatagagcagtttgaaacgctctggttgtagtatttccaagcggatattagagcgccttgaagcctatggtagaaaaggaaatatcttcccataaaacctagacggaagcaatctcagaaactactttgtgatggctgcattcca

SEQ ID NO: 987 - DNA, 2200 bp, Homo sapiens
  misc_feature (1)..(2200): DMR6:58817701
ctatgatagaaaaggaaacatcttcatggaaaacatagatagaatcattctcagaaacaactttgtgatgtgtgcattgaactcaccgtctttaacctttcttttggtagagaagttttgaaacactctctttgtaaagtctacaagtggatattttgagcccttggaggcattctttggaaaagggaatgtcttcacataaaaggcagacagaagtgttctcagaaactgctttgtgatgtctgtgttcaactcacagagtttaacatttcctttgagagagcggtttagtgacactctctttgtagaatttggaagtgtatactaagagcgctttgaggcctatggtagaaaaggaaatatctttccataaaagctagacagaagcaatctcagaaactcctttgtgatgtctgcattcaactcaccgagtggaacattcctcttgatagagcagtttggaaacactctttctgtagaatcagcttgtttgtatttggacctccttgaggccttcgttggaaacgggttttcatcttataaacccagacagaagaattctcagagtcttctttgtgatgtgtgctttcaactcaccgagataaagatttctcttgatagagcaatttggaaacactctttttgtagaatttgcaagggtacattgagagcgctttcaggcctatggtagaaaagggaatatctttccatcaaaggtagacagaagcaatctcagaaactactttgtgatgtgtgcattcaactcaccgagtgcaacattcctcttgaccgagcagtttggaaacattgtttctgtagaatctgcaagtggatatttggacctctttgaggccttcgttggaaacgggatttcttcctataaacccagacagaagaattctcagagacttctttgtgatgtgtgaattcaactcacagtgtggatccttccttttgatagagcagttttgaaacactgtttttgtagtatttccaagcggatatttggaacgccttgaagcgtatggtagaaaagaaaatatcttcccataaaacctagacagaaccaatctcagaaacgactttgtgatgtctgcattcaactcacagagttgaacatttctcttgatagagcagttttgaaaccctctttctgaaggatctgcaagtggatatttggaactcctttgggtcttcgttggaaacgggatttcttcgtataaatctagacagaagaattctccgaaacttctttggttgtgtgcattcaagtcacagagtggaaccttcctttggatagagcagtttgaaacgctgtggttgtagtatttccaagcggatattagagcgccttgaggcctatggtagaaaaggaaatatcttcccataaaacctagacggaagcaatctcagaaactactgtgtgatggctgcattccacacacacggtggaacatttctcttgatagagcagttttgaaacactctttctgtagaatctgcaagtggataattggaccgccttgaggccttcgttggaaaggggatttcttcatgttactctagacagaagaattctcaaacactgctatgtgatgtttgcattcaagtcacagagtgcaacattcctcttgatagagcagttgggaaacactccttttgtagaatttgcaatgggatatttggacttctttgaggccttcgttggaaacgggatttcttcgtatgcatctagacagaagaattctcagaaacttccttgtgatgtgtgcattcaactcagcgagtggcaccttcctttcgatacagcagttttgaaacactgtttttgtagtatttccaagcggatatttagagcgccttgaagcctatgctagaaatggaaatatctccccataaaaccaagacagaagcaatctcagaaactaatgtgtgatggctgcattccacacacacggtggaccatttctcttgatagagcagttttgaaacactctttctgtagaatctgcaagtggataattggacctcctagaggccttcgttggaaacgggatttcttcatctaaacctacagagaagaattctcagtaacttcttcggatgtgtgcattcgactcacagaatggaacattccctttgatagagcagttttgagacaccgtttttgtagaattcccaagtggatatttagagcact

SEQ ID NO: 988 - DNA, 300 bp, Homo sapiens
  misc_feature (1)..(300): DMR6:58823201
gatgtgtgcattcaattcaaagagtgaaacctcccttttcacagagcagttttgaaaaactgtttttgtaggatttccaaggggatatttatagcgcattgagcctacggcagaaaaagaaacatcttcctataaaaactagacagaataattctcagaatctgctttgcgatgtgtgcgttcaacccacagagtaaaacttttcttttgatagagcagttttgaaacactctttttgtagtatttgcatgtgtatatttagagcgcattgaagcccacagtagaaaaggaaataacttc

SEQ ID NO: 989 - DNA, 3200 bp, Homo sapiens
  misc_feature (1)..(3200): DMR6:58890401
aattcaaagagtgaaacctcccttttcacagagcagttttgaaacactgtttttgtaggatttccaaggggatattttatagcgcattgagcctacggcagaaaaagaaacatcttcctataaaaactagacagaataattctcagaatctgctttgcgatgtgtgcgttcaacccacagagtaaaacttttcttttgatagagcagttttgaaacactctttttgtagtatttgcatgtgtatatttagagcgcattgaagcccacagtagaaaaggaaataacttcacctaaaacctagacagaagcaatctcagaaactactttgtgatgtgtacattcaactcacagagtggaactttcctctttatagagcagtgttgaaacactctttttgtagaaactgcaagtggatatttggacctctttgaggccttcgttggaaacgggatttcttcctataaccctagacagaagaattttcagaaacctcattgtgatgtgtgcgttcatctcacagagtggagtcttccgtttgatagagaagttttgaaaccctgttcttgtaggatttccaagtggatatttagaccactttgaagcctatgatagaaaaggaaacatcttcatggaaaacatagatagaatcattctcagaaacaactttgtgatgtgtgcgttgaactcaccgtctttaacctttcttttggtagagaagttttgaaacactctctttgtaaagtctacaagtggatattttgagcccttggaggcattctttggaaaagggaatgtcttcacataaaaggcagacagaagtgttctcagaaactgctttgtgatgtctgtgttcaactcacagagtttaacatttcctttgagagagcggtttagtaacactctctttgtagaatttggaagtgtatactaagagcgctttgaggcctatggtagaaaaggaattatctttccataaaagctagacagaagcaatctcagaaactcctttgtgatgtctgcattcaactcaccgagtggaacattcctcttgaaagagcagtttggaaacactctttctgtagaatcagcttgtttgtatttggacctccttgaggccttcattggaaacgggttttcatcttataaacccagacagaagaattctcagagtcttctttgtgatgtgtgctttcaactcaccgagataaagatttctcttgatagagcaatttggaaacactctttttgtagaatttgcaagggtacattgagagcgctttcaggcctatggtagaaaagggaatatctttccataaaaggtagacagaagcaatctcagaaactactttgtgatgtgtgcattcaactcaccgagtgcaacattcctcttgaccgagcagtttggaaacattgtttctgtagaatctgcaagtggatatttggacctctttgaggccttcgttggaaacgggatttcttcctataaaccgagacagaagaattctcagagacttctttgtgatgtgtgaattcaactcacagtgtggatccttccttttgatagagcagttttgaaacactgtttttgtagtatttccaagcggatatttggaacgccttgaagcgtatggtagaaaaggaaatatcttcccataaaacctagacagaaccaatctcagaaacgactttgtgatgtctgcattcaactcacagagttgaacatttctcttgatagagcagttttgaaaccctctttctgaaggatctgcaagtggatatttggaactcctttgggtcttcgttggaaacgggatttcttcgtataaatccagacagaagaattctccgaaacttctttggttgtgtgcattcaagtcacagagtggaaccttcctttggatagagcagtttgaaacgctgtggttgtagtatttccaagcggatattagagagccttgaagcctatggtagaaaaggaaatatcttcccataaaacctagacggaagcaatctcagaaactactgtgtgatggctgcattccacacacacggtggaacatttctcttgatagagcagttttgaaacactctttctgtagaatctgcaagtggataattggaccgccttgaggccttcgttggaaacgggatttcttcatgttactctagacagaagaattctcaaacactgctatgtgatgtttgcattcaagtcacagagtgcaacattcctcttgatagagcagttgggaaacactccttttgtagaatttgcaatgggatatttggacttctttgaggccttcgttggaaacgggatttcttcgtatgaatctagacagaagaattctcagaaacttccttgtgatgtgtgcattcaactcagcgagtggcaccttcctttggatacagcagttttgaaacactgtttttgtagtatttccaagcggatatttagagcgccttgaagcctatgctagaaatggaaatatctccccataaaaccaagacagaagcaatctcagaaactaatgtgtgatggctgcattccacacacacggtggaccatttctcttgatagagcagttttgaaacactctttctgtagaatctgcaagtggataattggaactcctagaggccttctttggaaatgggatttcttcatctaaacctacagagaagaattctcagtaacttcttcggatgtgtgcattcgactcacagaatggaacattccgtttgatagagcagttttgagacaccgtttttgtagaattcccaagtggatatttagagcactttgaagtctctgctagaaaaggaaacatcttcatgtaaaaagtagatagaatcgttctcagaaagtgcttagtgacgtgtgcgttcaactcacagagtttaacgtttcttttgatagagcgtttctgaaacacccttcttgtagtagctgcaagtggatatttggacctatttgaggccttctttggaaacgggatttcttcatgtaactctagtttgaaggactttcagaaactcctttgtgatgcgtgcattcaattcaaagagtgaaacctcccttttcacagagcagttttgaaacactgtttttgtaggatttccaaggggatatttatagcgcattgagcctacggcagaaaaagaaacatcttcctataaaaactagacagaataattct

SEQ ID NO: 990 - DNA, 1900 bp, Homo sapiens
  misc_feature (1)..(1900): DMR6:58919301
tcctcttgaccgagcagtttggaaacattgtttctgtagaatctgcaagtggatatatggaccgctttgaggccttcgttggaaacgggatttcttcctataaacccagacagaagaattctcagagatttctttgtgatgtgtgaattcaactcacagtgtggatccttccttttgatagagcagttttgaaacactgtttttgtagtatttccaagcggatatttggaacgccttgaagcgtatggtagaaaaggaaatatcttcccataaaacctagacagaacccatctcagaaacgactttgtgatgtctgcattcaactcacagagttgaacatttctcttgatagagcagttttgaaaccctctttctgaaggatctgcaagtggatatttggaactcctttgggtcttcgttggaaacgggatttcttcgtataaatccagacagaagaattctccgaaacttctttggttgtgtgcattcaagtcacagagtggaaccttcctttggatagagcagtttgaaacgctgtggttgtagtatttccaagcggatattagagcgccttgaggcctatggtagaaaaggaaatatcttcccataaaacctagacggaagcaatctcagaaactactgtgagatggctgcattccacacacacggtggaacatttctcttgatagagcagttttgaaacactctttctgtagaatctgcaagtggataattggaccgccttgaggccttcgttggaaacgggatttcttcatgttactctagacagaagaattctcaaacactgctatgtgatgtttgcattcaagtcacagagtgcaacattcctcttgatagagcagttgggaaacactccttttgtagaatttgcaatgggatatttggacttctttgaggccttcgttggaaacgggatttcttcgtatgaatctagacagaagaattctcagaaacttccttgtgatgtgtgcattcaactcagcgagtggcaccttcctttggatacagcagttttgaaacactgtttttgtagtatttccaagcggatatttagagcgccttgaagcctatgctagaaatggaaatatctccccataaaaccaagacagaagcaatctcagaaactaatgtgtgatggctgcattccacacacacggtggaccatttctcttgatagagcagttttgaaacactctttctgtagaatctgcaagtggataattggacctcctagaggccttcgttggaaacgggatttcttcatctaaacctacagagaagaattctcagtaacttcttcggatgtgtgcattcgactcacagaatggaacattccgtttgatagaacagttttgagacaccgtttttgtagaattcccaagtggatatttagagcactttgaagtctctgctagaaaaggaaacatcttcatgtaaaaagtagatagaatcgttctcagaaagtgcttagtgacgtgtgtgttcaactcacagagtttaacgtttcttttgatagagcgtttctgaaacaccctgcttgtagtagctgcaagtggatatttggacctatttgaggccttctttggaaacgggatttcttcatgtaactctagtttgaagaattttcagaaactcctttgtgatgtgtgcattcaattcaaagagtgaaacctcccttttcacagagcagttttgaaacactgtttttgtaggatttccaaggggatatttatagcgcattgagcctacggcagaaaaagaaacatcttcctataaaaactagacagaataattctcagaatctgctttgcgatgtgtgcgttcaacccacagagtaaaacttttcttttgatagagcagttttgaaacactctttttg

SEQ ID NO: 991 - DNA, 200 bp, Homo sapiens
  misc_feature (1)..(200): DMR6:58950301
cagacagaagaattctccgaaacttctttggttgtgtgcattcaagtcacagagtggaaccttcctttggatagagcagtttgaaacgcagtggttgtagtatttccaagcggatattagagcgccttgaggcctatggtagaaaaggaaatatcttcccataaaacctagacggaagcaatctcagaaactactgtgtg

SEQ ID NO: 992 - DNA, 600 bp, Homo sapiens
  misc_feature (1)..(600): DMR6:59033701
tcgactcacagaatggaacattccctttgatagagcagttttgagacaccgtttttgtagaattcccaagtggatatttagagcactttgaagtctctgctagaaaaggaaacatcttcatgtaaaaagtagatagaatcgctctcagaaagtgcttagtgacgtgtgcgttcaactcacagagtgtaacgtttcttttgatagagcgtttctgaaacacccttcttgtagtagctgcaagtggatatttggacctattggaggccttctttggaaacgggatttcttcatgtaactgtagattgaagaattctcagaaactcctttgtgatgtgtgcattcaattcaaagagtgaaacctctcttttcacagagcagttttgaaacactgtttttgtaggatttccaaggggatatttatagcgcattgagcctacggcagaaaaagaaacaccttcctataaaaactggacagaataattctcagaatctgctttgcgatgtgtgcgttcaactcacagagtaaaacttttcttttgatagagcagttttgaaacactctttttgtagtatttgcatgtgtatatttagagcgcattg

SEQ ID NO: 993 - DNA, 1600 bp, Homo sapiens
  misc_feature (1)..(1600): DMR6:59163101
ataaagatttctcttgatagagcaatttggaaacactctttttgtagaatttgcaagggtacattgagagcgctttcaggcctatggtagaaaagggaatatctttccataaaaggtagacagaagcaatctcagaaactactttgtgatgtgtgcattcaactcaccgagtgcaacgttcctcttgaccgagcagtttggaaacattgtttctgtagaatctgcaagtggatatttggacctctttgaggccttcgttggaaatgggatttcttcctataaacccagacagaagaattctcagagacttctttgtgatgtgtgaattcaactcacagtgtggatccttccttttgatagagcagtttcgaaacactgtttttgttgtatttccaagcggatatttggaacgccttgaagcgtgtggtagaaaaggaaatatcttcccataaaacctagacagaacccatctcagaaacgactttgtgatgtctgcattcaactcacagagttgaacatttctcttgatagagcagttttgaaaccctctttctgaaggatctgcaagtggatatttggaactcctttgggtcttcgttggaaacgggatttcttcgtataaatccagacagaagaattctccgaaacttctttggttgtgtgcattcaagtcacagagtggaaccttcctttggatagagcagtttgaaacgctgtggttgtagtatttccaagcggatattagagcgccttgaagcctatggtagaaaaggaaatatcttcccataaaacctagacggaagcaatctcagaaactactgtgtgatggctgcattccacacacacggtggaacatttctcttgatagagcagttttgaaacactctttctgtagaatctgcaagtggataattggaccgccttgaggccttcgttggaaacgggatttcttcatgttactctagacagaagatttctcaaacactgctatgtgatgtttgcattcaagtcacagagtgcaacattcctcttgatagagcagttgggaaacactccttttgtagaatttgcaatgggatatttggacttctttgaggccttcgttggaaacgggatttcttcgtatgaatctagacagaagaattctcagaaacttccttgtgatgtgtgcattcaactcagcgagtggcaccttcctttggatacagcagttttgaaacactgtttttgtagtatttccaagcggatatttagagcgccttgaagcctatgctagaaatggaaatatctccccataaaaccaagacagaagcaatctcagaaactaatgtgtgatggctgcattccacacacacggtggaccatttctcttgatagagcagttttgaaacactctttctgtagaatctgcaagtggataattggacctcctagaggccttcgttggaaacgggatttcttcatctaaacctacagagaagaattctcagtaacttcttcggatgtgtgcattcgactcacagaatggaacattccctttggtagagcagttttgagacaccgtttttgtagaattcccaagtggatatttagagcactt

SEQ ID NO: 994 - DNA, 2500 bp, Homo sapiens
  misc_feature (1)..(2500): DMR6:59165801
gtgttcaactcacagagtttaacatttcctttgatagagcagtttagtaacactctctttgtagaatttggaagtgtattctaagagcgctttgaggcctatggtagaaaaggaaatatctttccataaaagctagacagaagcaatctcagaaactcctttgtgatgtctgcattcaactcaccgagtggaacattcctcttgatagagcagtttggaaacactctttctgtagaatcagcttgtttgtatttggacctccttgaggccttcgttggaaacgggttttcatacttataaacccagacagaagaattctcagagtcttctttgtgatgtgtgctttcaactcaccgagataaagatttctcttgatagagcaatttggaaacactctttttgtagaatttgcaagggtacattgagagcgctttcaggcctatggtagaaaagggaatatctttccataaaaggtagacagaagcaatctcagaaactactttgtgatgtgtgcattcaactcaccgagtgcaacattcctcttgaccgagcagtttggaaacattgtttctgtagaatctgcaagtggatatttggacctctttgaggccttcgttggaaacgggatttcttcctataaacccagacagaagaattctcagagacttctttgtgatgtgtgaattcaactcacagtgtggatccttccttttgatagagcagttttgaaacactgtttttgtagtatttccaagcggatatttggaacgccttgaagcgtatggtagaaaaggaaatatcttcccataaaacctagacagaaccaatctcagaaacgactttgtgatgtctgcattcaactcacagagttgaacatttctcttgatagagcagttttgaaaccctctttctgaaggatctgcaagtggatattaggaactcctttgggtcttcgttggaaacgggatttcttcgtacaaatctagacagaagaattctccgaaacttctttggttgtgtgcattcaagtcacagagtggaaccttcctttggatagagcagtttgaaacgctgtggttgtagtatttccaagcggatattagagcgccttgaggcctatggtagaaaaggaaatatcttcccataaaacctagacggaagcaatctcagaaactactgtgtgatggctgcattccacacacacggtggaacatttctcttgatagagcagttttgaaacactctttctgtagaatctgcaagtggataattggaccgccttgaggccttcgttggaaacgggatttcttcatgttactctagacagaagaattctcaaacactgctgtgtgatgtttgcattcaagtcacagagtgcaacattcctcttgatagagcagttgggaaacactccttttgtagaatttgcaatgggatatttggacttctttgaggccttcgttggaaacgggatttcttcgtatgaatctagacagaagaattctcagaaacttccttgtgatgtgtgcattcaactcagcgagtggcaccttcctttggatacagcagttttgaaacactgtttttgtagtatttccaagcggatatttagagcgccttgaagcctatgctagaaatggaaatatctccccataaaaccaagacagaaacaatctcagaaactaatgtgtgatggctgcattccacacacacggtggaccatttctcttgatagagcagttttgaaacactctttctgtagaatctgcaagtggataattggacctcctagaggccttcgttggaaacgggatttcttcatctaaacctacagagaagaattctcagtaacttcttcggatgtgtgcattcgactcacagaatggaacattccgtttgatagagcagttttgagacaccgtttttgtagaattcccaagtggatatttagagcactttgaagtctctgctagaaaaggaaacatcttcatgtaaaaagtagatagaatcgttctcagaaagtgcttagtgacgtgtgtgttcaactcacagagtttaacatttcttttgatagagcgtttctgaaacacccttcttgtagtagctgcaagtggatatttggacctatttgaggccttctttggaaacgggatttcttcatgtaactctagtttgaagaattttcagaaactcctttgtgatgtgtgcattcaattcaaagagtgaaacctcccttttcacagagcagttttgaaacactgtttttgtaggatttccaaggggatatttatagcgcattgagcctacggcagaaaaagaaacatcttcctataaaaactagacagaataattctcagaatctgctttgcgatgtgtgcgttcaacccacagagtaaaacttttcttttgatagagcagttttgaaacactctttttgtagtatttgcatgtgtatatttagagcgcattgaagcccacagtagaaaaggaaataacttca

SEQ ID NO: 995 - DNA, 500 bp, Homo sapiens
  misc_feature (1)..(500): DMR6:59241401
acttccaaggggatatttatagcgcattgatcctatggcagaaaaagaaacatcttcctataaaaactagacagaataattctcagaatctgctttgcgatgtgtgcgttcaacccacagagtaaaacttttcttttgatagagcagttttgaaacactctttttgtagtatttgcatgtgtatatttagagcgcattgaagcccacagtagaaaaggaaataacttcacctaaaacctagacagaagcaatctcagaaactactttgtgatgtgtacattcaactcacagagtggaactttcctctttatagagcagtgttgaaacactctttttgtagaaactgcaagtggatatttggacctctttgaggccttcgttggaaacgggatttcttcctataaccctagacagaagaattttcagaaacctcattgtgatgtgtgcgttcatctcacagagtggagtcttccgtttgatagagaagttttgaaaccctg

SEQ ID NO: 996 - DNA, 7600 bp, Homo sapiens
  misc_feature (1)..(7600): DMR6:59255401
ctagacagaagaattctccgaaacttctttggttgtgtgcattcaactcacagagtggaaccttcctttggatagagcagtttgaaacgctgtggttgtagtatttccaagcggatattagagcgccttgaggcctatggtagaaaaggaaatatcttcccataaaacctagacggaagcaatctcagaaactactgtgtgatggctgcattccacacacacggtggaacatttctcttgatagagcagttttgaaacactctttctgtagaatctgcaagtggataattggaccgccttgaggccttcgttggaaacgggatttcttcatgttactctagacagaagaattctcaaacactgctatgtgatgtttgcatgcaagtcacagagtgcaacattcctcttgatagagcagttgggaaacactccttttgtagaatttgcaatgggatatttggacttctttgaggccttcgttggaaacgggatttcttcgtatgaatctagacagaagaattctcagaaacttccttgtgatgtgtgcattcaactcagcgagtggcaccttcctttggatacagcagttttgaaacactgtttttgtagtatttccaagcggatatttagagcgccttgaagcctatgctagaaatggaaatatctccccataaaaccaagacagaagcaatctcagaaactaatgtgtgatggctgcattccacacacacggtggaccatttctcttgatagagcagttttgaaacactctttctgtagaatctgcaagtggataattggacctcctagaggccttcgttggaaacgggatttcttcatctaaacctacagagaagaattctcagtaacttcttcggatgtgtgcattcgactcacagaatggaacattccctttgatagagcagttttgagacaccgtttttgtagaattcccaagtggatatttagagcactttgaagtctctgctagaaaaggaaacatcttcatgtaaaaagtagatagaatcgttctcagaaagtgcttagtgacgtgtgtgttcaactcacagagtttatcgtttcttttgatagagcgtttctgaaacacccttcttgtagtagctgcaagtggatatttggacctatttgaggccttctttggaaacgggatttcttcatgtaactctagattgaagaattttcagaaactcctttgtgatgtgtgcattcaattcaaagagtgaaacctcccttttcacagagcagttttgaaacactgtttttgtaggatttccaaggggatatttatagcgcattgatcctatggcagaaaaagaaacatcttcctataaaaactagacagaataattctcagaatctgctttgcgatgtgtgcgttcaactcacagagtaaaacttttcttttgatagagcagttttgaaacactctttttgtagtatttgcatgtgtatatttagagcgcattgaagcccacagtagaaaaggaaataacttcacctaaaacctagacagaagcaatctcagaaactactttgtgatgtgtacattcaactcacagagtggaactttcctctttatagagcagtgttgaaacactctttttgtagaaactgcaagtggatatttggacctctttgaggccttcgttggaaacgggatttcttcctataaccctagacagaagaattttcagaaacctcattgtgatgtgtgcgttcatctcacagagtggagtcttccgtttgatagagaagttttgaaaccctgttcttgtaggatttccaagtggatatttagaccactttgaagcctatgatagaaaaggaaacatcttcatggaaaacatagatagaatcattctcagaaacaactttgtgatgtgtgcgttgaactcaccgtctttaacctttcttttggtagagaagttttgaaacactctctttgtaaagtctacaagtggatattttgagcccttggaggcattactttggaaaagggaatgtcttcacataaaaggcagacagaagtgttctcagaaactgctttgtgatgtctgtgttcaactcacagagtttaacatttcctgtgatggagcggtttagtaaccctctcattgtagaatttggaagtgtatactaagagcgctttgaggcctatggtagaaaaggaaatatctttccataaaagctagacagaagcaatctcagaaactcctttgtgatgtctgcattcaactcaccgagtggaacattcctcttgatagagcagtttggaaacactctttctgtagaatcagcttgtttgtatttggacctccttgaggccttcgttggaaacgggttttcatcttataaacccagacagaagaattctcagagtcttctttgtgatgtgtgctttcaactcaccgagataaagatttctcttgatagagcaatttggaaacactctttttgtagaatttgcaagggtacattgagagcgctttcaggcctatggtagaaaagggaatatctttccataaaaggtagacagaagcaatctcagaaactactttgtgatgtgtgcattcaactcaccgagtgcaacattcctcttgatagagcagtttggaaacattgtttctgtagaatctgcaagtggatatatggaccgctttgaggccttcgttggaaacgggatttcttcctataaacccagacagaagaattctcagagatttctttgtgatgtgtgaattcaactcacagtgtggatccttccttttgatagagcagttttgaaacaccgtttttgtagtatttccaagtggatatttggaacgccttgaagcgtatggtagaaaaggaaatatcttcccataaaacctagacagaacccatctcagaaacgactttgtgatgtctgcattcaactcacagagttgaacatttctcttgatagagcagttttgaaaccctctttctgaaggatctgcaagtggatatttggaactcctttgggtcttcgttggaaacgggatttcttcgtataaatccagacagaagaattctccgaaacttctttggttgtgtgcattcaagtcacagagtggaaccttcctttggatagagcagtttgaaacgctgtggttgtagtatttccaagcggatattagagcgccttgaagcctacggtagaaaaggaaatatcttcccataaaacctagacggaagcaatctcagaaactactgtgtgatggctgcattccacacacacggtggaacatttctcttgatagagcagttttgaaacactctttctgtagaatctgcaagtggataattggaccgccttgaggccttcgttggaaacgggatttcttcatgttactctagacagaagaattctcaaacactgctgtgtgatgtttgcatgcaagtcacagagtgcaacattcctcttgatagagcagttgggaaacactccttttgtagaatttgcaatgggatatttggacttctttgaggccttcgttggaaacgggatttcttcgtatgaatctagacagaagaattctcagaaacttccttgtgatgtgtgcattcaactcagcgagtggcaccttcctttggatacagcagttttgaaacactgtttttgtagtatttccaagcggatatttagagcgccttgaagcctatgctagaaatggaaatatctccccataaaaccaagacagaagcaatctcagaaactaatgtgtgatggctgcattccacacacacggtggaccatttctcttgatagagcagttttgaaacactctttctgtagaatctgcaagtggataattggaactcctagaagccttcgttggaaatgggatttcttcatctaaacctacagagaagaattctcagtaacttcttcggatgtgtgcattcgactcacagaatggaacattccctttgatagagcagttttgagacaccgtttttgtagaattcccaagtggatattgagagcactttgaagtctctgctagaaaaggaaacatcttcctgtaaaaagtagatacaatcgttctcagaaagtgcttagtgacgtgtgcgttcaactcacagagtgtaacgtttcttttgatagagcgtttctgaaacacccttcttgtagtagctgcaagtggatatttggacctattggaggccttctttggaaacgggatttcttcatgtaactctagattgaagaattcccagaaactcctttgtgatgtgtgcattcaattcaaagagtgaaacctcccttttcacagagcagttttgaaacactgtttttgtaggatttccaaggggatatttatagcgcattgagcctacggcagaaaaagaaacatcttcctataaaaactagacagaataattctcagaatctgctttgcgatgtgtgcgttcaacccacagagtaaaacttttcttttgatagagcagttttgaaacactctttttgtagtatttgcatgtgtatatttagagcgcattgaagcccacagtagaaaaggaaataacttcacctaaaacctagacagaagcaatctcagaaactactttgtgatgtgtacattcaacctcacagagtggaactttcctctttatagagcagtgttgaaacactctttttgtagaaactgcaagtggatatttggacctctttgaggccttcgttggaaacgggatttcttcctataaccctagacagaagaattttcagaaacctcattgtgatgtgtgcgttcatctcacagagtggagtcttccgtttgatagagaagttttgaaaccctgttcttgtaggatttccaagtggatatttagaccactttgaagcctatgatagaaaaggaaacatcttcatggaaaacatagatagaatcattctcagaaacaactttgtgatgtgtgcgttgaactcaccgtctttaacctctcttttggtagagaagttttgaaacactctctttgtaaagtctacaagtggatattttgagcccttggaggcattctttggaaaagggaatgtcttcacataaaaggcagacagaagtgttctcagaaactgctttgtgatgtctgtgttcaactcacagagtttaacatttcctttgagagagcggtttagtaacactctctttgtagaatttggaagtgtatactaagagcgctttgaggcctatggtagaaaaggaaatatctttccataaaagctagacagaagcaatctcagaaactcctttgtgatgtctgcattcaactcaccgagtggaacattcctcttgatagagcagtttggaaacactctttctgtagaatcagcttgtttgtatttggacctccttgaggccttcgttggaaacgggttttcatcttataaacccagacagaagaattctcagagtcttctttgtgatgtgtgctttcaactcaccgagataaagatttctcttgatagagcaatttggaaacactctttttgtagaatttgcaagggtacattgagagcgctttcaggcctatggtagaaaagggaatatctttccataaaaggtagacagaagcaatctcagaaactactttgtgatgtgtgcattcaactccccgagtgcaacattcctcttgatagagcagtttggaaacattgtttctgtagaatctgcaagtggatatatggaccgctttgaggccttcgttggaaacgggatttcttcctataaacccagacagaagaattctcagagacttctttgtgatgtgtgaattcaactcacagtgtggatccttccttttgatagagcagttttgaaacactgtttttgtagtatttccaagcggatatttggaacgccttgaagcgtatggtagaaaaggaaatatcttcccataaaacctagacagaaccaatctcagaaacgactttgcgatgtctgcattcaactcacagagttgaacatttctcttgatagagcagttttgaaaccctctttctgaaggatctgcaagtggatatttggaactcctttgggtcttcgttggaaacgggatttcttcgtataaatctagacagaagaattctccgaaacttctttggttgtgtgcattcaactcacagagtggaaccttcctttggatagagcagtttgaaacgctgtggttgtagtatttccaagcggatattagagcgccttgaggcctatggtagaaaaggaaatatcttcccataaaacctagacggaagcaatctcagaaactactgtgtgatggctgcattccacacacacggtggaacatttctcttgatagagcagttttgaaacactctttctgtagaatctgcaagtggataattggaccgccttgaggccttcgttggaaacgggatttcttcatgttactctagacagaagaattctcaaacactgctgtgtgatgtttgcatgcaagtcacagagtgcaacattcctcttgatagagcagttgggaaacactccttttgtagaatgtgcaatgggatatttggacttctttgaggccttcgttggaaacgggatttcttcgtatgaatctagacagaagaattctcagaaacttccttgtgatgtgtgcattcaactcagcgagtggcaccttcctttggatacagcagttttgaaacactgtttttgtagtatttccaagcggatatttagagcgccttgaagcctatgctagaaatggaaatatctccccataaaaccaagacagaagcaatctcagaaactaatgtgtgatggctgcattccacacacacggtggaccatttctcttgatagagcagttttgaaacactctttctgtagaatctgcaagtggataattggacctcctagaggccttcgttggaaacgggatttcttcatctaaacctacagagaagaattctcagtaacttcttcggatgtgtgcattcgactcacagaatggaacattccctttgatagagcagttttgagacaccgtttttgtagaattcccaagtggatatttagagcactttgaagtctctgctagaaaaggaaacatcttcatgtaaaaagtagatagaatcgttctcagaaagtgcttagtgacgtgtgcgttcaactcacagagtttaacgtttcttttgatagagcgtttctgaaacacccttcttgtagtagctgcaagtggatatttggacctatttgaggccttctttggaaacgggatttcttcatgtaactctagattgaagaattttcagaaactcctttgtgatgtgtgcattcaattcaaagagtgaaacctcccttttcacagagcagttttgaaacactgtttttgtaggacttccaaggggatatttatagcgcattgagcctatggcagaaaaagaaacatcttcctataaaaactagacagaataattctcagaatctgctttgcgatgtgtgcgttcaacccacagagtaaaacttttcttttgatagagcagttttgaaacactctttttgtagtatttgcatgtgtatatttagagcgc

SEQ ID NO: 997 - DNA, 3200 bp, Homo sapiens
  misc_feature (1)..(3200): DMR6:59274801
tgtgcgttgaactcaccgtctttaacctttcttttggtagagaagttttgaaacactctctttgtaaagtctacaagtggatattttgagcccttggaggcattctttggaaaagggaatgtcttcacataaaaggcagacagaagtgttctcagaaactgctttgtgatgtctgtgttcaactcacagagtttaacatttcctttgagagagcggtttagtaacactctctttgtagaatttggaagtgtatactaagagcgctttgaggcctatggtagaaaaggaaatatctttccataaaagctagacagaagcaatctcagaaactcctttgtgatgtctgcattcaactcaccgagtggaacattcctcttgatagagcagtttggaaacactctttctgtagaatcagcttgtttgtatttggacctccttgaggccttcgttggaaacgggttttcatcttataaacccagacagaagaattctcagagtcttctttgtgatgtgtgctttcaactcaccgagataaagatttctcttgatagagcaatttggaaacactctttttgtagaatttgcaagggtacattgagagcgctttcaggcctatggtagaaaagggaatatctttccataaaaggtagacagaagcaatctcagaaactactttgtgatgtgtgcattcaactcaccgagtgcaacattcctcttgaccgagcagtttggaaacattgtttctgtagaatctgcaagtggatgtttggacctctttgaggccttcgttggaaacgggatttcttcctataaacccagacagaagaattctcagagacttctttgtgatgtgtgaattcaactcacagtgtggatccttccttttgatagagcagttttgaaacactgtttttgtagtatttccaagcggatatttggaacgccttgaagcgtatggtagaaaaggaaatatcttcccataaaacctagacagaacccatctcagaaacgactttgtgatgtctgcattcaactcacagagttgaacatttctcttgatagagcagttttgaaaccctctttctgaaggatctgcaagtggatatttggaactcctttgggtcttcgttggaaacgggatttcttcgtataaatctagacagaagaattctccgaaacttctttggttgtgtgcattcaagtcacagagtggaaccttcctttggatagagcagtttgaaatgctgtggttgtagtatttccaagcggatattagagcgccttgaggcctatggtagaaaaggaaatatcttcccataaaacctagacggaagcaatctcagaaactactgtgtgatggctgcattccacacacacggtggaacatttctcttgatagagcagttttgaaacactctttctgtagaatctgcaagtggataattggaccgccttgaggccttcgttggaaacgggatttcttcatgttactctagatagaagaattctcaaacactgctatgtgatgtttgcattcaagtcacagagtgcaacattcctcttgatagagcagttgggaaacactccttttgtagaatttgcaatgggatatttggacttctttgaggccttcgttggaaacgggatttcttcgtatgaatctagacagaagaattctcagaaacttccttgtgatgtgtgcattcaactcagcgagtggcaccttcctttggatacagcagttttgaaacactgtttttgtagtatttccaagcggatatttagagcgccttgaagcctatgctagaaatggaaatatctccccataaaaccaagacagaagcaatctcagaaactaatgtgtgatggctgcattccacacacacggtggaccatttctcttgatagagcagttttgaaacactctttctgtagaatctgcaagtggataattggacctcctagaggccttcgttggaaacgggatttcttcatctaaacctacagagaagaattctcagtaacttcttcggatgtgtgcattcaactcacagaatggaacattccctttgatagagcagttttgagacaccgtttttgtagaattcccaagtggatatttagagcactttgaagtctctgctagaaaaggaaacatcttcatgtaaaaagtagatagaatcgttctcagaaagtgcttagtgacgtgtgcgttcaactcacagagtttaacgtttcttttgatagagcgtttctgaaacacccttcttgtagtagctgcaagtggatatttggacctatttgaggccttctttggaaacgggatttcttcatgtaactctagattgaagaattttcagaaactcctttgtgatgtgtgcattcaattcaaagagtgaaacctcccttttcacagagcagttttgaaacactgtttttgtaggatttccaaggggatatttatagcgcattgagcctacggcagaaaaagaaacatcttcctataaaaactagacagaataattctcagaatctgctttgcgatgtgtgcgttcaacccacagagtaaaacttttcttttgatagagcagttttgaaacactctttttgtagtatttgcatgtgtatatttagagcgcattgaagcccaaagtagaaaaggaaataacttcacctaaaacctagacagaagcaatctcagaaactactttgtgatgtgtacattcaactcacagagtggaacttttctctttatagagcagtgttgaaacactctttttgtagaaactgcaagtggatatttggacctctttgaggccttcgttggaaacgggatttcttcctataaccctagacagaagaattttcagaaacctcattgtgatgtgtgcgttcatctcacagagtggagtcttccgtttgatagagaagttttgaaaccctgttcttgtaggatttccaagtggatatttagaccactttgaagcctatgatagaaaaggaaacatcttcatggaaaacatagatagaatcattctcagaaacaactttgtgatgtgtgcgttgaactcaccgtctttaacctttcttttggtagagaagttttgaaacactctctttgtaaagtctacgagtggatattttgagcccttggaggcattctttggaaaagggaatgtcttcacataaaaggcagacag

SEQ ID NO: 998 - DNA, 1500 bp, Homo sapiens
  misc_feature (1)..(1500): DMR6:59342901
tttgtagtatttccaagcggatatttggaacgccttgaagcgtatggtagaaaaggaaatatcttcccataaaacctagacagaaccaatctcagaaacgactttgtgatgtctgcattcaactcacagagttgaacatttctcttgatagagcagttttgaaaccctctttctgaaggatctgcaagtggatatttggaactcctttgggtcttcgttggaaacgggatttcttcgtagaaatctagacagaagtattctccgaaacttctttggttgtgtgcattcaagtcacagggtggaaccttcctttgggtagagcagtttgaaacgctgtggttgtagtgtttccaagcggatattagagcgccttgaggcctatggtagaaaaggaaatatcttcccataaaacctagacggaagcaatctcagaaactactgtgtgatggctgcattccacacacacggtggaacatttctcttgatagagcagttttgaaacactctttctgtagaatctgcaagtggataattggaccgccttgaggccttcgttggaaacgggatttcttcatgttactctagatagaagaattctcaaacactgctatgtgatgtttgcattcaagtcacagagtgcaacattcctcttgatagagtagttgggaaacactcctattgtagaatttgcaatgggatatttggacttctttgaggccttcgttggaaacgggatttcttcgtataaaactagacagaagaattctcagaaacttctttgtaatgtgtgcattcaactcagcgtgtggcaccttcctttggatacagcagttttgaaacactgtttttgtagtatttccaagcggatatttagagcgccttgaagcctacgctagaaatggaaatatctccccataaaaccaagacagaagcaatctcagaaactaatgtgtgatggctgcattccacacacacggtggaccatttctcttgatagagcagttttgaaacactctttctgtagaatctgcaagtggataattggacctcctagaggccttcgttggaaacgggatttcttcatctaaacctacagagaagaattctcagtaacttcttcggatgtgtgcattcgactcacagagtggaacattcccttcgatagagcagttttgagacaccgttttggtagaattcccaagtggatatttagagcactttgaagtctctgctagaaaaggaaacatcttcatgtaaaaagtacatagaatcgttctcagatagtgcttagtgacgtgtgcgttcaactcacagagtgtaacgtttcttttgatagagcgtttctgaaacacccttcttgtagtagctgcaagtggatatttggacctattggaggccttctttggaaacgggatttcttcatgtaactctagattgaagaattctcagaaactcctttgtgatgtgtgcattcaattcaaagagtgaaacctccctttt

SEQ ID NO: 999 - DNA, 1000 bp, Homo sapiens
  misc_feature (1)..(1000): DMR6:59565501
ttcagaaactcctttgtgatgtgtgcattcaattcaaagagtgaaacctcccttttcacagagcaattttgaaacactgtttttgtaggatttccaaggggatatttatagcgcattgagcctacggcagaaaaagaaacatcttcctataaaaactagacagaataatcctcagaatctgctttgcgatgtgtgcgttcaacccacagagtaaaacttttcttttgatagagcagttttgaaacactctttttgtagtatttgcatgtgtatatttagagcgcattgaagcccacagtagaaaaggaaataacttcacctaaaacctagacagaagcaatctcagaaactactttgtgatgtgtacattcaactcacagagtggaactttcctctttatagagcagtgttgaaacactctttttgtagaaactgcaagtggatatttggacctctttgaggccttcgttggaaacgggatttcttcctataaccctagacagaagaattttcagaaacctcattgtgatgtgtgctgttcatctcacagagtggagtcttccgtttgatagagaagttttgaaaccctgttcttgtaggatttccaagtggatatttagaccactttgaagcctatgatagaaaaggaaacatcttcatggaaaacatagatagaatcattctcagaaacaactttgtgatgtgtgcgttgaactcaccgtctttaacctttcttttggtagagaagttttgaaacactctctttgtaaagtctacaagtggatattttgagcccttggaggcattctttggaaaagggaatgtcttcacataaaaggcagacagaagtgttctcagaaactgctttgtgatgtctgtgttcaactcacagagtttaacatttcctgtgatagagcggtttagtaaccctctctttgtagaatttggaagtgtatactaagagcgctttgaggcctatggtagaaaaggaaatatcttt

SEQ ID NO: 1000 - DNA, 300 bp, Homo sapiens
  misc_feature (1)..(300): DMR6:59586801
ctctctttgtaaagtctacaagtggatattttgagcccttggaggcattctttggaaaagggaatgtcttcacataaaaggcagacagaagtgttctcagaaactgctttgtgatgtctgtgttcaactcacagagtttaacatttcctgtgatagagcggtttagtaaccctctctttgtagaatttggaagtgtatactaagagcgctttgaggcctatggtagaaaaggaaatatctttccataaaagctggacagaagcaatctcagaaactcctttgtgatgtctgcattcaact

SEQ ID NO: 1001 - DNA, 1500 bp, Homo sapiens
  misc_feature (1)..(1500): DMR6:59652301
ttgaaacactctttctgtagaatctgcaagtggataattggaccgccttgaggccttcgttggaaacgggatttcttcatgttactctagatagaagaattctcaaacactactatgtgatgtttgcattcaagtcacagagtgcaacattcctcttgatagggcagttggcaaagactcctttgtagaatttgcaatgggatatttggactttttcgaggccttcgttggaaacgggatttcttcgtataaatctagacagaagaattctcagaaacttctttgtgatgtgtgcattcaactcagcgagtggcaccttcctttggatacagcagttttgaaacactgtttttgtagtatttccaagcggatatttagagcgccttcaagcctacgctagaaatggtaatatctccccataaaaccaagacagaagcaatctcagaaactaatgtgtgatggctgcattccacacacacggtggaccatttctcttgatagagcagttttgaaacactctttctgtagaatctgcaagtggataattggacctcctagaggccttcgttggaaacgggatttcgtcatctaaacctacagagaagaattctcagtaacttcttcagatgtgtgcattcgactcacagagtggaacattcccttcgatagagcagttttgagacaccgttttggtagaattcccaagcggatatttagagcactttgaagtctctgctagaaaaggaaacatcttcatgtaaaaagtagatagaatcgttctcagaaagtgcttagtgacgtgtgcgttcaactcacagagtgtaacgtttcttttgatggagcgtttctgaaacacccttcttgtagtagctgcaagtggatatttggacctattggaggccttctttggaaacgggatttcttcatgtaactctagattgaagaattctcagaaactcctttgtgatgtgtgcattcaattcaaagagtgaaacctcaattttcacagagcagtttggaaacactgtttttgtaggatttccaaggggatatttatagcgcattgagcctacggcacaaaaagaaacaccttcctataaaaactagacagaataattctcagaatctgctttgccatgtgtgcgttcaactcacagagtaaaacttttcttttgatagagcagttttgaaacactctttttgtagtatttgcatgtgtatatttagagcgcattgaagcccacagtagaaaaggaaataacttcacctaaaacctagacagaagcaatctcagaaactactttgtgatgtgtacattcaactcacagagtggaactttcctctttatagagcagtgttgaaacactctttttgtagaaactgcaagtggatatgtggacctctttgaggtcctcgttggaaacgggatttcttcctataaccctagacagaagaattttcagaaacctcattgtgatgtgtgcgttcatctcacagagt

SEQ ID NO: 1002 - DNA, 200 bp, Homo sapiens
  misc_feature (1)..(200): DMR6:59688201
aaaaggtagacagaagcaatctcagaaactactttgtgatgtgtgcattcaagtcaccgagtgcaacgttcctcttgaccgagcagtttggaaacattgtttctgtagaatctgcaagtggatatttggacctctttgaggccttcgttggaaacgggatttcttcctataaacccagacagaagaattctcagagattt

SEQ ID NO: 1003 - DNA, 300 bp, Homo sapiens
  misc_feature (1)..(300): DMR6:59747801
tcatgtaaaaagtagatagaatcgttctcagaaagtgcttagtgacgtgtgcgttcaactcacagagtttaacgtttcttttgatagagcgtttctgaaacacccttcttgtagtagctgcaagtggatatttggacctatttgaggccttctttggaaacgggatttcttcatgtaactctagattgaagaattctcagaaactcctttgtgatgtgtgcattcaattcaaagagtgaaacctcccttttcacagagcagttttgaaacactgtttttgtaggatttccaaggggatat

SEQ ID NO: 1004 - DNA, 300 bp, Homo sapiens
  misc_feature (1)..(300): DMR6:60412401
catttgtttttgaaagaagagaaatatggctctgttctgcccggctcaccggcggtcagagtttaaggttctctctcttattcactgagcaattgctgttatcttgttcttttttcaaggtgcccagatttcatattgctcaaacacacgtgctgtacaatttgtgcagttaatgcaattattacagggtcctgaggcgacgtcctcctcagctgacaggattaagagattaaagtaaagacaggcataggaaatcacaaggttattgattggggaagtgataagtgtccatgaaatctt

SEQ ID NO: 1005 - DNA, 300 bp, Homo sapiens
  misc_feature (1)..(300): DMR6:67197701
ggtagattaatagaaattacctaaaatgaaacataaagagtaaaaaagaaaattttaaaaagaacagacatctaagggctatgaaacaatatcaaaccaccaattgtgagtgtaatataaatcccagatgggtaaaagaaggtaattaaactgctgaaagacagcaaaccagagatgtatgaaactagaacaataaacatgatatatacctccctcaaccccctcaaaaggaaacacacatgcacacagacatacacaaacttacctaagtacattacacatcgtatttctactgctgaa

SEQ ID NO: 1006 - DNA, 200 bp, Homo sapiens
  misc_feature (1)..(200): DMR6:67486901
agcttttcatgttaaaaactctgaataaattaggtactcatgggatgtatctcaaaataataagagttatttatgacaaacccacagccaatatcatactgaatgggaaaaaactggaagcattccctttgaaaactggcacaagacagggatgccctctctcaccacccctattcaacatagtgttggaagttctggcc

SEQ ID NO: 1007 - DNA, 100 bp, Homo sapiens
  misc_feature (1)..(100): DMR6:68449901
taaaataaatcgtataaactctttatatggaatatttgctatagacaagagatctgacttgttatcttgatgtttgtaaaactaaatttttaatcttttt

SEQ ID NO: 1008 - DNA, 700 bp, Homo sapiens
  misc_feature (1)..(700): DMR6:69467001
aatatcaccacttgccatactgaaaggtgacagcacgctggcagccctcacagccctcgttcgctcttggcgcctcctctgcctcggcgtccactctggccatgctcggggagtccttcagcctgccactgtgctgtgggggctcctctctaggctggttgaggatggagccagctccctcagcttgctaggaggtgtggagggagacgcatgggcaggaaccggggctgcgcctggcgcttgcgggccagctagagttccagatgggcgtgggcttggtgggccctgcactcagagcgggcagccggccccactggccccgggcactgaggggcttagcacctgggccagcagctgtggagggtgcactgggtcccccagcagtgccagcccaccagcgctgcactcaatttctcaccgggccttagctgcctccctgcggggcagggctcgggacctgtagcccgccatgcctgggccttcctccgcccccaccctgccgtgggctcctgtgcagcccaagcctctgcagtgagcaccgccccctgctccacggcgcctggtcccatcaatcacccaagggctgaggagtgcaggcacatggcgcaggactggcaggcagctccacctgcggccctggtgtgggatccactgggtgaagccagctggatgcctgagtctggtggggacttggagaacc

SEQ ID NO: 1009 - DNA, 200 bp, Homo sapiens
  misc_feature (1)..(200): DMR6:71652801
catcatactctctctctcacacacaaacacacacacacggagatacatacatacacacacagagagagagagaagagttgacatggcaaacctgagactgccctctgtagaaagacttgcttgcaaggttggcccttgggtggcatctggatcatggtaggattcctaccatttcctgttaagaataccttatatgccta

SEQ ID NO: 1010 - DNA, 1300 bp, Homo sapiens
  misc_feature (1)..(1300): DMR6:74468001
ggcctctgcttgcagtgctgcagagtgagtatggtcaacagtgctgcaccccactggcttcaaagcacctggtggggagagttatttcaactctcatttgaagggtgggatggttgacaaagcatcacccacaatcttcacagtgaaggaagagaaagaccctctcatattattttatattgttttatactcactacctgttttaagaaaaaacagcaaggaaataaaaccaaagacaagcagcccggcgccaggcccaaaaccaggcctgggcctgcctggcctaaacccagtagttaaaaatcaactcataacttagaaaccgatgttattcatagattccagacattgtatagaacattgtgaaactccctgccctgttctgtttctctctgaccaccggtgcatgcagcccctgtcacgtaccccttgcttgactgaatcaatcacgaccctttcatgtaaaatctttagtgttgtgagcccttaaatgggacagaaactgtgcactcagggagcttggattttaaggcagtagcttgccgatgctaccagctgaataaagcccttccttctacaactcgatgtctgagaagttttgtctgcagctcgtcctgctacatttcttggttccctgaccgggaagtgaggtaattgacggactgccgaggcagcaccttaggcggcttagacgtgccctgtggagcatctctgcgggggactccagccagcctgagtgacgcgatccaaacagcgctcctgggtaggaaaatgccccagtgggatgcctcaccagagcagcgcttggcaggcccccgcggaggataaacacagtggctgaacaccaggaaggaactggcacttggagtccagacatctgaaacttggtaagactagtcttttgaacttgccccactccacctgagtggaagcatggcctgatcacccgcagtgtgcctgtactggcatctttgttctggttttgacttggcttgacttggtaagactagtcttttgaacttgccccactccatctgagtggaagcgtggcctcatcacccacggtttgcctgtattggcatctttgttctggttttgacttgacttgaattgctggatactttggtttaggtttttgatctggcttggatttgttggatttctctgattttggttttgattttggttttgtgtaaattgcaaaagtgtgtgtgtgccctctttcctcttctttgtttgtggtgtgtgtgttgtgtgagcatggtgttttatctcaaaaaaacatgggtcaggtgcaaag

SEQ ID NO: 1011 - DNA, 1700 bp, Homo sapiens
  misc_feature (1)..(1700): DMR6:75447101
aaggcataaggatggtatgaacaactctacaaacttctgtcgtattaaaaacctttatatatttttagctataacaaagtttgagtgcaagtagggaaaaaggaaagaaaacggttataaacatagaaatgtagaattttagatttctttaaagagttctttttttcccctgcaagaaacactggaaatcaggtgcagtatatatttatcttcttcctttgtttttaattggcaggaagcattttcaatgaaatcgctagtttaccatacattagcttgagccaagaattgcattttcaaatctcaaaagacctttggatgaggtcaaggtatcctaaagaaaatgtgcagggagccctgggattccactgactatttgaagagaagaggagaacaatgctcttcatccatggatttgtagacctgtgctttaccttaccaaactgagatgatttaaaataatcataggatagaaagatagatggaggctagttgtctagggaataaagaatagtgaactttgaaagctaatgttaaggactgaaaggtcctgaagttatttttgcattctaggtgtatgggattttgatcaaggatactttggaaagatctttatttttttaactgtggctcaagaccttttcagtgtgcccttagctaaatatccaggtgaggctacatgtattaaatcttcatcttaaaagtaaactgtatttaaaaacctaaatgcacccagaggtagtcacaaatacaaatcagacctcttttcccattctttgaagattgagcccttgaagaaatcaaaccaggtaccaatatagaagaaagggaatttcttcaggattcttcattggcacttttcaaacataaaaaaaaataaaaataattgtaatatcacattatttttatggggagctgttccctacatatagaataataccccccacatagatgaggaaaaaagtctttgtaattttgcttcaaagatagcatgccagacactaaataagtttgaaatttctgtttatatttgaacattcacatttattaaatttactttaacctgggtggtaaacacacagcatggattttgtcataccttcctcctagatcactaattagctatggcatcctttgactgctgagcctgaatacattctcagaagccttctcaatacatcactggaacagcctctactaataggtgagagttcctatttacaaggatatgtatttagcatttctgatctcaattcttttaaaatgaaatatgattaattcttatgtgctattactgtaaaaataagatagcaaatacatccctttaaagataaatgccttacaaagacttcatgtccaggaacccaaaagcaaatgcaacaaaaacaaagataaatagatgggacttaattgaactaaaaagcttctgcacagcaaaggaaataatgagcagagtaaatacacaacccacagagtggaagaaaatctttgcaatctatgcatccaacaaagaaccaatatgcagaatctacaaggaatataaacaaaacaccaaacaatcccatcaaaaagtgggctaagggcatgaatggacaattctcaaaagaagatacacaaatggccaacaaacatatgaaaaaatgctcaacatcactaatgatcagggaaatgtaaatcaaaaccacagtgtgataccacct

SEQ ID NO: 1012 - DNA, 200 bp, Homo sapiens
  misc_feature (1)..(200): DMR6:75953601
ctttttattatttatttatatttttattatactttaagttctgggatacatgtgcagaacgtgcaggtttgttacataggtataactgtgccatggtggtttgctgcacccatcaaccagtcatctacaataggtatttctgctaatgctattcctcccctaatcccccaccccatgacaagccccagtgtgtgatgttc

SEQ ID NO: 1013 - DNA, 500 bp, Homo sapiens
  misc_feature (1)..(500): DMR6:76453001
tgggcaggaggaagtgtgtgctgattagtccatgggtggccatgggtgagtgtggaaaaaaccctatttaattagccaaaaggcatcaaggaagttctcactccaggttgcagactccactgcgaactggcagcctggcccccaaggttcagaccaccctggcttgaagttgaggtttcactggggactcacctctttctgcccaggaacctgtcttcttccgaccgccatcaacatactgtctacagcacccaggctgtccgcactgagggacgcccacaggcccgtgtccagctgccctcagcactcaagagtttccctcccatgtaccttggtgccccaagtccaaaacaggccaaggcggcaggtggctggcatgtcagagccaccctgagcgtgtgcacacctcgccaggtcgtgacagtgcctaggtttgaccacaactttgctctgcagtggagcaggcgcctagagcagggagatgctaggaagcaggagca

SEQ ID NO: 1014 - DNA, 1500 bp, Homo sapiens
  misc_feature (1)..(1500): DMR6:76631001
cctgggtgacagactccattacaaaaaaaaaaaaaaatctatttgttgtgaatccaaaggtgaaaaacaacaaagctgtcatgtgatttcaataaattttcattagtataaagttggttaaaagtagatgacatttttccaaagaagacatccaaatgtctaccacctatatgaaaagatgcctagcatcgctaatcaacaggggaatgcagatcaaaactacaatgaactatcacctcacaccttttaggatggctgttagcagagataagagataacaggtgttggcaagggtgtggggaaaacgaaacacttgtttactgttggtgaaaatgtcgaatgttgcagccactacagaaaatagtatgggtgttcctcaaaaaatacgactcccatatgatccagtaatcccactccttggtatatataaaatataattgaaattgatatctcaaagaaatacctgcatcccccatgttcactgtagcattgtttgtaatagccaagatatggacacaacagatgaatagataaacagagtgtggtatacatatgcaatgaaatattattcaaccataaagaagaagaaaaatcactgcttgcaacaatatgggtggaactagaggacaataagctaaatgaaataagccagttgcaaaaggataaatattgtattgaaacgggagagttccccgaataccatcacagggcatgtgacaagggtgtggctggcctgcctggtcaccacagctcaaaccccctagggggaacatgcagatgggcaggtgcagaggcctgggtgagtgcttctgggctccgccccggccccaaggcagcttctaggggtggatgtctgagactccagaagtccaagtgggcgcgtgttacaaagctctttcagatttgccatctgcagatggcttgcgtgttaatcatcttaatggaccctctgccttatcgcaaaggcagagggccagtgtgacacccttctgtatctggagctcttccccagtgccccgaaataggatcacacccaggctcaaaggatgagtgcaaagttttattgagtagtggaggtggctctcagtgagatggatggggagccagagaaggggatggagtgcgaaggtggtcttcccctgaggtccggcgtcccagccactggactgctctccgactgcccctacttactcccattggcctccagatgtccctcctcgtctctgtttctgctgcgtcattccatcctcgctggtcggctgttctgctagtctccacattcagccgctgtgtgtgtacccgctaagatcttgggtttatgtgggcacaggatggggggcatggaaggccagagcagtcttggaaaatgtaacattggggcatgaaaacaggagttcctattctcacttaggtccatgggtgcaggtccgagggtggagcccttgccagggaccccacccatctctacccagcacttgcctgctctcatcctgtgtcagt

SEQ ID NO: 1015 - DNA, 1300 bp, Homo sapiens
  misc_feature (1)..(1300): DMR6:77332301
tggatatccagtttcccagcaccaattattgaagagattgtcctttctctaatgtatatttttggtgcctttaacacaaatgagttgactgtaaatgcagggatttatttctgggttctctattctgttccattggtctacgggtctgtttcaatgccagtaccatgctgccttggttactataggtttgtagtgtaacttgaatacaggcaatgtgaatactctaactttattctttttcttgatttttaatttttgtgggtatataatgggtgtatatatttataaggtaaatgagatattttaatacaagcatgcattgcataatataaagtcatgtaaaacagggtatccttccacttaagaatttattctttgtgttataaacaatccaattatattcttttagttattttagaatgtatagttaaattattattgactagagccacccttttgtgatatcaaataatactaggtcctactgattcttttttttctgtaccagttaacaatcccatctccttcccactttcccattacccttcccagcctctggtaaccattcttctactctctatgttcacgaattcaactgtttcgatttttgaatcccgcaagtaagtgagaacatgcgatgttcgtctttctgtgcctagctcatttcatttaacataatgacctccagttctgatggcagtggtggcccatctggagtggctgctgcaaggactccagttgcagtgggggaggtaccgcctgggctgcacgctccgcagagccagcaggggctgggaataggtgatcccagtgggagccccacactctaccgagttggcggagcaggagaacatgctcttgggcacagctgtaagtgcccaggcacatctccagacccaggcattcctgcactctcgggggtctgagaagccgcttgcccctgcaggcttgtaagtgcctgctcctgctatctggcctctctcaactcccagcatccaaactggtgtgaaacaaagttgcggcacccaatcaggtgtggagcaaagctgtggtcgagaccgggcactgctgtgacatagccaggtgtaagtgcactcagggcagtgctgacacactagccccctaccgctctgcccccctctgaactttgggtgccaaggagtggagaatggaagcaaggggtgctgggggtggcttggcatgtgcttgacggtaccctttggtgcagacaagcctgggcatcatggatggcatgttgatggtggtgggaggcagaaagattcctaggcaggaaggggtg

SEQ ID NO: 1016 - DNA, 100 bp, Homo sapiens
  misc_feature (1)..(100): DMR6:79482901
taaaatatttctttagatttctcatattgaggctactgaatgtaatctactacctgtgtaatctcatgggtaacctataacatatatcacaatctattag

SEQ ID NO: 1017 - DNA, 900 bp, Homo sapiens
  misc_feature (1)..(900): DMR6:80278301
tgtttggatataggatggcattttaaaactgtagtttcttcctgaagcctgtttagtattctgtaaacagcttctgtgaccacagataggaaccaaagtctaaatcactctggggatatattgtggattgggctgcttcattactgtttgtagttaaatccatgttatactctgttggttcttctccttgccctaaccacacctggtctgcttccatgtcatcttctcctttgcttgtttagtttccacctccaaccctttccccattcttttttttgagagggagtctcgctctgtcgcccaggctggagtgcagtggcgcaatctcagctcactgcaacctccgcctgccgggttcaagcaattccctgcctcagcctcctgagtagctgggattacaggcacctgccaccctgcccagctaatgtttgtatttttagtaggcacgaggtttcaccatcttggccaggctggtcttgaactcctgaccttgtgatccaccgacctcggcctcccaaagtgcctttccccattctttcctgggacgtctcaaccatttgcatggttactcttgaaaccttcaaatttgaaactttcaaggtttgacctgttgagctttagacccaaaattccaacattatgcttattttggtagagataaaacatttgtgtaataaaatgattatctggaaaaatttgaatgtgaaacaatgagaaaaggtaggcatatgcacatggttatttgctagtttatggaaatcagcttatataaaaatgaactctatttctcttcaactttttctggaccttttaaactgtctcctttttgtttgtttgtttgttttttgttttgttttgtttttttgagacagagtcttgctctggctccatcacccaggc

SEQ ID NO: 1018 - DNA, 500 bp, Homo sapiens
  misc_feature (1)..(500): DMR6:80781701
tgccagattgttcctctagctgaaagtgcaggcagcagggattgttttgcctgctgtgcaggaccagagtcacagttgattctggtcccagggcaggagacatgccgtcgctattggctccagaacatggcatactccagaagggggtctgttctcaagatagtgctgtgctgcagcagcttggctcatagggggtgggtggaatgtgggaagtgcgtaccttgtgctcctcatctggagtgaagcagctgcatgaattcatagcagctccccaaacaaggttcaggactcgcaaggactccaagattctcctgtaataagaactgtaggtctttgcagtggcagtgggagctggtagggttcttttgcttaccttttccccacaagggcaagtcccttgtgactctgggttgatccaggtgggagagatctggctgcagtgacaggtacctccatcccaccctgtgggcttccagtcatcacaggtgcatctccactaa

SEQ ID NO: 1019 - DNA, 900 bp, Homo sapiens
  misc_feature (1)..(900): DMR6:81336501
aggtgtgtggtattatttctgagggctctattctgttccattggtctatctctgtttttgtacaagtaccatgctgttttggttactgtagccttgtagtatagtttgacgtcaggtagcgtgacgcctccagctttgttctgttgccttaggattgtcttggcaatgcgggctcttttttggttccatatgaactttaaagtagttttttccaattatgtgaagaaagtcattggtagcttgatggagatggtattgaatccataaattaccttgggagtatagccatttttacgatattgattcttcctatccatgagcatggaatgttcttccatttgtttttgtcctcttttatttcgttgagcagtggtttgtagacctccaacctgctctgtagcagtgctcaggaacaactgagatttgctgagactaaaggaagaattgagagacaggagtagctggatttcctaggccaactaagaatccctaagcctagctgggaaggtgaccacttctacctttaaacacagggcttgtaacttagatcacacccaaccaatcagatagtaaggagagctcactaaaatgctaattaggcaaaaacaggaggtaaagaaatagccaatcatctgttcctgagagcacagtgggagggacaatgatcaggatataaacccaggcatttgagccagcaatggcaaccccctttgggtcccctccccttgtatgggagctctgttttcactctatttcactctattaaatcttgcaactgcaagcttctggtccgtgttcgttacggctcgagcagagcttttgcttgctgggcaccactgctgttttgccaccatcgcagacccaccgctgacttccattcttccagatctggcagggtgt

SEQ ID NO: 1020 - DNA, 3000 bp, Homo sapiens
  misc_feature (1)..(3000): DMR6:82522001
cctaccctccagtgtatgaagcactcaaataatctctatggttactcgcttttcatgactcctgttattatgagttatgctatcacacataaacctgtctttcccctcaccagcctctgtactccttactcagggaagagaggggcaatatctgccctacagaagattctcaataccatatttcgttaattctatgatacatatatgacttcatactttaataactcttaaataaaaatgcttctttcaataaatagcatgtcataccttaaatggcagcattttttcttagtggcataaaaaataatcatgtattttatagttgatagtttcttatatccaacaaaatatggtgctgaattgtacctaatgagtgattcatccagatttggggtaaactgttaatgcattttagttaaaaataaaaagtaagcaatcaaatgataaaaatttagaacatgcagtaagaaagaaatttgctaaaagctaagaaatcagagttataaacaatacatgtttattgagcatttactgtttacccatcagtattcttgatgctaaggatatagcagtgaacaaaacaatccttgtggacttacatcatagtagggaaaatagacaataaataaatgtatgataagtcagttgataataagtgctacgaagtaaaacaaagcaggaataaagttggggagaaaagtggagggtgattgctatttcagttgagatcattgggatggtcttttctgaggaggggacatttgcatagagaagcaaggatgtgagttatgtgtctgctgtgtgtagaacattctgggaaagggcagagaagggaacaagactattccagaaaaagaggacacatgctgggagtgtttgagaacagaatgaaggctagtatgctgcagccagtgggtatgtgtgggagttctaggagatgaggccaaagagcccctatcatacaggaccctagaggtcactgtaaggatttgacttttatcttgaatgacgtgggaggctactaagagttttgaacagagggtcgggcgcggtggctcacacctgtaatcccagcacttcgggagaccgaggcgggcatatcagctgaggtcgggagtttgagaccagcctgacgaacatagagaaaccccgactctactaaaaatacaaaattagccaggggtggtggcacgtgcctgtaatcccagctacttgggaggctgaggcaggagaatcccttgaacccggtaggtggagcttgcggtgagccaagatcgtgccatcgcactccagcctgggtaacaagagcaaaagtctgtctcaaaaaaaaaaaaaatgtttagaacagaggagtgatagagcctgacttgtgttgtggggagagggtgggggggagtgtaggagaggggttgataagaatgggaacataaagatcagtaagtaggccactacagtaatccaggtgagaggtggtagtagtgggaatagggtggtagtgttacagaagtgctggaaagggaagagtttggtccctttaaatgatagggaagcagggaagggaagtgctgggtagagacaagggtggtccctggctagggctccaccccaacagacctaggtgaggacaggcatttcctggagatttcccaagatcaccctggcctgccatgccctcatcttgtgcctataaaaacccccaagaccctggcagccacacatataggcggctggacattgagaggagcacatcagcagaggaacacaggtggttagacatagagaggaatgcaccaataggcaccggcatgctggcaggccagtgaccagcagaagcagaacaacctggagtttggctggggcagtcggaggagagcccaggccaccgaatggcccaactccaggggaaaaccttcccactccctccccttctgacttcccctgagctacatccactcaataaaaccttgcactcattctccaaacccaggtatgatccgattctcccagtacaccaaagcaagaaccggggatacagaaagccctctgtcctttcaacaaggtagagcaaggtagaggcttaattgagctggttaacacaagccacctatagacggcaaaactgaaagagcagcctgtaacacaggcccactggggcttcaggtgctgtaaatattcacccctagacactgccgtggggtcggagcccatagcctgcccgtctgtaagctcccctggaggtttgagcagcggggcactgaagaagcgagccacacccccatcgcatgccctgtgagggggacaagggaacctttcctgtttcagtagcgtggaagtgctggtattctggataaacttcaaaggtagacctgtcaagattaactggtaaactgaatgtgcagtatagaagaaatagatcaaggaagatggcaaggtttttacctgagcaacttgtaagtggagttgtcatttactataatgggaaagattgtgagaagaatagtttggagaagagaaaaccaagttaattttgaatatattaaactaaggatgtctattagtagtgaagagaagattctgagaaatgaacctatacttcaggaaagaggtaaaaaatggaaatataaattgggagttattaacatatatgtcgaattttaggagatatgaaatattctaagctctagagcaagggtacagagagagaaggggaaggaagacagaactctggggcaatccaacctaaataatcagggggatgaggaggaaccagcaaaggaaatggagaggagccgtcagggaggtgggatgggaaccaaaacaaagtatcatccaagatgtcaaccagaagaagtgtttcggatcaagggagtaacaacttggccaaattttgctgatgtaggctgagatgtgaccattttatttggaagcaaggaggtcattgatgacccttacaagagatgattcagtggagtataagcacaaaaatctagttctaaaggg

SEQ ID NO: 1021 - DNA, 300 bp, Homo sapiens
  misc_feature (1)..(300): DMR6:83131401
gctgttacagatcaagtgctatgttaacatatgtagctctgaaatacctattatctattgtataggttttaagtagtttggatatttcaactatgaattatttttcactctgtaatatacaaccataaatattaaattgcattcaatgtgggatttgtatcttattaaggatagtttattctagcatcactttactaaacaccactaaataacgaaatggggtcttatctgggccctgcagaaaacatttacatgtctgattttttttttttcgagatggagtctcgttctgtcgcgcaa

SEQ ID NO: 1022 - DNA, 300 bp, Homo sapiens
  misc_feature (1)..(300): DMR6:83724301
agcagaatgtattcaagcaggacttttgagaccctcagccactgcccctgtcccatcacaagctagtcggatgtccatcccccataaacccatatcttacacttctatattagtacttttcacaatatctcacagcaacccctgtcagctctctggcagcagaacactgggctgcaaggatcttagtgccactctgtggtggcaccccctcagccctgcaaatcttttttactcacaactgaccaggcaagtaaaaagagaccatacagcatgcttgttattgaaatcaccaggtataca

SEQ ID NO: 1023 - DNA, 300 bp, Homo sapiens
  misc_feature (1)..(300): DMR6:85435301
gcaactccattttaataggagctgggtaaaatgaggctgaaactactgggagatgcattcccagacggttaaggcattctaagtcacaggatgagataggaggtcagcacaaaatgcaagtcctaaagaccttgctgataaaacaggttgcagtaaaggagcaagccaaaatccaccaaaatcaaaacggcaatgagagtgacctctggtcgtcctcactgctacactcccaccagcgccatgacagtttacaaatgctgtggcaacatcaggaagttatcctatatggactcaaaaggg

SEQ ID NO: 1024 - DNA, 1200 bp, Homo sapiens
  misc_feature (1)..(1200): DMR6:85979601
aattacaaagcagccagctaacaacttcatgataggatcaaaaggtcacatatcaatattaatcctgaatctaaatgaatcttgaatataaatgttctaaatgccccacttaaattgcagaatggcacagtggctaaaaaaagacccatcagtctgctgtcttcaagagacccatttcacacttaacaatacctataggctcaaagtaaagggagaaagatcagccccacagatggaaaacaaataagagcaggggtcactattcttatatcagattaaacagagtttaaaccaacgaaagtaaaaaaaaggataaattgaacccaataaagggttcaattcaacaagaagacttaactattctaaatatatctgcacctaacatgggcacacccagatgcataaaacaagtacttacagacctatggaaagacatagacagccacaaaataatagtagggaacttcaaaaccccacaaacaacactagacagaccatagaggcagaaaactgacaaaaaattctgggctttaacttgacatgtgaccaggtagacctaatagacatctacagaacactccatgcatcagccacagaatatacattcttgtctccacatggaactcgaagatcaaacacatgcacagatgtagagcaaatgtcaatatatttttaagagtcaaaatcatactaagcacactctcagtgaaagtgaaataaaaacagtaattaataccaagaagatctctcaaaacagcaaaattacatggaaattaaacaacttgctcctaaatgacttttgggtaaacaacattgacacagaaatcaaaaaaatctgtgaaataatgaaaacagaggcacaatgtaccaaaatccctgggatgcaacagaagcagtgttaagaggaaagcgtaatgctaaagacctacctccaagtgttaggaagatctcaaattaacgatctaacaccacatctagagaaaccaaaaagataagaacaaactaaccccaaagttagcaaaagaaaagaaaaaactatgatcagagcagaactgaacaaaattcagtgcacagtggtctgagctccctgctcagtccccaggtggtgaggacaaaaatgggtgggattgaactgggttagaccacctacaggtccccaaatgacaggcatgccaggggagaatctagtgagcagctgtt

SEQ ID NO: 1025 - DNA, 300 bp, Homo sapiens
  misc_feature (1)..(300): DMR6:86041601
agaataaaattatgtcctttgcagcaacatggatgcaacagaaggccattatcttaagcaaataaacataggaacagaaaagcaaataccacgttttcacttataagtaaatgctgaatattgggtacacgtggacataaagatggcaacaacagaagctggagactagtagaacggggagagaggaagggggaaagggctgaaaatctacgtattaggtactatgctcagtacctggctaacagggtcattcataacccaaacctcagtatcatgcaataaacccacctaacaaacaag

SEQ ID NO: 1026 - DNA, 1000 bp, Homo sapiens
  misc_feature (1)..(1000): DMR6:86048301
gtcattggtattttgatagagattgcattgaatctgcagaacacttgcagtatagacattttcaaaatattgattcttccaatccataagcatgagatatctttccattttttggtttcctcttcaattcctttcatcagtattttagtttttctaatagtgatctttcactttggttcaattaaatcctaggtattttattttttttgtagattgaattggtttctttttatttgtataaatttaggtggtaaaagtgcacttttgttctatggatatactgagtaacagtgaactctgggcttttagtgtatccatcactggaatagtgtacattgtacccattaagtgattgcttattcttcaaccccctcctatctttccaccctctgagtctccaatgactattattccatactctaagcccatatgtacactttatttaactcccacttttaagtgagaacgtatggtatttgactttctgattctgagttgtttcacttaaaataatggcctccagttccatccatgctgctgaaaaagacatgattgctttctttttatggttgaatagtattctagcgtgtgcatgtgtgtattttatactattatatttattacaatttctttttttaattttctttttaattctcagcaaggcaatttacttctatatagaagggtgtacccttacagatggaacaatggcaagcgcacatttggacaagggaggggaaggagttcttatccctgacacacatggcccctgctgctgtgtggttcccctattgactagtgttagacagcacaggctaaactaattccaattagctaatttaaagagaatgatggggtgagtgctttggcaagagtcagggcaaagcagatagcaggtaatcagaatgagttagggtggagcaggtgatcagaatgagttagggtggagtaggtaattgaaaatgttgctttacgaggaagttaagtttaaaagtagaag

SEQ ID NO: 1027 - DNA, 200 bp, Homo sapiens
  misc_feature (1)..(200): DMR6:86178301
agtcttttatcccttacctcctgcccaccctttcccccaagccccaaggtccattgtatcattcttatgcctttgcatccccatagcttagctcccacatatcagtgagaacgtacaatgtttggttttccattcctgagttacgttactgagaataatagtctctaatctcatccaggtcactgcaaatgcagttaatt

SEQ ID NO: 1028 - DNA, 2000 bp, Homo sapiens
  misc_feature (1)..(2000): DMR6:86430101
gtggtgtaacacttaagagttctggagtcaggctgcagtcactcaaatgtcagccctacctttttctgtggtgtgtatttgtataagctgtttaacttcactgagccttgagtcttcactggtaaagtcaggtttgttgagaggatcaaataaaatcgtgattcacaacacttaaaacagcgactacattagtaagcacttgaaaaaattgtagctagtatcattaagatcttataggattttaatctgaattataacaaggtgcactgtaatgacacctctaatacttgtaatttttattggtccttcatgtactatgacagttcagacttacaaatgtacacatttcagaactggacttcagttgttgcttaaaatattttctctctcctcagcctcctcacttcctttatagattcatctttcattgaggaagccagggaaaaaatggtatatttcatttcagacagcctttatgaataagactacatggatggtcaaagttttagtttctgacaagttttgtaggaaaaaaaaacaaaccacaatttttgatctttgcttctttattttcagcagaccaagtaagtcgcattggcacagatatatgcttctgtggtagttaattggaaggaaaaatgtccgtgctcttatgtctgcatatgtactcaatgcaaactttgaatttatgttttgaaattgggacaatttgagaataaaataaccttaactgtatttctttattgtttcagttcaagtacttatactttgtttttgaaaaaaaacaatcttaatttcctactctgacattcccctacttacaccacagattgaggcagtttggaatatgtcaggttccatctctgctgtgagatcactcatatctgacaacctgtttaagaaccttgaagatgctctgaggccaattgtaattccccccaaccaccccagagaaatacatggggccagggtggactgcataagcagcactgccactgccagagggtgctggttgccaaggagcctgctgccccactgcctgtctgccctgccgcttcaccttcaagattcttaggcacttgctcttgtgtcctctattgctagctatttcttgctcttgctttctttctccatcactcctcttctgtctcactctctcttctcctttctctcactttctttctctattcatcctttgcctgcttgtgccattgcctgcactgtttggttctttcattgatttctatggcaccaatctccatggaatctaaccactcagacaaacacattaggttaaatataggcctgtgtaggaagagaagagacacatttctcttgcttcctttcctttaggaaaatctatgcttgattaagtgacattattccaaggtaaagagcagacatcgaagggtgttaaaaagaggagaaaaatagatttgtatttagaaaatgttatctagctgcaatgtggaaaacaaaggggaggtcaggatgggaagcatggaaacaagttaacaggctgtttcagttgttcaagttagtgaaaatggtgacctgaaaaggggtagtagcagtgacaatggagaaagtgagtctggacatagattcaatcacacttggagactgattaatagatgtaagtgattgaggtaaaggaagagatgatgaccactctgaagcttcttgctgagatggctgccattaccattagggaacacaaaagaacaataggtctgaggcaggagatattgaattccatttcatttggggcaggtttgtagcatgtatggtacttctaaggggaaatgcccaagtagttggatgtgtgagttggaagcccagtagagatgtctgagctgcaaatatatgttcttgacttaccagcataaacatgacaattgaagccatgagaagagatgagacagcccaggaagagtatgaagagatcagagctctgaaaagactgagatggaacgctagggaattaagaagaaagtgat

SEQ ID NO: 1029 - DNA, 1200 bp, Homo sapiens
  misc_feature (1)..(1200): DMR6:88703301
ggtgtccatcaatggtggactagataaagaacatgtggtacacatacaccatggaatactacacagccataaaaaggacaaaatcatgtcctttgtagcaatatggatatagctggaggccattgtcctatgagaattaacgcaggaacagaaaacgcaggttctcctaagtgagagctaaacactgggtactcatagacataaagatggcaacaacagacaacggggactactaaaggaaggaggaagggaggcaggcaagggttgaaaaactgttgggtactatgctcagtacctgggtgatgggattgtccatatctcaaacctcagcatcatacaatatacccaggtaataaacctacacatgtacatcctgaatctaaaataaaagtttgaaaaataaaatataaataaataagtaaacaagcatgagtaatgccacaattctttccaggggaagctgatgaaccactttatctggaaagaatcactaatgtggtatctctcagtttagctaatgtagattattaggtaccttgtttcaaggaaggatataccaggacccaccttaagcttggcaagctttggcctctttctaatatatctaatattgtgttgtacataggcaaacttgcatagaggccagtgtgactgcttatattaaaagagagacttcaggccgggtgcggtggctcacgcctgtaatcccagcactttgggaggcttaggcgggcggatcacgaggtcaggagatcaagaccatgctggctaacgtggtgaaactccgactctactaaaaatacaaaaaaattagccaggcgtggtggcgggcgcctgtaatcccagctactcgggaggctgaggcaggagaatggcatgaacccaggaggtggagcttgcagtgagccgagatagcaccactgcactttaccctgggtgacagagcgagactctgtctcaaaaaaaaaaaaaaaaaaaaaaaaaaagacagacttcaatcctttgttttgttgctgtgatttgtttaaattttatgtattttattgattttgtttaattaccagagtaatacctgcccataacaagccaaacaataaaaggtatgtcatgcaactattaataatcttctctttttccttcctatgatattcaatatgatcaagacaggagtgaatcatttcactctcctttatgatcaaa

SEQ ID NO: 1030 - DNA, 300 bp, Homo sapiens
  misc_feature (1)..(300): DMR6:88729001
accgggcgtgggctgcatggtagctcttttccaggattctaccgcctggagtaacacatcatgccaagctcgctctctgctatatgtcaaagtccgacaccctgcgggtcagccctgagggccatccagcttccatctcccaacactaagctcactttgtgtctctcacgacaggcaggaaacttagagttccttggagacctgaagggatgcagtgagcttaaaaattttcaaaagcttaccaatcagtccttattcatccctgagtagatgtgtagtggtattatgatggacctttac

SEQ ID NO: 1031 - DNA, 1000 bp, Homo sapiens
  misc_feature (1)..(1000): DMR6:88798901
tcccttatctaactagaactaatacttaattcaatactagaggtcctggtcaatgtgtaaaattagacaatgatgagaactaacagaattcaacaggattgttgaatcaataaaataaatcaataatgtggcagtgtactagaagtagcaataaaaaaagacacaatttaccacaaaagcagaaaatgacaaatatttagaagttaccataacaataataaaaaacttaaactcagttacagaacagaaaaagacctgaaaaaaaaaagccatagcattcattgagaaagtgatttaacattgcaaacacatcaattttctccacgttaatctaaattcaaagatgttccaattaaactcctaacaaaaatttctgggtagcatgacaaattgattctgaaactttcacgttaaaccaattgtcaacaaatatttaaggtaatgctggcgaacagggagacttgacttaataccagatatcaattacaaagtcattgtaataaaaagtgtggttacggcccggcgcggtggctcacacctgtaatcccagcactttgggaggccaaggtaggcggatcacctgagatcaggagttcaataccagcctggctaacatggtgaaactccgtttctactaaaaatacaaaaaattagccgggcatggtggtgcgcacctgcaatcccagctactcaggaggctgaggcaggagaatcccttgagcccagaaggcagaggttgcagtgagccaacattgcgccattgcacttcagcttgggcaacaagagcaaaactccatctcaaaaaaaaaaaaaaaaaaaaaaagtatggttactagaaagggaacggaatgacaaatcaactgcctatactagacatccaagaaagagactcacttatttgtcaggccatttttcctacatatgccatatatgtacagatctgaaccatgagtttcacacactgaaattttctgaatttattgttatatttagactttgc

SEQ ID NO: 1032 - DNA, 1100 bp, Homo sapiens
  misc_feature (1)..(1100): DMR6:88965701
tcagcccccaaggagctgggactacaggtgcaggcccccacaccccactaacttttttatacttttttcgtctggaactcctgcaagcagccctcccacctcagcctcccaaagtgctggtaagacagccaggtgggaaggattccttggcagaatctccttttgacctgagcactgggaggaatgcaccctgtggtggagccttgggaaatttgcgccatttgcagtggggaggagcctggcccctccttttcctaggtggaacctgggattcagtctaccaggcaggaagcactctggctttggggagagtctctgtttccctttttttctttttgcccaataaattccattctcacccttcaaggcatctgtgagcctaatatttcatggccatgtgaccaggacccagctcttagctgaactaaggagaaagtcgtacaacagctttggcacccaatgtggggcttgagaagcggttgagtgacacggggactcaaaacttttcactgtcatttctaagccttttcatgcgtggacttctgagggtagggaaaccatgcccccactcccatcgctccctggggtcaggggcctttccatggcctttgccttcgttttttgggaaggataggcaagtcgcagctcctcattccctctcccctcccagctggggctggggaatgccacatgtccacagcatcttccccttccctggccaaggctcaactccatctgataagcttctctccctggtagaggaaccatttgcctaagaataaaaggtttattcccccaggcatccttttttcttcaccccatcaacagttaacttttaaaccagatgttttttttctttttcactaggctaggaatgataaggatccctgtttatattctccttaaagtttggttgtgaaaaaggatcttatggggactggttttcttctgcctgtctgtgtagctatatatatgttgtgtacatgatgtctatgaaaagagctcaaaggccaggcacggtggctcacacctgtaatcccagcacattgggaggctgagtcaggcagatcacctgaggtcgagagttcaagaccagcctg

SEQ ID NO: 1033 - DNA, 600 bp, Homo sapiens
  misc_feature (1)..(600): DMR6:91213301
tgccaggaggtggtgctttcaagagaacatcaactgtggtactataggggaagttcaggtcgtaggtggggccctagaactgccaagagaatatgacctttgttttcagctaccagggtgagtagggaaggactatcaggtgggggcagggtttggtgtgtctgagctcagattctcgttgggcttgctgcagctgctgtgggagatgcgagtatagttcctaggtctatgaagttaggttttcaggagggctacggctgcctctgctgtttcatgcaagttgtcagggaagagggggaaagccagcagttacaggcctcacccagctcctgtgcaacccaaaaggctgctctcatttccaccctgtccctcaaccacaaccgcaccaagattgtgtccaggcagtgggccagcagggtggagaacttgccccaggttaccagcctccaagctgaggaagaaaacagtgcttctgcaccttctcagttgtcaagtctcacttctcacttgtcaagtctcccccaagattcatgccctcccccaagttctggccaggaaacttcatgtttggttggaattgttacaaagctcagctggagg

SEQ ID NO: 1034 - DNA, 1500 bp, Homo sapiens
  misc_feature (1)..(1500): DMR6:92870101
actccaacagacctgcagctgagggtcctgactgttagaaggaaaactaacaaacagaaaggacatccacccaaaaccccatctctacatcaccatcatcaaagaccaaaggtagataaaaccacaaagatgagaattttcagcagaaaagctgaaaattctaaaaatcagagtgcctcttctcctccaaaggaatgcatctccttgccagcaacagaacaaagttggacggagaatgactttgacgagttgagagaagaaggcttcagacgatcggtaataacaaatttctctgagctaaagaggatgttcgaacccttggcaaagaagctaaaaaccttgaaaaaagattaggtgaatggttaactagaataaccaatgtagagaaggccttaaatgacctgatggagctgaaaaccatggcataagaactacgtgacacatgcacaagcttcagtagccgatttgatcaactggaagaaagagtatcagtgattgaaaatcaaatgaatgaaatgaagtgaaaagagaagtttagagaaaaaagagtaaaaagaaatgaacaaagcctccaagaaatatgggactatgtgaaaggaccaaatctatgtccgattggtgtacctgaaagtgatggggagaatggaaccaagttggacaacactcttcaggatattatccaggagaacttccccagtctagcaaggcaggccaacattcaaattcaggaaatacagagaacaccacaaagatactcctcaagaagagcaactccaagacacataatcatcagattcaccgaagttgaaatgaaggaaaaaatgttaagggcagccagaaagaaaggtcgggttacctacaaagggaagcccatcagactaacagtggatctcctggcagaaactctataagccagaagagagtgggggccaatattcaacattcttaaagaaaagaattttcaacctggaatttcatatccagccaaactaagcttcctaagtgaaggagaaataaaatcccttacagacaagcaaatgctgagagattttgtcaccaccaggcctgccttacaagagcacctgaaggaagcactaaacatggaaaggaacaactggtaccagccactgcaaaaacatgccaaattgtaaagaccatcaatgctaggaagaaactgcatcaactaatgagcaaaagaaccatctaacatcataatgacagtgtcaaattcacacataacaatattaaccttaaatgtaaatgggctaaatgctccaattaaaagacacagactggcaaataggataaagagtcaagacccatcagtgtgctgtattcaggcgacccatctcacgtgcagagacacatataggctcacaataaagggatggaggaagatctaccaagcaaatggaaaacaaaaaaaggcaggggttgcaatcctagtctctgataaaacagactttagactaacaaagatcaaaagagacaaagaaggcc

SEQ ID NO: 1035 - DNA, 1800 bp, Homo sapiens
  misc_feature (1)..(1800): DMR6:93868701
aaaccagctcctggattcattgattttttgaagggttttttgtgtctctatttccttcagttctgctctgattttagttatttcttgccttctgctagcttttgaatgtgtttgctgttgcttttctagttcttttaattgtgatgttagggtgtcaattttggatctttcctgctttctcctgtgggtgtttagtgctataaatttccctctacacactgctttgaatgtgtcccagagattctggtatgttgtatctttgttctcgttggtttcaaagaacatctttatttctgccttcatttcgttatgtaccctgtagtcattcaggagcagattgttcagttgccatgtagttgagcggttttgagtgtgattcttaatcctgagttctagtttgattgcactgtggtctgagagatagtttgttacaatctctgttcttttacatttgcagaggagagctttacttccaagtatgtggtcaattttggaataggtgtggtgtggtgctgaaaaaaatgtatattctgttgatttggggtggagagttctgtagatgtctattaggtctgcttggtgcagagctgagttcaattcctgggtatccttgttgactttctgtccgttgatctgtctaatgttgacagtggggtgttaaagtctcccattattaatgtgtgggagtctaagtctctttgtaggtcactcaggacttgctttatgaatctgggtgctcctgtattgggtgcataaatatttaggatagttagctcctcttgttgaattgatccctttaccattatgtaatggccttctttgtctcttttgatctttgttggtttaaagtctgttttatcagagactaggattgcaacccctgcctttttttgttttccattggcttggtagatcttcctccatccttttattttgagcctatgtgtgtctctgcacgtgatatgggtttcctgaatacagcacactgatgggtcttgactctttatccaacttgccagtctgtgtcttttaattgcagaatttagtccatttatatttaaagttaatattgttatgtgtgaatttgatcctgtcattatgatgttagctggtgattttgctcattagttgatgcagtttcttcctagtctcgatggtctttacattttggcatgattttgcagcggctggtaccggttgttcctttccatgtttagcgcttccttcaggagctcttttatggcaggcctggtggtgacaaaatctctcagcatttgcttgtctataaagtattttatttctccttcacttatgaagcttagtttggctggatatgaaattctggtttgaaaattcttttctttaagaatgttgaatattggcccccactctcttctggcttgtagggtttctgccgagagatccgctgttagtctgatgggctttcctttgagggtaacccgacctttctctctggctgcccttaacattttttccttcatttcaactttggtgaatctgacaattatgtgtcttggagttgttcttctcgaggagtatctttgtggcgttctctgtatttcctgaatctgaacgttggcctgccttgctagattggggaagttctcctggataatatcctgcagagtgttttccaacttggttccattctccacatcactttcaggtacaccaatcagacgtagatttggtcttttcacatagtcccatatttcttggaggctttgctcatttctttttattcttttttctctaaacttcccttctcacttcatttca

SEQ ID NO: 1036 - DNA, 1200 bp, Homo sapiens
  misc_feature (1)..(1200): DMR6:94233601
ttggaacagcagtgaggaacttttgctttatccagggggtaaatgtacacagtctgaactattgatacagacaggagacagggaaatactgggtagaagagggtggttcccgggcaaaggccccaccctcaagcctggaaacttgcggccctaaatgagaacaggcattcctgttttcatgcccaaaagttgccttttggcccaccaacccctgcatcctgtacccatataaactccaaacccccagcttcacaagcagacgaggagatgaacagaagagcagaagaacagcagcagagtgcagcagagggaaggaatcgagcatctgaacatccggaggagttcagctggcgatggttacagagaagatcagctactggatggccaaactccaggggaatatcatcttctcatggtcaaatgccaggggaagatcatcttctcactccatcccccttcctgctccccatccatcccgctgacagccacctctaccactcactaaaaaccctgcattgacccttcaagtccgtatatgacccagttctttctggacgctggacaaggacctggataccaagagggtactgagctggttaacacttaagccacccaggacagcaaggctaaaagagcgcactgtaaaacacacccacttgggcttcgggagttgcagacacccacccctggacactgccatggagccggagctcagggatgcttgtccgcgctcctgcacctgccagtctgcgtgcttcccttcccaaaagcggtttaagtgtgcactgcagtttccactgagaacagatgagccacaccccttttaacaggagtcctcgaaggacacctgtcacacgtcctttgaggaggatcaaggaactctcctgtttcactatgacactagaagtcacaaagtaaagaagacagagataaaatgagaattctcgtaagatataattttaaagtaatgccaattaattgagtgagtaggcaaaaaaatatgtaattaaaaataaggtccttggtgagctgattttcatctgcaaatggatggagtagatgcagttttccctgttcctcccgctaagtacaaccaaaatccctaaacattataggtaaaataataatgagattattaataaagcagatacaaacatttatgcatatgtttttgcatgaacacttgttaaacatagcgct

SEQ ID NO: 1037 - DNA, 2200 bp, Homo sapiens
  misc_feature (1)..(2200): DMR6:101429601
ggagccataaagaggtctctggcctataagaaggaagaaaaatgtaacagacttcctgaaaaaaatggagagggtttttttctttttttctgttttctttttttccaattatagcagcactttatttttccttacacaatgacgtgttgctggggcctaatgttctcacataacagtagaaagccaaaatttgttgtcatttcttaaagaattgagaatagtgtgcaaaaatatcttacataaattaaaaggatgaataaatttacaggtattaatgcagacaactttcaactcctggcaagtaacagcccacggtgttctggcaggaaaacaccaggtaagaaaggaaactgggtcctaacgcttggacttctctaacctttgtagaccagcaagacagaaacaactggttcaggagctcttgccagcctttagagaaatcctggaacactgagctctgacacattaatacctgcacagatcgacagactgctgggcacacagactcaccaaaccacggacttttcttccacaatcatgttctcacctcagccactgagtgaccgagttacatgtactaagggtttaaatccaagatacatacagggtattaaacaaataccaagggaacagttaagttcaatacaaagtcaaaatcagcagcaagttttataatccagtgctggtaatcagatacaagcttctgggacaaatttcttttcaaaggcttactctagtttcatgagactagcatgaagtgttctgaattaacccatgcagcaaatgctacacatctgctcacagcctattctgctgggtgatccacatctgctggaaggtggaaagggaggccagcatggagcttctgatccacaccgagtatttgagctcagtgggggtgatgatcttgatcttcgtggtgttgggtgtccgggcagtgatctccttctatatcctgtcagtgatgcccaggtatgtgattgtgcctccagatagcactgtgtcagcatataggtccttgtgaatgtgcacaccacacttcatgacagagttgaaggtggtcccaaggatgcctcaagattccattctcaggaaaaaggaaaagcgcctctggacaccagaacctctcactgctgatggtgatgacctagccgtaaatcagcaactagctcctttccagggaggaagaggatgccatggtggccatcacctgctcaaagtctagggcagcatagcacagcttctccttgatgtcgcgcactatctcccactaggcagtggtggtgaagctgtagccacactatgtgaggatcttcatgaggtccaggtgcaggatggcctagggaaaggcatagccctcaaagatggcactgtgtaagtgaccccatctccagagtccatgacaatactagtagtactaccggaggtgtacagggacagcatggccctgggtgccacatacatggcagggggtatccaaggtctcaaacatgatctgagtcaacttctctctgttggccttggggttcagaggagcctcgggcagcagcactgggtgctcctcaggaaccacatgcagctcattgcagagggtatgatgccagatcttctccatgttgtaccagttggaaataatgctgtgcttgaaggagtacttcaatgtcaggatgccatgcttgctctgggcctcttcacccatgtgggagtccttctggctcagttccagtaatatttattggaaccttatgctatctctgatgctgtcctgtgtgcttactagaaagacaagtctttactctgacagagtttatattctggtgctgggggcgcccaacaatggaggggaacatggcttgggggcgtcatccccagcaaagccggcttggcacatgtggcgccattgtcaaggacaagtgctgtgaggctcttctttcactgtgatccatggagagtgggttggcagtggcaagtgaaaaaaaaggaaggtgttacctgatgtgtgtgtgtttggtgtatttctgtatgtatagaagagaatgtgtgaccaaaacaaagttaacttatggtattacatattacttgtttttagcatcagtttgaccatttgaaaaatggaatattggttatcactttgttacttggcctgcatggatactttataactactgatttaatagtattattaaaggggagacatttc

SEQ ID NO: 1038 - DNA, 1200 bp, Homo sapiens
  misc_feature (1)..(1200): DMR6:102389901
agagaaaattatacttattaaaatatttttaaatataagaagttgattatgagaaatagattctaaggaaagtactgttacaggatcctttttgtgttgcttttccagctggaaacctctgcagccagtggcgcttttgctggagttttgctcggtcccactgggcccagttggcctggcaggctgtgcttggcttatgctaccggcctgataagctgccaagagcaatcggagcggctagtggtgtgtgagcgagtgagtgtggggtctggccactatacacagccagggatgcagtgggcagctctaggtgtcgacatgggcagtggctccctgtgaggctgcggctggaccaggtatactgcaaagcagcttccacggctggcactggggaacgtggtggcgcccagaagcttgacaccagaaccacagagccccaaagagagtgtcacagccctggctctgggagcttctaggtctggtctccccagaggaccgcagctcttctcttctctcttctctccttctcatcacccacaacatggtgagcaaatggggcgtgattcagccctgtttgtgttgcagctcttttagcctggccattcaggtaatcagggtaaaataaactcccaactgaattttgtgatacaatctcaagtgaggatgaactcccttaaatagaactttgtgtgggggcaagagggaagtatgctgcagccacaagcacaggaactagcaatggcctggccttgcagagatacagggaggagagtggcctgaaagccgtgattactatctctgcgatgaagtgtatggcctgcggcaggtctgagttctatgcacagactgtctagatctaaattcatcgctgtcagtagagcgctacaggagccagactggccttgccaactgtgtgtaagcagtgtgggacttgctgcgcctgctactccccactccctttgtgaactcttctgtgcaggagaggcagttatactctcttctcaaacattaaccccagtggcctgagaaccaactctatcccccacagggaccatggcctgctccgccgaaagagagtctgagctcagacccgcctaaccttgcccccatctggtaggtatttctctgccaatcctggtagcttaacacaaaggacatcgaactttgagagctttataggcccacctatcatctgagaaa

SEQ ID NO: 1039 - DNA, 300 bp, Homo sapiens
  misc_feature (1)..(300): DMR6:105482401
ggcagctggcccaagtccaagtctggggtttcactgctcaggaaggtcagtttagtcctaaggggaaggaaagaaaaaaaaaaaaaaacccaaaagacccaaaaccaactataatctgtatatcccgtaaaagaaaaattacaaattctgatgtaatacttaaaattattatttcttaattccaaagtaactgcttttatgaccagcaaactcccaatggttaaaattattagctcaagacattttgctttagtttagacaaaaacctctaagtggcctactttcattttcagttggttg

SEQ ID NO: 1040 - DNA, 700 bp, Homo sapiens
  misc_feature (1)..(700): DMR6:105716301
agggcaaggcattgcctcactcgggaagcacaaggggtcaaggagttccctttcctagtcaaagaaaggggtgacagacggcacctggaaaatcgggtcactcccacctgaatactgtgcttttccgatgagcttaaaaaacggcgcaccacgagattacatcctgcacctggctcagagggtcctacgctcaaggagtctcgctgattgcaagcacagcagtctgagatcaaactgcaaggtggcagcgaggctgggggaggggcgcccgccattgcccaggcttgcttaggtaaacaaagcagccaggaagctcgaactgggtggagcccactacagctcaaggaggcctgcctgcctctgtaggctccacctctgggggcagggcacagacaaacaaaaagacagcagtaacctctgcagacttaaacgtccctgtctgacagctttgaagagaggagtggttctcccagcacgcaggtggagatctgagaacgggcagactgcctcctcaagggggtccctgacccctgacccctgagcagcctaactgggaggcaccccccagtaggggcagactgacacctcacatggccgggtactcctctgagacaaaacttccagaggaaccagcagacagcagcattcgcggttcacaaaaaaccactgttctacagacactgctgctgatacccaggca

SEQ ID NO: 1041 - DNA, 1100 bp, Homo sapiens
  misc_feature (1)..(1100): DMR6:106016501
ataaatgtctgtcaaatgactaaatggtagatggaaaattagttttgagtttatttcataaaggacaaaagaagatttgaaaagtttattcttgaacaagggtttgaactttgagggtccatttatgcacagattttttcttttctctctttttttttttttttttgagacaaagtctcgctctgtcacccaggctggagtgcagtggcgcaatatcggctcattgcaacctccagctcctgggttcaagcgattctcctgcctcagcccccgagtgtctgtgataacaggtgtgcgccaccatgcccatgcccagctaatttttgtatttttagtagagacggggtttcaacacgctggccacgatggtctcgaactcttgactttgtgatctgcccgccttggcctcccaaagtgccgggattacaggcatgagccaccgtgcctggccgcacagatgtttttcaagaaatacgttggaaattttttggagatttgcaataatttgaagaaactcctagatgaaccatgcagcctagaaatgttgaaaaaattaagaaaaatgcattatgaatgcataaaatatatgtagatacttgtccatttttgtgtttgttaattgactgcttatgttattggttctggtcaacaggagactattagttaagtattggggagtcaaaagttatatgcagatttttgactgcacaggagaattggtgccccaaccccctcattgctcaatggacaacttgtatttgttcagctctgtcagctttgaagaagtgatcttgtttatttggaattagttttaagttaaaacatatttagatgataggaagttgctgtagaaatgtatccattttctaaacacaacatggcagtcagaaggcaatattaatgaacacaggctaatagaaaacactcttgctctgtgtgtgtctgagtctgggtgtgtgactccattgtgaactggccttagagggtgacctgcgcacctccaccctacccttgccggagggcaccgtgttatgaataaagcaactaagtttagaaacaggcaaagggaagcagaggtggggttttgggtaagttcacac

SEQ ID NO: 1042 - DNA, 800 bp, Homo sapiens
  misc_feature (1)..(800): DMR6:106624301
gcctcggcctcccaaagtgctgggattacaggtgtaagccactgcacccggcctattttatttatttttttaagagatgaagcctcactctgttgcccaaatgcagtgatgtgatcttggctcactacaacctccacttcctgggttcaagccattctcatgcctcaacctctggagtagttgggattacaggtgtgcgccacgtctggctaattttgtagaaacagggattcatcatgttggccaggctggtctcaaactcctaggctcaagcgatccacccaccttgcctcccaaagtgctgggattacaggcgtgagccaccacacctggcccatatctttttatttttaagactatttacaggccaggtgtggtggctcacatctgtaatcccaggactttgggagaccaaggtgggaggattgcttgagttcaggagttcaaaaccagcctagagctcatctctactaaaaattttaaaaattagccaggcatagtggtacatgcctgtaatcccagctactcaggaggctgaggcaggaggattgcttgagcccaggagtttgagactgcagtgagccatgatcacaccactgcactccagcccaggtgacaaagcaaagctctgtctcaaaaaaaaaaaaaaaagaaaaagaaaaagaaaaagaaaaagaatacttatataaatatcagctaaataaaactgaaaacattcttttaattttttggttcaagtaaatttgctactctataataatccagagtaatttattacatggcttccatatacaacgtga

SEQ ID NO: 1043 - DNA, 3200 bp, Homo sapiens
  misc_feature (1)..(3200): DMR6:106817701
gctattcgggaggctgaggcaggagaattgcttgaacccaggaggtggaggttgcagaaggaactctccatatgtaagtgtagttgcttttcctggccatcttaactaaacttttactcacagcatttttccttggttggagaaaatatgaattctccaccttgtttcacctcagagttgtccctttaaaaatccaagtttagagttgccaagctgacaactgtttagggcagggaacaggtaatcaagagactggtgatctcaaacgaaaaagagaagcttaaaaactggcaaatgatagaaggagaagatctgtctgtctgtgtatttatatgtgttgtgcgtgtgaagtttacataaaagctctaattaattggcttaaagcaaaataagtactcaaataaaatattttgccaaaaaaattaaaaactttaatgtcttttagttcacttgatgttagtaatctttggtaaagacagttttaacgattattaataagataaaataggctgggctcgatggctcactcctgtaatcccagcactttgggaggccaagtcgggtggatcacctgaggtcaggagttcaagaccagcctggccaacatggtgaaatcctatctctactaaaaatacaaaaagttagccgggcatggtggcaggcacctgtaatcccagctactcgggaggctgaggcaggagaacctcttgaacccgggagccagaggttgcagtgagccgagatagcaccattgcactccagcctgggcaacaggagtgaaattccatctcaaaataaataaataaatataaaataaaataaaaatgtcttcaaaatctaggtattcgttctgcaatgtctgcttctattagggtagaaaagacaaaaaagaaagaaagaaaagaaaaccaaaatctaggcatttggtctaaattagagcgatcagatactgtctttactagatgctttaaagtcatgaactgcttctctgactttcgacaattgttcaacttgcctgctttagagccatttgattctaaggaaggcctggggacatgtggagttagacatgtcccctagctatgctagaaagagtcagacattatctgtggttctgtcctgtgtcctagactctgcacctgatacataattacaattatgtattgtaattgtaatttagataattgtaattatctaaaaataaaaatcatgtgtttttggtaaaaaggcatggaaatatatatggttgcttttaagagaaagtaattttgtctaatttagagggtttaaagattgttttaggttaaaagagaataaaactgaaggtttaaaaagttgtaaaagatttgtaaaatattaatcttgtaaggaaatttctatgtgtgaacaaattggccaatttgaaggggattatttagtttttctgtggactgaacattaagacaaaaagcacactgatgctgggccagaatctgggcccctgtgtctaaataacagtgtttttgtggagcattaatctgctctctaattaaaaaaaaaaaattatagggctgggtgcaatggctcacacctgtaatctcaatactttgggaagccgaagctggaggatcacttgggtccaggagtttgagaccagcctgggtagggagaccccgtctctacaaaaaacttaaaaattagctgggtgtggtggtgcgcatctgtagtctcagccactcagaggctgaggctggagaatcacttgagcccaggaggtcaaggctgcagtgagccttgattggatcagtgcacttcagcctggacaacagagcaagaccctgtctcaaaaagaaaaaagataactttacaacgctttacaattataattattcttgctgtactttatgcaaataatcagcccaagtatattaagactaagtcttattttgcaaataagtgtgtcctactatgatttgtctttaataaaaatgaggactggggaaagaaaaattatatttcagaaagaagctagagtactcatgttttttgattccagtcttgtctgttgttttcgaaggttttcaaatattattttctacaagttggattgaatcttaaattctttccaggttacaagtctccaaggtaatgttttcaaatttttcttctatttttctgacttcagcataatatgattgctactatctttttcccgaggtccaatgagcttaagcttatttctgttggtatagctgagaagaatgtgtgcaagtaccactaccttccttctctgtagctaaagatgctttgagtctaacatctggatagattatgctcaccattaatgtttgtttttcttctgttaccatagaaatacttattaaaagtctgtttgccttatatttcaaacaacaggagactggttttccagtctattcacttaaattccaaatggcatctgatctcttcttataagcattattaaactgggctttagcgttttattaattatcactggataggatttgatttttaaataattatttcttatattcaacagggatgcagacagttataaaagtttgtgtcttccaggcttcaacattccatgtcaagctgatagttgtgcaaggattccaaaccctcccatcccagcaagagccaagcccctataaaacattaaatcaaaagatttttgtggcctctagggttgggcgaggacgacaaccctgttcagcagaaagtagctccagaagactagactgctgccctttttccttaagaagaaggaggataaaatgtctcagtgtggcatgaggcagaggagaggcagaacttggcttcagctcaccccccacagagcattcctgctgaccacaaaccccacaccactacatcactgccaccataatgtttaaccatgccttttacttaaagaattccaggaactggccttagaagataaccatggttgtgaagtgtcccatctctggaagaaatgctgaacaactgatttacagctttgttgccactggccagaccaccaggtggtccattactcaagataatcatcacaaccagataatgctgctctgcaaactccacccctcatgtgctttgcccagctcagcccacacataccctacccctgatgtcaattcctgcatagtgcctaattaaaaagccatactggctctttctggggagtcagtcaaggaatc

SEQ ID NO: 1044 - DNA, 200 bp, Homo sapiens
  misc_feature (1)..(200): DMR6:107411701
attataagtaatctggagataatttcaagtacacaggaggatgtgcaaaggttatacacaatactacttcattttatataacggaattgagcatctatggatgttagtattggggggtgggggatttctagaaccaatccctcactgatactgaggaataactgtacttcttcttcttcttttttttttttttttttttt

SEQ ID NO: 1045 - DNA, 1100 bp, Homo sapiens
  misc_feature (1)..(1100): DMR6:107874901
gacattagtggaatcgttgaggaaatctgaatacagactgcgtattagataattatgccacatcaatgttaaatttcctgagtataatcattgtagtaggcctatggagaaggtcctggattttgtttttgtttttgttttttttaagagacagggtctcaccacgttgcccagactgctgctgaattcctgggctcaactgatctgcccgccttggcctcccaaaatgctggaattacaggtgtaagccactgcacccagcccaaggccctggttcttaagggatacatgtcaagtagttaggggtgtcatgtcatgatgtctacaagtacctcaaatggttcaggggaaaatacacacgcgtgcatgttttgtacatacatatacagtgaaagataaaacaagtaacagctaaatgtaaacaactggtgaatacgggtggggatctagggaggtttcatgataccatgcttgttaacttttcaataggttttaaaacttaaaagatcagagaggccaggcacagtggctcatgcctgtaatcccggcactttgggaggccaaagcaggcggatctcttgagctcaggagtttgagaccagcctaggcaacatgggtaaaccctgtctctacaaaaaatacaaaaattagccgggcgtggctaatttttacggggtgcacgtatgtagtcccagctatttgggaggctgaggtgggagagcccgggaggcggaggttgcagtgagccgatattgtaccactgcactccagcctgggtgacacagccagaccctgtctcaaaaaaaagatcagaggaaaaaataacatgaagatctaagatgctatttttcacctttccaactagcaatgatattcaaaatgtctgacatgctgagaggtattaggcatatttagacattcattctttctatagagaaataaatatctagcaatatagaccaaaattacaaacatacagagcctccagcccatcaattcgacctctataaatttattattaacctatttcatgcatttaccacttgattataaagggttaaaaaatatgtactaaaaatcaacatcatagggctatcttg

SEQ ID NO: 1046 - DNA, 1200 bp, Homo sapiens
  misc_feature (1)..(1200): DMR6:109249101
tttgagcctatgtgtgtctctgcacgttagatgggtttcctgaatacagcacactgatgggtcttgactctttatccaatttaccagtctgtgtcttttaattggagcatttagtccatttacatttaaagttaatattgttatgtgtgaatttgatcctgtcattatgatgttagctggtgattttgctcgttagttgatgcagtttcttcctagtctcgatggtctttacattttggcatgattttgcagtggctggtaccggttgttcctttccatgtttagtgcttccttcaggagctcttttagggcaggcctggtggtgacaaaatctctcagcatttgcttgtctgtaaagtattttatttctccttcacttatgaagtttagtttggctggatatgaaattctgggttgaaaattcttttctttaagaatgttgaatattggcccccactctcttctggcttgtagggtttctgccgagagatccgctgttagtctgatgggcttccctttgagggtaacccgacctttctctctggctgcccttaacattttttccttcatttcaactttggtgaatctgacaattatgtgtcttggagttgctcttctcgaggagtatctttgtggcgttctctgtatttcctgaatctgaacgttggcctgccttgctagattggggaagttctcctggataatatcctgcagagtgttttccaacttggttccattctccctgtcactttcaggtacaccaatcagacgtagatttggtcttttcacatagtctcatatttattggaggctttgctcatttctttttattcttttttctctaaacttcccttcttgcttcatttcattcatttcatcttccattgctgataccctttcttccagttgatcgcatcggctcctgaggcttctgcattcttcacgtagttcttgagccttggttttcagctccatcagctcctttaagcacttctctgtattggttattctagttatacattcttctaaatttttttcaaagttttcaacttctttgcctttggtttgaatgtcctcccgtagctcagagtaatttgattgtctgaagccttcttctctcagctcgtcaaagtcattctccatccagctttgttccgttgctggtgagcaactgtgttcctctggaggaggagaggcgct

SEQ ID NO: 1047 - DNA, 1500 bp, Homo sapiens
  misc_feature (1)..(1500): DMR6:113850901
aggttctgtgcctattacaaccatttgagctcttattggattcctagatggcagatagacttcaatgaacaacggctaacacactattgaactttattttccaaaccttcctgagcatcaatttccaaatctgtaaaatgggaaaatgatacaagttcaggttctgttggaagggtgaaacacaagcctagcggactcacacagtgctgtccctggtacagagtaggttatcttccctccctcctcctctttatgtatatctgtatgaaataatataggattaactgacattgtgctttgtaatagcactgtcttttaatctatattctatttttgtgcaaatattgacttatagatataacaaaattgggcataggttaaaagagtgaatggctggtaatattaaagaggatgtagaaagatatatttgatatattgattaagcatccttgagatttatcaacctcaaatgggccctcattactgctctaaagtcttaccatgcccaaaagtctcaatcctatgcctcccagtcattattccacaccttctataaggtcatcaaactgcaactctcccttttcttctttcctcttagctgaatagaaaccatcagagggaaactttctcatcttcccaccagcaaatctatagccatcctcttgttctctcattacagaatattttaaaaagcagaatgtcttttaaaacccaatttttcagcatgtgccctatatccccatcccttcctgccttctcagaaatgtttttccattctttattccttttcctcttgtatcttcattttcctttctactgtattagtttccagatcagttaaatgtgctctgatgccttccatccaagacagcataacacaagccaaaaaaacattaagtgggttgagcattccttatctgaaattcttgggaccggaagtgtttcagatttcagatttttttgaattttggaatgttttcatatacataatgagatatcttggggatgagaacccaagtctaaacacgacatttatttatgtttcaaatatacttataaacatagcctgaatataatttcatacaatattttaaataatattgtgcatgaaacaaaatttgtgtacattgaaatttatgtacattgtgaaaaaaatttgtgtacattgaactactttagtaccctttgtggtgtgcttgcatgggggaatctggacgtgcaaagaaaacatatattgcagctgacaggggctggggggatgttttttctccttggagacactgaataaactgtgtgtcatgtatgtgtgtttttaccatgacccctcacatgaggctagatgtggaattttccacttgtggtgtcatattaacactcaaaaatttcagattttggatttcagatgttcccatcagggatgctcaacccgtcccagccctctccagctactgccttgtctccctaaacctttactgagtccagctttataaagaggtgact

SEQ ID NO: 1048 - DNA, 200 bp, Homo sapiens
  misc_feature (1)..(200): DMR6:114280101
aagtgagagttttccaggataaagatgtgtgagagagtgggggatgaggtgtgggggaagatgttggaaaaaaggtattccaggcagagggaaagaaaacacaaagaatgtggaaaaggtaaaattgttcagggtgatttcacttgctcctgagcacaatgggatactctaccccaggatacagggggtgatacagggca

SEQ ID NO: 1049 - DNA, 200 bp, Homo sapiens
  misc_feature (1)..(200): DMR6:115453801
aatacaaatcaaagagcagattctttaaaaaggaatccaaataagattaaaaactaccaactaatataatttgtaaaaaaaaacagagaatgcagaaacacacaatagagaatgtgtttgcaaataattacagatttcagaaaaaacaagagcaatatgagactcttgtctttatctctacaaaaatagatgcagcaact

SEQ ID NO: 1050 - DNA, 300 bp, Homo sapiens
  misc_feature (1)..(300): DMR6:116616001
ttgttacctgcacctccgagattaccaaggtcagtctcttcctccctctctacccctcactctcctctctccctccctcccttccttcctccgttctttccttccttccttctctctctctctcacacacacacaccctccacacacacgcttcatgaatacactgtccctccactaacgcacgactcgctcctcacagcacaacttggatcagtctcagacccctaaaggtctctcgcatggggtcgccattcttcctactttgtgctcaaggcgcaggatctggagttctcggtttcc

SEQ ID NO: 1051 - DNA, 1100 bp, Homo sapiens
  misc_feature (1)..(1100): DMR6:120638201
atctcattgtggttttgatttgcatttctctgatggccagtgatggtgagcattttttcatgtgttttttggctgcataaatgtcttcttttgagaagtgtctgttcatgtcctttgcccactttttgatggggttgtttgtttttttcttgtaaatttgtttgagttcattgtagattctggatattagccctttgtcagatgagtaggttgcgaaaattttctccctttctgtaggttgcctgttcactctgatggtagtttcttttgctgtgcagaagctctttagtttaattagatcccatttgtcaattttggcttttgttgccattgcttttggtgttttagacatgaattccttgcccatgcctatgtcctgaatgctattgcctaggttttcttctagggtttttatggttttaggtctaacgtttaggtctttaatccatcttgaattgatttttgtatgaggtgtaaggaagggatccagttgcagctttctccatatgtctatccagttttcccagcaccatttattaaatagggaatcctttcacgattgcttgtttttctcaggtttgtcaaagatcagatagttgaagatatacggcgttatatctgagggctctgttctgttccattgatctgtatctctgttttggtaccagtaccatgctgttttggttactgtagccttgaagtatagtttgaagtcaggtagtgtgatgcctctggctttgttcttttggcttaggattgacttggcaatgcaggctcttttttggttccatatgaactttaaagtagttttttccaattctgtgaagaaagtcattggtagcttgatggggatggcattgaatctgtaaattactttgggcagtatggccattttcacgatattgattcttcctacccatgagcatggaatgttcttccatttgtttgtatcctcttttatttccttgagcagtggtttgtagttctccttgaagaggtccttcatgtcccttgtaagttggattcctaggtattttattctctttgaagcaattgtgaatgggagttcactcatgatttggctctctgtttgtctgtta

SEQ ID NO: 1052 - DNA, 600 bp, Homo sapiens
  misc_feature (1)..(600): DMR6:121198701
agatcccgccactgcactctagcctgggcgacagagcgagactcttgtctcaaaaataaaaaataaaaaaaagaagtgatcatcgaaggcactgtagataaaatggagggtgaactaaagacataactctaggagacaattcaaattgaaagtttaataaaggaggaaaataaagaattagcaaaaatgaacgacacaaaaggaatcccaaaataaaagagaataaagtcactgatgctgccaaaaagactgtatctaagaaagtatggcacttagcaaagacgcaataaatattttctgaatgaatgaacaaaaatgaaaggaatacatttcattaagtaggcagaatataaaatgctacagagagctcaagaaaattaaatcataataagggtgtagataaaaatacataaggttggaaaatgtgcctatcctttgacttagcaagtgtatttctacagatttgttgtggagcaacaattataaacatcaagatatttatccatagatatttaaaaataaaaaaacacctacgtgtgtaaaaacagaaaattgagattcaatcgtgtactggaatattacttaatcctttaaaattat

SEQ ID NO: 1053 - DNA, 200 bp, Homo sapiens
  misc_feature (1)..(200): DMR6:123397501
attgtctctatgaaacagtaagaaatggcacagaatatctaactataaaaatgaaaaaaaatccaattgactgctttgaaatggaacattaagctcagggatctatttcacttttaagatgacgcaaaatctctttttctctttgatcactgattatgtgttattcagaaagtgtattaactctaaattttagaactaga

SEQ ID NO: 1054 - DNA, 2200 bp, Homo sapiens
  misc_feature (1)..(2200): DMR6:124060801
aaaaattggaaaatatgcaacacaatgttctttctgtgatattgtcaaatgctttggcataaaaatattcagccactaaaaataaaatgtcatccagcaatggaaaaatactacaatacgagaaaaaatgatggataaaaaaagagcattgctataatgattaatgataatatggctttttattttaagtacatgcagtttaggagaaagctttcagcatgtataacatgttgaaaataagtgttcatgtgatttgatcaaagggctccaatctctgagagacagtaaataatacagtatttaggaaattgctttaaatatttatttctctgattggctaagattgctcacaaattgcagcatgttttggatattgtaaaagcaagtctgaataacacatgcatcttgaagataaataggagtacaccaccatatatgtgctggagttggggaaaatattctcagtaataatgacattctcaaaggtgtttttaatgattgactcctaaacagtttacaatgttattatataatcttttttattaacccttacagctattttatgggaaaggtgggaagcaaggtatcttttcaaaactttctcaaaaagtcttcaatttttctctttctctatatttttatcaaaaattagacaatgcatgtgattctgtagggggattccatttgagatgtaatttaaatgatggaaactttcttacactatgagtgtcttatgaaaaggcaagaagtcttggtattcaaagagagtaaatgcagaactgttcaaatattccttccctctctacccttttgatcctgtcatgttttaacaatttttaaaggtgatttaaacattgggggatgcactacccctaagcactgtctgtttttagagtactcatactgcttagcaacctttgacaataagccataccaaagaagagatctagtatgaaaatctcagaagtgagtccacaaatacacatcaaaaatagtaatctccagagcttttaaaaaatactttttcacgtaagaaaacttagaaatgatatctgtaattaatccttgccctttaaaaaatgttcttcattgatttatcattcttaagatgagcaaagtagagctagagataagagaatggagaaaataacaaagaaaaagaatgtgtgttttaacacaaacgtggtgcagaaactgagatatctttagcaatgggaacatttttctaccaaccaaataaaaccaatgttatacttttaaaaccgtttctttcaatctgttgctcaagtaggcttgttcattacaatgatacgtaaatataaataaaaacttaagtataaacgtgaaatttgctaacctatttttttcaattaagtttatggcctacattgttttgtatatttaatatagtgtttaagattaagaacataatgttttagcataccttcttaatgatggaaataccatttattgttatataaacccccagtataggacattttgttgatattataaatattgtgacaatgagtagcttcatgtctgcgcatttgcttatgtctcaaaaatattttatatttccctagaatagagttccaggaatagctgatttcagtttttgttgttgttattgttgttgttattttgagacaggatctcactctgttgcccaggctggaatgcagtggcacgagcatggctcacttcagccttgacctcccaggctcaggtgatcctcccaccttagcttcctgggtagctgggatgacaggcatgcagcagcacgcctgactaatctttgtattttttgtagagacagggtattgccatgttgtccaggctgggctcaaacgatacacctgcctcagcctctcaaagtgttgggatacaggcgtgagccaccatatctggccagattattggtagtgaatcctctctatgacttttgactgataattccaatttctattccaaaataatttttatcattggcagtgtgtgatagtacatacttagtgggtttctctatggtaggcactcttgtgaatgaacttttatgtaaattagcacatttaattctcagaacaatttttaagatatttggtattatcaggctgggcgcggtggctcacgcctgtaatcccagcaatttggtaggccaaggagggtggatcacgaggtcaggagttcaagaccagcc

SEQ ID NO: 1055 - DNA, 500 bp, Homo sapiens
  misc_feature (1)..(500): DMR6:124521401
atgatttttcttctttagtcatcatattttaattattcatgtgcattcatttatttaaatgttcctgtgtcatctagccttgtatttctcacagtgtctgaaatacagtatataattagtaaatatcttttcagggacaaatacgtgaatgctggatactgtgctaggtgctctactgttagaattttctatgttttatgctttatttctcttctctataagtacaattttcatttctgcaatatactttaggttgcaagaataatcgattcttttcatgcgtaattgatggtatgagtttactcttataaccctgaaatcaagaacaggtaaaatatttggggcatgtgctctattactcccttgatgtgttcagttgtaatgagtgaattatggacacagtatatctgtaatactaaaaactccatacagataaaacaccctttctcagcaaataaattttttagatatgtctgtttatgtctcggtgcatggatata

SEQ ID NO: 1056 - DNA, 400 bp, Homo sapiens
  misc_feature (1)..(400): DMR6:125484501
atacagggaacagaacaaagaaaaatgtgtatgtgggataataattactaaggaagagggggagtgggataggaagtgctagggagagtaagattgacctgcatcagtgaggaaagacctgatagaggtgagggatttgtccaagcagggaaggacatttgaagcagagggaacagcaagtgcaaagggtttgaggccacaaggtgtctggaggctcaaggaacaaggtggaggatgtggctgtagctgaggaagaagatggggaagagagggagccagatcctgtgaggcttgtggttcaacaggaggaattttggcttctacactcagtgagatgcaaagccatggcagggttgtaagcagaagcgcagcatgaacagacttctctttcaacaggatc

SEQ ID NO: 1057 - DNA, 300 bp, Homo sapiens
  misc_feature (1)..(300): DMR6:126147501
gaaaagctgcattccacgaaccaggaaacacaatctagtgttcatgatggctgttcgtccatgtattaaggaatttgtactgagtggtcaactgcagtaagtgctactggaatgcttcgtccctgcggtaccttacctcatgtcctcactctccctcatagtcacagactgtgaaggaagctgtggaggtggggatttaaaaagaagaggaaatcactggagagccagagggctgtttaaaattctacaagtgaagcaggttaaaaacataacccagcatttctctctttgcaactagat

SEQ ID NO: 1058 - DNA, 700 bp, Homo sapiens
  misc_feature (1)..(700): DMR6:127049901
caggtgatccacccgcctcggcctcccaaagtgctgtcattacaggcatgagccactgtgcctggccaatttttgtatgaatttttggatctcaatttcattcattttggctctgtttttagttatttattttcttctgttatctttgcggttggttttgttcttgtttttctggctcttttatgtgcaatgttagatgattaatttgagatttttctaacattttaagataggtgtttcatgctataaacattcctcttaacattatttttatagcatcctgaagatttgggtatgttgtaactctattttcatttatttcaaagattttttaaattcctgcttaactttattgttaacccaaaaatcattcaataatgagttctgaaattgaaacagtaagaaaaaaaaaacctaccaataaaaaaaaaaaaacaaaaaacctggacctgatagattcatagccgaattttaccagttgtgaaaagaagaggtagtaccaattctgctaaactagtcaatgaggaggaggaacttttccccaactcattcggtgaagccagcatcactgtgataccaaaacctgccaaaaacacaagaagaagaagaaactaccaaccaatgtcgctgaagaacatacacacaaaaattctcaacaacatactggcaaaccaaaaccagcaacacatcaaaaagttta

SEQ ID NO: 1059 - DNA, 900 bp, Homo sapiens
  misc_feature (1)..(900): DMR6:128202901
ctataaggccagcatcatcctaaataccaaaacttgacagagatacaacagacaaaagaaaacttcaggccaacatccttaatgaacatctatgtaaaaatcctcaacaaaatactgttaaaccgaatccagcagcatatcaaaaagcttatccaccatgatcaagttggcttcttccccgggatgcaaggttggttcaacatacacaaataaataaatgtgattcatcacataaacagaactaaagacaaaaaaacaaaaacaaaaacaaaaacacatgattatcgcaatagatgcagaaaaggacttcaatggaattcaatatctcttcaggttaaaaactctcaataaaccaatggaaaagacttcaaaacagtaacagccatatatgacaaacccacaggcaaaatcggcaatatcatgctgattgggcaaaagctggaagcattccccttgaaaaccagtacaagacaaggacgtcatctctcaccactcctattcaacatagtattgaaagttctggccagggcaatcaggcaagacaaagaaataaagagtatttgaataggaagagaggaagttgaattatctttatttgcagatgacatgatcctatacctagaaaaccccatcacctcagcctaaaagcttcttaagctgataagcaacttcagcaaagtctcaggataatcaatgtgaaaaaattgctagcagtcctataccccaacaagaggcaagcacagagccaaattctgagtaaactcccattcacaattgctacaaagagaataaaatgcctagaaatacagctaacaagggaagtggaagacctcttcaaggaaaactacaaaccactcctccaagaaatcagagaggacacaaacaaatgggaaacattcc

SEQ ID NO: 1060 - DNA, 100 bp, Homo sapiens
  misc_feature (1)..(100): DMR6:128343101
cttttagaatcaagaatgtacaaaagatgtctactatctttttatttaatgttgttctggatatcgtaacgcagtaagacagatgatatatatatgtcta

SEQ ID NO: 1061 - DNA, 1300 bp, Homo sapiens
  misc_feature (1)..(1300): DMR6:128893901
actggattctcatttctgcctctgcgttcaaattattacatgttattttagtttaaattattttggtttaagcatattaagaaatatataacaacaaacatagataagctattggaaaaaagaggagtctgtcagtgccttttaagatagctgtaaatattctttgattctataccaaaactcagtaagtggtagttttcaaaagattggctgcagtgtggtatctgaaactgcatcaacgatatttttgtacgcttttatattaaaatctacggatctatcttacacctggaaagaattttacccatgtgtgatgttatagtatcattcatagatcatttggaagatactgatttactagttatgcagatcagccacaacttgacagattttcttataaaatattttaattacattttttatgactattgatctcaccagaaaagtccctaaatattagaagctgttaatctcacaatggtagagacaaatttttcagaatttttattttcatttgtaagtttctgtagttattgacaaattttgttatttttcttgaaatagttactttattcattcttaagaaaatgtttatcaaacaaatgagtcttaaaaaccatagttagatcctttttgtagtacatagggtattccacgaaaaaagtggctagtttagcttgcagctgaaaacaactgtacaaatgcttttcctcaaatcaaccatcatgcttcagtatacagttgatgttaaaaagatgtacccaagatttaataaatttaatcattgttactacttcatcaagtacattcatctgtgaaactagttgtttttttcttctgggagtgtgtggtggtgaaaactaaactgaccactagcatggtttagtacccctgccttgatttgtgctaatgtaccatcagtgtttcccaccactattgcttttgcaccatcagtgcacatgtcaacacaatgaaaaggcagataataattaaatcttgttactaaaaggatttttgaacttgtgtacctatggataatgtattgtggactcccagggattcacagatctttctttgagctctacagggttggactacagttaagttcctcactgcctgcctcttcaccaattctacaaaatctatagccatatgaaggtaaattttgcaatcagaaaaagccaaaaccacttcagtttttacctcaggtctagtctaggagagtgataccatttctttttaagggggaagaaatccagaaaagcttcttctgtggaaaaagcaggaagtgttaaaacca

SEQ ID NO: 1062 - DNA, 800 bp, Homo sapiens
  misc_feature (1)..(800): DMR6:129729201
tgattagtcattcctgatcatcacatgatgctgaacttcatgaagtacaacggctaatgtgtatggtcttcccgttaagacagaggcagcctagtagagacttggctttggaaaaggaagctagtattaggagtttatctttactgtttagagttgactttatctcaaaggatgtcagcagcatatatcatgtgacagcggatcagtcacgacacctcatctaaatgcagtcatcatagtacgtggtcttcccactgccttgcctaccgtccataaaaagagggtcactctagtccctgacagccatgccttcataccatccacctccagccagaactaataattcaggggtagcagtgtgaaaaagaccagcagcttcaggaattttgggttccagaactgatatggatactaattagctctgtgcaagttaacttttctctgtctccatgtcctaaacaatgaaagggctgattagaccatatgagctctcagctcccttccatcttcagtgattctttgataataatataagttatccaaatggtatcatttattatgattgcttactgtgtgccacgcaccatactaagtgcttttcatttatcatctattttaatccttgcaaaaagagaggaaaatgacattatcctcactttatagattaaaaactggccgggcgcagtggctcacgcctgtaatcccaacactttgggaggccgagtcaggcggatcacgaggtcaagagatcgatcgagaccatcctgactaacatggtgaaaccccgtctctactaaaaa

SEQ ID NO: 1063 - DNA, 300 bp, Homo sapiens
  misc_feature (1)..(300): DMR6:130382201
taggaggttggtggggggcagtatgaaaggccatgtaagtgaagatctggcacagtgtgtggcacaaagtggacactgcccagtgttgttcccttccctttcggctcgcacttgcctctctccattccgtctcacctggttacacttgccctgtgcacatgcatgctctacatgaaacagctgttagctctgcctggatgggaaatccttgctggggaggcatttttcattcttctagacccaccttgaattagtgcatctctttcgtggagtcttctctggcctttctcaggagagttg

SEQ ID NO: 1064 - DNA, 700 bp, Homo sapiens
  misc_feature (1)..(700): DMR6:131741601
tgaagaatgaagaggatttagtaactgattggatacaagagcccccaccccaaaaggaaactcaaagatgaatcagatttgaatgttagtaattaggaaaaaggcagaaagaggaaggttgggaatgagaactttttggcaggtagataggataagctaaggataggcattttaagtttgtggaaatgggcattgatgtggaaagtcccataggcaattagagcctgagaattgaagcttgggatctaggccagattgggattcatctatattctttcaggtgttcaatgcatgagtgccttcaccatgctgtgcactataggaggtgctcacaattagaaatccagtaaaatattagaagaaagagataagtgatgtaagagagggacagataaactgctgtagtagtatttcaaaggagaattacttcttgacagggagggtgacatttcagttgggtcatgtagatacgattttacttgagtgtttaaattgtctaaagaaggtggccaagtttagaggctgaatagtgagccactcactattcttaaaatgaggaagaagagtttctgaacaggaaactatcaggagatgttgttgaattgaatcccttcctactttttctgtcagcattttgtttggttgagacaagggtaagccattattctttacttccttttccaatgacagacatcaatga

SEQ ID NO: 1065 - DNA, 400 bp, Homo sapiens
  misc_feature (1)..(400): DMR6:131967801
agtcctctcttgtatctattttgaaatgtatattacattgttgttaactataatcaccctgctctgctatcatacactagaatgtgtttcttctacctaactgtatgattgtgctcattaaccaatgcctttatctacccccagccacccactaatgtgatttttaccaagagtttcatgtctttatatctttgtagagtctggccaacttttacccgttcatcaactctcagtgcccatgtcactttctttttgtggctctccagactcagctaggtgcttatgtttccacagcctttctctgactgtgtggggatttgtctgtatacctcaccagatgagagcttcagaagagcagaattgaatcattcatctccatgtcttcagtgccaacctcaat

SEQ ID NO: 1066 - DNA, 700 bp, Homo sapiens
  misc_feature (1)..(700): DMR6:132099001
aatggcttgagaagattatgctagagattgaagcagatggaagattctagaaacagaaagcattcttttcattggtgtgagtcttgaatataaatggaaatcagaggtctgtaatagcaggccagtgtggataaggcagtaaggttttgagtctgaggagatggctgggggcagtttgtagacttattgtcagtccagtgtagaatttgagaatatagccagggcttaaggttccagtttcaaattaaagacaaaagaaatcagcaataccaaaatgaagacagaagcctgggaattgtgcctcaagatctggactgagaggacatttctacacaacagctcccctaagggcagggctatgaccgttgttgctaagctgtcaccatctctccttccctattagactggcttctgtggggtaattaaccagtacaaggatgtatgggaagctcttctgagaagacctcacattaaaacaaagtgttgttattcaagctgggtcatatttgggcaccttgttattacagctttgaggagggatatcaaactgtcatattcacctatgagtttaggatcagtggagggaagagaacagaagggccacacagaaggggaagctcaggcacagatggccagcagccaggctcgctgtagaggtgagattatcaaacatgaccatacaaaggctgcagaggcaaga

SEQ ID NO: 1067 - DNA, 1600 bp, Homo sapiens
  misc_feature (1)..(1600): DMR6:132393401
aagcactgaaagcaaggaaggagagggaagcaaggaagccagcttagctgggatcagctgggagcccggagaggctccttaatgtgaggaaagggtaagtgagagacaccaagtggtccacattcctgccacagaattctacaatgctagccataggagagcccctggactctcatgggccctgagactcacagagaactgcctagagatcacataatggcattgttctagacagggagctcatgctgagtcctacaaacccccaagtcctaagcagctgcagcactgtgccattatgaaagccccgcccctgccagaatgtgttctgcctgggggcccaagagcccctgcacctccatatccctggagcccaactgacactcatcacccacagacaccactgttgggctgaggcaggagccactggaagtgaccttgccaccccaacaaaaaggcagctatacattttcatgtgccatctgcaggactgaggaccagcttgcccagttcatcatggacatcaccaacaccagcactgaccacttgggttccagaaagttgtcccaccacagctactgccattgccacagcatacctgctacccagaagcatgataacctgcccatcctcctgacccaccatgatattcccagcacctggagaggctaatgctcaacccactgctgccaccactgaggcccaaagactggcccacctaatgtcctagttcccagcaaaacttcaccacaacctccactaataatcacaccctaaaccactgaggaaatcacagacaccactgacactgtttacagctggaaaaattacacagagactatacaaccacccacacctagagtcaaggccaaagtgccctacccagccaacaccgtagataaatcttcaagaaatgtcatcccctatgaaagcaaattcaaaaaactggagcaactgttatatcagatgcacaaatgatcaatgtaaggacacaagaagcatgaaaaaataaggaaatatggtatctccaaaggcacaccataattatccagcaacagattctcatcaaaaagaaatttaagaaataccccccaaaaaagaattcaaaatattgattttaaagaagctcagtaagacacaacagaatactgaaaaataatgcaaagaaaccagaaaagcaattcaggaaataaatgagaaatttaccaaagagatagatgtcataaaaaaagagaccaaacagaaattctacaactgaagaattcattgaattaaataaaaaatacattctaaagtttcaacaacagactagatgaagcaaaagaatctcagaacttgaagagaggtattttgaaataactcagacaaaaataaattaaaaggataaaaaaagaatgagcaaagcctatataacatcataaagtgaccaagtatttgaatttaggatctgagaaggtgaagagaaaatgaaggagttagaaaacctatttaacaaaacaatagataaaaacttcccaagtcttgcaaaaaactttagatatccagaaacaagaggctcaaagttctccatatagatacaattcaaaaagttcttctgctcagc

SEQ ID NO: 1068 - DNA, 900 bp, Homo sapiens
  misc_feature (1)..(900): DMR6:133137601
tagaaggtttctgcaataatttctatcttcagaacatatttagaacagtcacaatagttggctctgatggaccatgatttcatatacacagtttatttttctgccttattagtcttgagatcaaacattcatttaacaaaaaaaaaaaaaaaaagattgaattctgctgcctgcctggaagaaagtcaaagcagaatagctgccctcaaaggctcatgatctaatggagaagactaaaaggtaaacaaattcggtctatcaaaagtgtaagcagagtagctaaaacagtgtgccttgggattacagaaaaggcaggccctcactgcttggtgaatcggtgaggaaacgacaaaagtaatttgaactgaatctcaaaggataagcgcgtgtctgtctgttatgtaagagaggtagaggcttgaaacccaggaaaaagcaatgtttgcccagtgagcaggctttaaaagttatgactttttagggggctccacgttgttccatgtcatgggaacagtagatgtatgtggagaaattacaagagaccacatcatcaaaaacgttgtatgacatgccagggagctgacttttttctcagaccatggaggctttgaagaattttaatcacggaagtgacatgattctatttattattttttttaaaacagttttattgagatattattggcatacaatagattattttttacatggaattctataaatccatataaccacaatcatgataatgagcatatccatcactcccctaagtttccttgaggctctttataatcctttccccttctctctctcccacaatcaaacccaggaaaccactgaactactgatctgctttctgttgctgtagattaatgaacatttcctagaattttgcatgag

SEQ ID NO: 1069 - DNA, 300 bp, Homo sapiens
  misc_feature (1)..(300): DMR6:135247501
tatccagggtttcagccacacactgtggggcttgggacataatccgccaaggataagggtgtgagggacaggactagctggccgactaagaatccctaagcctagctgagaaggtgaccgcatccacctttaaaaacggggcttgcaacttagctcacacccgaccaatcaggtagtaaagagagctcactaaaatgctaattaggctaaaacaggaggtaaagaaatagccaatcatctattgcctcagagcacagggggagggacaatgatcgggatataaacccaggcatttgagcc

SEQ ID NO: 1070 - DNA, 1100 bp, Homo sapiens
  misc_feature (1)..(1100): DMR6:137983901
ttttgcattaggtatatctcctaatgctatccctcctcattcccccctacctcatgaccggcctcggtgtgtgatgttccccaccctgtgtcaaagtgttctcattgttcaattcccacctatgagtgagaacatgaggtgtttggttttctgtccttgcgatagtttgctcagaatgatggttcccagcttcatccatgtccctacaaaggacatgaactcatccatttttatggctgcatagtattccatggttaaatgtgccacatttttttaaattatactttaagttctagggtacatgtgcacaacgtgcaggttagttacatatgtatacatgtgccatgttggtgtgctgcacccattaacttgtcatttacattaggtatatctcctaatgctatccctcctccctcaccccacgccaaaacaggccccggtgtgtgatgttccccttcctgtgcccatgtgttctcattgttcaattcccacctatgagtgagaacatgcagtgtttggtttttttgtccttgcgatagtttgctgagaatgatggtttccagcttcatccatgtcgctacaaaggacatgaactcaccatttttatggctgcatagtattctgcggtgtatatgtgccacattttcttaatccagtctatcattgatggacatttgggttggttccaagtctttgctattgtgaatagtgccgcaataaacatacgtgtgcatatgtctttatagcagcatgatttataatcctttgggtatatacccagtaatgggattgctggctcaaatggtatttctagttctagatccctgaggaatcgccacactgacttccacaatggttgaactagtttacagtcccaccaacagtgtaaaagtgttcctatttctcaacatcctctccagcacgtgttgtttcctgactttttaatgatcaccattctaactggtgtgagacggtatctcattgtggttttgatttgcatttctctgatggccagtgatgatgagcattttttcatgtgtcttttggctgcataaatgccttcttttgagaagtggctgttcatatcctttgcccacttt

SEQ ID NO: 1071 - DNA, 300 bp, Homo sapiens
  misc_feature (1)..(300): DMR6:138160901
cgtctctcccctattgtgtcattaaatcctattgtttctacccttcaatatctcttgacatactttcctttattccccttctacccacccttggcctaattggtttctagattcctgcagaacctttgttctcccagctgccagtctgcccctctgcagtccatcatcctcacttccaccacaggaacattttcaaagaaaaaggaaacacggggtgccctgtcacactgccttccccaccgcccgcgtgagtctcctggggctcccccttttcaccccaatgagaagccctctgctgcg

SEQ ID NO: 1072 - DNA, 900 bp, Homo sapiens
  misc_feature (1)..(900): DMR6:138315201
gtgactgttgaagctgaaggctcatcaaaacaatgattttaaagaatttgtttccaattaggtcccatgtgatctcctgtgaatcagagttcaaactagtaactgtggatcattttcagatagattaactcatgctcacaccttctgtcttctgtctcagaagaccctgtcctgttctacatctagaattggatatcataccctcaaataggtctaacttctgggtataggttatttcaaactcctttataaaaggacttttgaggggaaggttttttgttttattttgctgttacaaattttgtgggggtggctaggagatttaaaattttcgatggagatgataaacaacaaagtctcacaagttcaggccaggcgcggtggctcatgcctctaatcccaacactttgggaggccgaggccggtggatcacgaggtcaggagttcaagaccagcctggccaacatggtgaaacccagtatctactaaaaatacaaaaattagtcaagcgtggtgggggggcgcctgtaatcccagctacttgggaggctgaagcagagaatcgcttgaacccgggaggtggaggttgcagtgagccgagattgcgccactgcactctagactgggtgacaaagcgagactgcatctcaaaaaaaaaaaaattctcacaagttcagattagttgtgaggaataattacaggaaagaatatctaatatagagaacaattaaagtattgaaagttggctagagattatctaatagaggtttcagtttaatgattagataagaacaatttttacttagcattttaaacctcaaacccagataattataagcagaagctaatgttgtttatctataatacattcttttaaacagttgtaaacggttgggtatg

SEQ ID NO: 1073 - DNA, 2800 bp, Homo sapiens
  misc_feature (1)..(2800): DMR6:138737701
agtgataccattgtgggggaaatgctgattgtgggaaggcatgaagaagccttctgaaatgctagaaatggtctgcaacttgattgagcagtagttacaagggtgtagaagtatgtcataaacatatatcaagctctacgtttagatgtgtttactttgctgcatgtgagttatactttgggggaaaaactaaataaacaaaaaaagcgggggaaatgaaaagaaaacgatcctcatttcctgtagctgtagagaaatatatgctgaaaaatcaggcccaggattcaacggtaagagcagcaaaactgcaaaggagactgaatgcacagcctcaaaaagtctatgccgggctgggcacggtggctcatgcctgtaatctcagcactttgggaagccacggcaggcggatcatgaggtcaggagatcaagactatcttggctaacacggtgaaaccccatctctagtaaaaatacaaaaaaattagccaggtgtggtggcacgcacctgtagccccagctactcaggaggctgaggcaggagaattgcttgaactcgggaggcagaggttgcagtgagccaagatcgtgccactgcactccagcctgggcaaaagagtgagactccatctaaaaaaaaaaaaaaaaattctatgccaaagctgaggacttgataggaaaagtgatttcctgaaagctgacatagtgacatttgggtagataacctcagcatctggaacccacaaattcccccgaatcttctgccagaagaagccgtactctccttcttgctagagaggaaaattccacaatccctggaagctttgcagaaacctcacctgagtcaggtgtcttggaggacaatgctttttttctgtccaagatctgccaccacatccttcactgccttaggaatagcaagggtctagagggaaaatgcatttcctactctagaaggaaatggcttacacaatcaaaacaattacaggaccaaaataagaagtactagcaagaatggatgaacatgtatgagagtgaatctcaagggtattgaaccaggagagtgatgaggggataaaatataaatctgtgcagtggccaggtgtggtggctcacacctgtaatccagcactttgggaggctgaggcaggaggatcatttgatgtgaggagttcgagactggtctggtcaacatggtgaaattctgtctctactaaaaatacaaaaaaaaaaaaaaaaatgagctgggtgtggtggtgggcacctgtaatcccagctcctcaggatgctgaggcatgagaatcacttgaacctgggaggcagaggttgtagtgagctgagattgtgttactgcactccagcctagcgacagagtgagactccatctcaaaaaaaaaaaaaaaaaacggtgaaaagcttgttgacactggagcactctcctatgacttggggtttagcctcctggaaaaaaaaatatggagtcatacttttttatttttctttttatttttttgagacagggtctcaccctgtcacccaggctggagtgcagaggcgtgatcatggctcacttcaacctccatctcctgggctcaagccaccctcctgcctcagccccccaagtagctgggaccacaggagtgtaccaccatacccagctaaacattttcttattttttgtggagacgggatcttgccatgttgcacaagctggtcttgaactcctggactcaagcaatcctcctggaattataggtgtgagccactgcatcccaccagagttactctaatatgctgctcttgactcttggccatgttgatgtcctatgtaaatgaggtggagaagccagaactactttggcagaatattgaggagggagtaataaggcacatggcagtgaaaatgttaaaacaaaaaaatatgtattacacttattaaatatgatcagaaaacccactatctgattatatttcccaggaatccctgaaagatatttgcttcactaaagcagtaagaaatgcaccaaggaagtttgtactgggatctttcagaaactcaatgacacatttcttctatacgttgaagagatgcagtcttgaaactggccttctagtatcaatggacgtaataagattctggaatggcagaggccagggagtggcacctaacagaggcaatacggacatcactgctataatagatagcaaggctggaatggcgatcagagtggcttgacctacagacatctgtggtgatggttaatagatcatgctgttcctaggagcaagacagatggatacccaatcaatcaggatgttacttatttaccttataaaataaaacacaaaacaattgaagagaagactgacatcggctgcaaagtggaaaaatattgtggtctctcacccagtttttagccagttcataggtgacagcctgtgatcaaagaggagtatatgtctccttgaggaaggaccatctaaaacctgctcaagtatgtacgataaacattcccccaattattccccaaaagctcttgcagccatttactaaaaaaaccgtacactggggaaaggcattttccaggcattttgaggactattacataacagggtctgaactgccaccaaaacaagcaaacataaaatgccatcatagaccactgggtagagaaaggacgtatggaggccaggtaataaatgcagttctggccctagtcctcgttactatgcgtattagtccgttttcacgctgctgctgaagatgtacccaagactgggcaatttacaaaagaaagagatt

SEQ ID NO: 1074 - DNA, 1200 bp, Homo sapiens
  misc_feature (1)..(1200): DMR6:138884101
agcaatctgcccaactctgtctcccaaagtgctgggattacaggtgtgggccaccatgccagccaatgttagctattaatatgattgaaatccatgaatatttcacttggtcttagccgaaagtccagtaatgaaatcagtgaatatttgatttctgtaagttagcattgctgacatctttcaggcatggaaagggaggtaactttacgggtgctctaatagtgataaatgaatacattttaaaacagatattaaggctcagtgcggtggctcacacctgtaatcccagcactttgagaggcctaggcaggtggatcatctgaggtcaggagttcgagaccagcctggccaacatggtgaaaccccgtctctactaaaaatacaaaaattagccaggcatggtggcgggcacctgtaatcctagctacttgggaggctgaggcaggagaatcgcttgaacctgggaggcagaggttgcagtgagccgagattatgccactctactccagcctggatgacagagcaagactctgtctcaaaaaaacaaaaaacaaaaaaaatatattaagtacagtagaatacctgtataataaatattactatggaaaacgtaattaacagaagtattaaaggtgaataccattaatagtcaagatcttactatactgaaataacatttactgtgtgacagccactttatggataggattgttttttttccacaccacaacattagagatgatatccatgttacagatgagaaaactgaggctcagaaaagttaagtaatttgacaaggttatatattcgatttattctaattcaaatccaggcccacctggttgcaaagtacattcttatttgtctatactgattaagttcaatgaatagggtcaggtctatgtataattaacacacattcttttttttttttttttttttttttgagatggagtctcgctctgttgcccaggctggagtgcagtggcgctatcttggatcactgcaagctccgcctcacaggttcatgccattcttctgcctcagcctcctgagtagttaggactacaggcgcccgccaccacgcctggccaattttttgtatttttagtagagacagggtttcaccatgttagccaggatggtttccatctcctgacctcgtgatccgcctgcctccgcctcccaaagtgctggaat

SEQ ID NO: 1075 - DNA, 2300 bp, Homo sapiens
  misc_feature (1)..(2300): DMR6:139441101
cgtcagcagatagacgctcaaccatctgatttccacagaaaacttcattggtcaaaacacaatagtgggaggaaagcaggtagacagagtgtgaaaaaatgagcagaatccgaagttttcaaaatagtcttaatgtcaaataatttcattattattacagttagatcttgtgcatgtgtgtatctgttaatttaattcacgttaccttttttttttttttttttttttgagacggagtctcgctctgtcgcccaggctggagtgcagtggcatgatcttggctcactgcaaactccacctcctgggttcatgccattctcctgcctcagcctcccgagtagctgggactacaggcgcccaccaccacgcccagctaatttctgtgtttttagtagaaacggggtttcaccatgttagacaggatggtctcgatctcctgacctcatgatccacccgcctcggcctcccaaagtgctgggattacaggcgtgagccaccgcacccggccaattcatgttatcttaatgtcattataggtaggagaacattgacacatatgctatccatatgtgtggtgctgtagagaaataaaaattatccaaggagcggccaggcacagtggctcacgcctgtaatcccagcactttgggaggctgaggtgggcggatcacaaggtcaagagatcgagaccatcctggccaacatggtgaaaccccgcctctactaaaaataaaaaaaattagcctggcatggtggcgggcgcctgtactcccagctacttgggaggctgaggcaggagaatcacttgaacccgggaggtggaggttgcagtgagccgagatcacgccactgcactccagcctgggcaacagagtgagactctgtctcaaaaaaaaaaaaaattagccaaggagagagcactgatcacttttaattttgtgttcattgctaagagcaggaaaggctagggaactatttgccaacggcagtgagtggccaacggggcttccaggatcacccaagggtagcccagaaacaataaatattggatctcagagggcatccatgatcaccatataaaaagtgatcagtgtatgttcattgctgagctgagcaattataggagttctcaaacagtcacatctcttccatatgaattattttggttttttttttttcctccttggtaattctcagtaaaacccacgaaacgaaaagagctgtgggcttatcacgagaaggaggaaggaagtgagcagaaagaagcacaggaggcctcactctcctcagcctaaagagagaaaactccagggaacagaatggattgtggcaaggttagaaagagacccaaagcaacctgagatctcaggtgtttggcaaagaggaaaggaagagcctgtaaataggctggggtttgaggagaagccgttggggctaagagtgaggggagggagcttgggtcctcaaacaggagctctttggtcatcttggggccacagaagtcacaagacactgttgggtattgatggtggggaaatgagacaagggcaggtgaccccaaaagctgactgggggaagggttagggattacggttgccttacagacagcaacgggcctgcccatttctcattttcaaattgggctattttagaaagaaatatctttgtgattctcttctgtttagagctgccaaggattcagttcaagaaaggtatctttatggatgttaggatggaaatgttagcagctgggttcttggctaacttagaaggaggggtttggctttttagggtataatgtaaggctggacaacaacttctgaaatagcctgccctgatacctgcccccactcccggaaaagggctgctcacaatttattaacaaatatggctcttattaataattctttgagctagcagagcaatcctagctgattgaaaataattaccagcctctccagttgattaaacagcacatttggattttcatttatatcatcattttgattgaatgatgtgtgtgtacgtggggctgtgtattaacaaggtgtctcttaaaagtaataataagtactcaatgagaaagagttgcatattgctcagtataaaagcaaaaacaagaagtctaaggcaggtgagcaaaagaacaaaactgggacctaaaataaattatgaaaggcagactgtgacagagataaagtctcatgggacgcaatgataaacacatagaaaaatacttatgacgttccaagcatagcatcagaggattgaaaattctggtcagcatcaacaaacaagca

SEQ ID NO: 1076 - DNA, 3100 bp, Homo sapiens
  misc_feature (1)..(3100): DMR6:140006101
aaaaaaaaaaaagaattaaatagggtcattgaaaagctataataatcagaaggaaagtaatagatagaggtttactaatattttgttgaatggctaaataaaagataaactaaattgtagaaaaatcagaataaatatactttgagtaaatagtttttattgttttccgaattttaatataattaactgaaagtgatttataaactaattatttacaatatgtagatttgtattacggtaatgtgttgggggcagaattctgagatgaccttcaagacccatccctccttacctcttgccccctacctgccccctgcctccttgtcctgtatcatctccctctcttcagtgtggaaaagacctgtgaatatgatagctgtcactctcatgattagattacattatatggccatgatgaaagaatttttcagatggaatcaggtccttaagcagtttaaaagaagacaggctttcgttgagatgagacattccatctcctttacgccttgaagaaaaaagccaatatgagctctagagctgcaaagaaatgtattctaccaacaccatgtcaactcggaagaggatcctccacctcagatggggccacaacgctgaacaacacctaaattacagccatgggagatcctaagcagaggatccagataagacacgctcagacttccagtccttggaaactgagataagccagccagcaagtttcgtaattcttatgcagaaatagaaaacaaatacacttggaaatatctatcatgtgcactagaaattttgtaaaccttttatccaagagtttgacttcaaatataacctaaagatttacgatttctacttggccatgagaacgttgaagtgtttgtacaagtgagacaaatcaacaagcaaaaaaacaaccgcattaaaatatgagcaggccgggcggggtggctcacgcctgtaatcccagcactttgggagactgaggcaggtggatcacctgaggtcaggaattctagaccaggctggccaacatggtgaaacctggtctgtactaaaaatacaaaaattagctggatgaggtggtgcacgcctataatcccagctactcgggaggctgaggctggagaattgcttgaacccaggagttggaggttgcagtgagcccagattgcaccactgcgctccagcctgggtgacagagcaagactccatctcaaaaagcaaacaaacacacacacacacacacacacacacacacacacacacacacaagatagctagcgtctcacgccagtcacaatagctcttattaaaaagttaaaaaacaatagatgctggtgaggagaaatgggaatgcttatacactgttggtgggaacataaattactccagtcactgtggaaagcagtccagagatttatcaaagaacttaaaacagagctgccattcaacccagcaattccattacagaatatatatccaagagaaaataaatcattctaccaagaagatacgtgcacttgcatgctcatcgctgtgctattcacaatagcaaaaacatggaatcaacccaggtgcccatcaatgctagataggatacagaaaatgttgtacatgtatgccatggaatactatgcagccataaaaaagaagaaaaaatcatgtcgtttgcagcaacatggatagagctagaggccattatcctaagcaaattaatgtagaaacagaaaaccaaatacccacatgttctcacttacaaatgggagctaaacattgaacacacatggatataaacatgctcagaaaatttgagcacacgtggatataaatatgggaacaatagacactgcggactactagagggtgggggaagtagattaaaaaactaccttttgggtactatgttcattaccagggtgacaggctgtgcacttcaaacctcagcatctgcacatatatcccctgtatctaaaataaaagttgaccttaaaaaaataattcaatagaagcacaatagttaaatactgggctttaggactagagatagtatattgatatatgtatctgttgcctcttctttcccagactccactgcagaaaatagatgaagtttaacacagaaaaatagatagaatgtcattggaaaataattgcaaaaaaatttggaaaatagaaaacaaagaaagcatcttgagagacaaccaagagggtcacaggtgtcaatgtactaggttctgaagaaccctggcttttccagtagcttctctggatgctagaagtcaagcaattaataccttcaacagttgaataaaagacgttttctatatggaattgtatgtttgaccaaaatacatagaaaggcaaaataagcagtttagacatcagatgaccctttcttacatagcaactggacaatgtgctatagcaaaatgaaagagttaaaaagaaaaagcaagttatagtcattagaggacagtgaactccaggagagagatgagaagtagactcaagtagcagctttgcaagagacctagagagaaaccagtccagacagaaaccccagaatggaaggctgtagaagcaaagcctgcaggagaaaacaaaggagtaagacttgttagaaaagataatattatggattatttggaataaaagaactatgtatgtgtaccaaatcatgtaagtgaaagaaatataacatttattggttagaggattgattatataagttatggtaaatccatgacatagaatactatgcatcccttaagaaaaatgaaacacatctatatgcattgatatggaacatatccaaaatacattattgattgaaaagacaaggtaagaaacagtacatattttaagcatccattactggtttttaaaagatggatacacaaacttccattattaacttctatatgcaaagactaactctggaagggtatgcagtaatttggtaataatcgctgtggttaggggaaatggagaactgaggaaggagggatgggaggaaggcttccttcacctgcagacttttaaaaatcatttgtttatcatgtacatgtattgcctattctaaacaacctgaatttttcaccatgca

SEQ ID NO: 1077 - DNA, 1200 bp, Homo sapiens
  misc_feature (1)..(1200): DMR6:140364801
ttttcagttaatgctgaaatgaattaagactttgggggactgctgggaaggcgtgattggcttcaaaatgtaaggatgtgagatttgggagggctgggggtggaatgacatggtttgactgtgttgccacccaaatctcatcttgaattcctatgtgttattggagggacccagtgggaggtaattgaatcatgagggtgggtctttcctgtgctgttctcatgatagtaaataagtctcacaagatttgctggttttaaaaatgtgagtttccctctccaatgtctctctttgcttgctgccatccatgtaagatgtgacttgctcctccttgctttccaccatgcttgtgagacctccccagccaggtggaactgtaagtccattaaatctctcttttgtaacttgcccagtcatgggcatgtctttatcagtagcatgaaaatggactaacacaaagtttataaatattttcttgtttgtttttcttatacatttcatagttttcagtttttaattttattgtttttaggttcaaggtcaattttgaattaatttttgtgtgtggtataaggaatgtagacaattcatttatttgcatatgaatattaaattgttccatcatttgatgaaaagtctgtttttgccattgaattgtcttagcaattgtgtcaaaaatggtgactatatatgtgtgcgtctacctctagaatctgtgttctgtttgattgtctatctttttgccattaccacacagtgttgttactgtggttaatagtaacttttgaaatcaggtttaagtcgtcaaactctgttattctttttcacagccattttagctattctacctcctttgcctttccatctaattttagaactgtttattaatttcaaaaaatctagctggtatatttattggaattgtattgaatatgtagatcagtattttggctaagtgacatcttagcaatattgagtcttctagttcatgattgtattgtgccttgctctgattttctttatatttctcatgcttggactttactgaactttttgcacccatggaattatgttttagattttttaagaatcaaatttgggctttttaccattatttcttcagatatttttctattcccctactcactctcttcttcatgtacactaattacacatacattaggctgctaaaaaagttca

SEQ ID NO: 1078 - DNA, 500 bp, Homo sapiens
  misc_feature (1)..(500): DMR6:142492401
tacactaaccaagacagcgtggtactggtacaaaagcagacacatagaccaatagcacagaatggagtgctcacaaataaggtcgcacacctacaaccatctgatcttcaataaagttgtcaaaaacaagcaatgggaaaaggattatctagtcaataaagtgtgctcggataaccggctagccatatgcagaagattgaaactggactccttccttataccatgtacaaaaatcaactcgagatggattaaagacttaaatgtaaaactcaaaactataaaaaccctggaagataacctaagcaataccgttctgaacataggaattcacaaggattttatgatgaagataccaaaagcaattgcaacaaaagcaaaaattgacaaatgggatttaattaaactaaagagcttctgcacagcaaaagaaactatcaacaggatgaacagacaacctatagaatgagagaaaatttttgcaaactatgtatctgacaaat

SEQ ID NO: 1079 - DNA, 1500 bp, Homo sapiens
  misc_feature (1)..(1500): DMR6:144221401
ttagctgaccttgggagggacaatctctgcccaatcagtaagaccccagatgccagagcattaaaaatacagaacatttaaaaatgtagttaatacactgtgggttcaggcattctcatacttcttttacttcttttccctctcttcttctttgttcagctagggtggaccttactaatcaagattcagaagtcagccgggagcagtggctcacacctgacatactagcactttgggaggccgaggcaggcggatagcttgcacccaggagttgagaccagcctaggcaatatggcaaaaccccatccctacgaaaaatacaaaaattagctgggtgtggtggcgcatgcctgtagtcctagctactcaggaggctgcgtgagaggattgcagcgagaggattgcctgagcccaggaggtcgaggctcgcagtgaggcgagatggcgccactgcactccagcctgatgaaagagtgaggctctgtttaaaaaaaaaaaaaaaaaaaagcattcagaagcccaaagaggcaacacttaagtagtttttgagtcattgagtcatttctatctgggtaggctagacaatacacttgtgcaattcaagttctaagtttatctttgggtttaggttgtattttcagccattttgttcactgccatagcatggtaaggttggcagttactgaataaggtaacttttttaagttgcatggataagatggattatttaaaagagtgttgaatatttgcctcaattccacaatttaatgtatatataaacacagaattgtgtgtgtttgtgaaatacacagcataggtcctatgaggcaacacaagaactgtgattaggagtctgccagttcaatttttaatcctagctgcaacccttggtagctatgtgactttagactggctattcagtttctccaagtccctgttttctcgcctatgagatggagttgacaataatagtacccaccaaacaattcattgtaagagataaacgtaaagttgaaaaaatgcttagaaagtgcctggcatataaaatgatcaatagatgaacctattgttatactttagtgattctcataaagtgtatatatggattgactgtgagatcagttttgctataaaggcaaaagttgctcatggaattgattctgttggatgtacattgtgtgtgtaaactaaaaataaaattctaagtccccactgactaaacagacctcctcttaaccaagggggaccccagagtaaccttgaaaactaagttgtcactcatggtgaggtgagaggtcagacatgcctccttatatcctctccctcactaaccaggatcaggctttcttccctaaggcctaaacagaaaccagccctttcaaaagactccaccactgacatcaaccaactgcctgacactgcccctccttttttgcctaataagagactaccaagcatggagtggttcttgtcagtctgtggaggaggtactgtaaaggt

SEQ ID NO: 1080 - DNA, 1300 bp, Homo sapiens
  misc_feature (1)..(1300): DMR6:147713501
agcaagcggcagcagagctgggtcagccaacatcatctggaaagggaatgaccctgtatcatgaaatctcatgcataagctgtaggagcaggaaaaagttaaatggtagaagagatcatagtgtctatccaagagtgtttgggggaaactagggcccaagggtgatataatatttggtggcttgtacacagagtatggggtagaagctgaacagaactgtcacccaaattcagtgctatttctttatctttccaagcaaaagtagtatgtatgacaaagaaaagggtgagacaagggtaagctgtagtcagttttcccctcttctctcctcccttactcttcccttgcctcccctttcatctccttcctcttctgttctttcctctcctcttgtcccttcctcatccctcccttcctataaattatgaagaaatatgtattgagatgtgtttttagaacttcttctcaaaacaggtctgtatttttacttctgtgcatttgtggaattaactgactccacttaacagtaaaataaaacagccctaaaagaacataaagtttatattaaatggttatgaaaataatgggcaccttcgcccactgagattgtgttgagtgaagttcagtgacgatactaaataggccccctcccacctcactaggagccaattgacagatatggaagtcagacagaggtaggtattttggtctgcttttttattactgaagagtaaactggaggatgtgaactgcctggctggcaacactgggcttccaaatagactttctgacttagtcatgagctgtatctcttaagtctatggtctggcagaaattggaagaaaatcatgcactctgtgggaaggcatcccaaagagagttccagaaggggctggagaagcacgtcctgcttcttctccacagttgtcagtcagttaagtttctcctccttctatggaggagtgagtgatgagcatggtgttgacttatatattgaggtccttctacctggaagaggggagggggacaattgcttttctgtttctaaacatatattagagactaaatggttaggaaaagataatccaattttcttatgattgaaagataagttaaaggtgttttggttttgtctatgtgtaattgttattcactgtttaattaagacaaaaattatatactttgaatcagtgattctcaaatttagtgtgcattggaatcatctggacagcttgttataatacagattcctggactctattcttggacactgagtaggaatgccaaaaaaacgaatgac

SEQ ID NO: 1081 - DNA, 700 bp, Homo sapiens
  misc_feature (1)..(700): DMR6:148434001
attttcttctgcatttatagacatacatatgtagataatttaaaaacataggggaactggagatttttttttttttttttttttttttttttttgagacggaggcttgcactgtcccccaggctggagtgcagtggcgcaatcttggctcactgcaagctctgcctcctgagttcatgccattctcctgcctcagcctcccgagtagctgggactacaggcgcccgccaccacgccaggctaattttttgtattttagtagagatggggtttcaccgtgttagccagggtggtctcaatctcctgacctcgtgatctgcctgcctcagcctcccaaagtgctgggattacaggcatgagccaccgtgcgcggcctggagatcgtatttttaagctaatctttcatctttagaaaaaagtaatgcaagactacatgcttgtaaaaaaattcagtgagatatactctcagcgttttttttcctctatgtgcacacattcatatatgaacaaacatgcatgcgttcatgttgggatatatttgtatttgtgtttagttttcactgttacacttaacttgggatggtttctttaagagtttgtaatgttaatgagatttgtcattcttaactaaggtatccatatgtgacttaatgatgaacaattcaatctataggtcaaatttcaaaatcttctcacctcac

SEQ ID NO: 1082 - DNA, 300 bp, Homo sapiens
  misc_feature (1)..(300): DMR6:149944601
agtcctccaggtttcccataagcacagtggatggacattgttctggattttcacacttagacccctctggcatgggcacttctctgagcctgtgatctctccctccactacctgccttagactttcagattttccatttcttgctgtgtggaccatctctttgtccaaggtttcaggaaggcctcctcatagcagatgcatgccatcaccaggggctttgccaacatgttaaatcctgtggccatgataattaactcttctttatccaacggggttccatcctcactctgttcaaccagc

SEQ ID NO: 1083 - DNA, 2500 bp, Homo sapiens
  misc_feature (1)..(2500): DMR6:151563201
atggtagagctgctgtgaagagcacaaaaaaatgctatgtccaagtatgtgttcactggcccctagtgggaagaaccactcttgtgtccataactgcataagtggggtggagatgaccgctctctacatatcttccctggctatgggactgcctcctttagtacttggcaccttatctgtgtttcctttgtcccaacagggacttggtgggctgtgctcccctctcccttagaggtgtcccatgttgagagttaaatctccagggatgcagctgctccttggggcctacgagtcccctgcacctgccaaagtcagaatgggttgtggggtatgtttgcaagagatctagtggtacagtgactcaaggttggagagtccctgggcagggctgtttcccactatgggtgcattaccagtatggtgcccacagtctcagctcaggtgtgaggggagtgtgggcacgtctgtgtgagctggccaccaagttctctgtccctgagaagttctcagatgcccccaatagtgttgacctggatcacaagggcagaggggctcaccagcagtttaacagtcaggggatagtcagagaggtgagtggggcagagaagctctcccacctaccctttctgtggggctctgagcttctcaggggtcaatctctgccagcctcttgttgctttctttttctgcagctcagcttctttttgtgggcactctgacaggtcctggctcacttctttcagttttccattcacattttgtccattcactagtaactttgatcttctttctgaggagaactggctttcaatgtccctagtctgccatcttggagagtcctattgtgctcctttggaggcatcatatttccttgcttttgcacgtttcttgtgtctttatgttggtatctgtgcatctggtgtgacagtcacttcttccaatattttggatttgcttttataggggaggatgttttcctggagatgcatctgtgatgttggttgggtagggcactttggctctgattgtgggtgtgtgcagcggtgtagtttcctaatttgttcagctgtaaatagtgtcattggtgtccattatttcctcaagagcttagggtgtggttgttggtggagttgtgggaagttttgctggggacagggataccaggtgggccagtcctcaggccccgatgggaacagcagtgggccaagagtgcctgttcttaggccgcagggtggcatttgctggcactggtcttagcaggtctaggtgggtctatactggcagtggcagcagcaggtgggtctttcagtccctgggcagcagtgtggcatgggctatcatagtagcagttgtgggacaatgctttggctctcaagctgtctgtgctggtgttgacagtggctgtgatggctgggcaggccaggccctgcgcctgcaggttgtgtgtgcaggtgggtgccatctgtggtggtagcaacagggtgagtgagtccatcttcaggtccctggtggaagtgctcaggtgctaatgatggtggatgtggcagagtaatccccaagtccccagatggtgttttcatgcactgcggtgggggtaggggcagagcaaagccaggtgagcctgtcctcagaccccctggtggtgcctatcagcactggctgtgatgtgcaagggtggggtgatccctggactcctggaggagtgctttgataggggaggcggtagctgcagtggggccctgctgctggagaaggtggggttgcttttagtggctgcagctgtaggcaggcagctggggagcacgtgctttggccccagttggcacctatgcgttggggagcctgtccttgggacacttgtatatgtgcgatggtggcctgctgttagtggggtggggttgctgcagtggcttggctttggccctggcagcagcagccagctgaagcagcagctgcaggtggggtatggcagtggggctcctgggatgtggagatgcaggggctgttgggccccaaggcagggtgatgtctggtggaggctggctctcaaaatggcatcttgctgtagctgcctaggactcagggtggtgtttgggattcagcctgagctctggagcaatgccattgtgcggtctgcagacagctccctatgttggtctctgggcctgtgaggggctctctggtggctgggactggaggaatccatgatgggagtatggacgctgcaggtctgtcactcccctttccctgcattggggagcttctctgtgctcccagccagtcctggccaaccaagcaggctgcttctctttcctccccttccttgccctaggtgtttcctgttggttctctgttgaattccaatgttctgtctttgctgatctattcaaactgtgattatctactcgctgttttattcttctttgtggaggggcagctgatagatgcctctagtccatcatcttgaagccctgccccttgagaacttctaatgtcccct

SEQ ID NO: 1084 - DNA, 300 bp, Homo sapiens
  misc_feature (1)..(300): DMR6:152067101
caggagaatttcacccctgcgctttcaggttaaaagattgcattcccatgatgaagatgttctgtgaatagaatcatctcaagtcccaaatggtgtggatttgctcctgcatcttgttgcagagattctcttggagcttctgagaactggggaaaccaacaaaatgcctgtagcctggggaaaatgtagggagttttagcatgaatttgtgggaggtgagaaaaggcagcaggtgtcgaaagacgggaaatccttgcactgttctagatgttaggagccattttccattcacattcagca

SEQ ID NO: 1085 - DNA, 200 bp, Homo sapiens
  misc_feature (1)..(200): DMR6:152319201
atttactgcactccttgtgttccagcaaagatacaagcaatgtgtgtagagaaattcacttattaaatatttacagaatactcattatagatggttgtgtagacagctgagtttgaatcctatcttctccattaactaacgtaatgaccttgagcacacaaactcctctaagcctttttcttcataagatggaaaatcct

SEQ ID NO: 1086 - DNA, 200 bp, Homo sapiens
  misc_feature (1)..(200): DMR6:153093901
cccaactgtgaaaacaggaatgaaattctctagtaccccacaggattgttctcgggcccaaatgtcacaatgtatatgaaagtgcattatataaatacgattatgtaatatctggtatcatcaatggaggaggctttccatatgtactatgcctaaatatattacacacatctatactgaactttttttttttttgactg

SEQ ID NO: 1087 - DNA, 900 bp, Homo sapiens
  misc_feature (1)..(900): DMR6:153335501
accttcctccttcctccctcttgtattccccagtgtttattgacccatctttatgtccatgtatccccagtgttttgctcccacttataagtgaggacttgcagtatttggttttctgtttctgtgatattttgcttaggataatgatttccagctgtatccatgttactgtaaaggatataatttcattcttattttgtgtctacatagtattgcatggtgcatatgtaccagttttgattttccaatccagagttgatgggtgcctaggttgatttcatgtctttcctattgtgaatagtgctgcaatgaacatatgggtgcatgtgtctttttggtagaatgacttattttcctttgggtatacacccgtagggaactgctgggttgaatgatagttcaactcatttctttgagaaatctccaaactacactccacagtggctgagctggtttacattcccaccaacagtgtatgtgttccctttctcttcagtcttgctataccctgcaaagccacaggggcagagctgcccaaggctgtgggagcccacctcttgcatcagtgtgacctggatgtgagacatggagtcaaaggagatcattttggagctttaagatttgactgccttgctgggtttcagacttgcatggggcttgtagccccttctggctgtatttacccaatgcctgtatccccatggtgtctaggaagtaactaacttgcttttgattttacaggctcataggtcaaagggacttgccttgtctcagatgagacttgggactatggacttttgagttaatgctgaaatgaattgagactttgggggacggttgggaaggcatgattggttttgaaatgtgaagatatgagatttgggaggtgccaggagcaga

SEQ ID NO: 1088 - DNA, 900 bp, Homo sapiens
  misc_feature (1)..(900): DMR6:154571101
gcaccactgcatgcctgccagagtgaaagaacgagactccatctcaaaaaaaaaaaaaaaaaaaagacaaaattaatggaataaaatattaatattaggttggtgcagaagtaattgcagtttttgccattacttttaatggcaaaatatccttatttcaataatatacttattcaaatataagatacctaagacattttcaatatcttattcaaacacgatgttttgccattacttctaatgacaaaaatcgcaattacttttacaccaacctaatagcagctagaggtgtctgaattctaactcttccaatctcactgacaactcaaactccgttgccttctccctgctactttcccccactattgctacctttgatttgaacaagatttcagcaggacaaaatgtcacaaacagggacaagggatctcccacatgatgttatttcgggggggctccttaaagcttttatggagactttgtgtagtagttgagaaaaggaactgcacgctttcaaatctgaccttcctcatttccacttactacctggatgaccttgagcaagtcatttaacctccctagctttaccttccttagcaacaaataggagtctacaaagaacagtattcatcttagaaattgtatgtgaactttaaatgaaataatgagtaatgcatgaggcaagtacctcaaacatgttaaggatattttatttattttattttattttattatattttgagacggagtttcactctgttgcccaggctggagtgcagtggcacaatttcagctcactgcaacatctgcctcccgggttcaagcaattctcctgcctcagcatcttcagtagctgggcttacaggcatgcaccaccacacctagctagttttgtatttt

SEQ ID NO: 1089 - DNA, 200 bp, Homo sapiens
  misc_feature (1)..(200): DMR6:156778101
gccatggagacggggctgctccccaaccacaaactgaaaaccgttggcgaagcccccgccgcgccgccccaccagcagcaccaccaccaccaccatgcccaccaccaccaccaccatgcccaccacctccaccaccaccacgcactacagcagcagctaaaccagttccagcagcagcagcagcagcagcaacagcagca

SEQ ID NO: 1090 - DNA, 200 bp, Homo sapiens
  misc_feature (1)..(200): DMR6:157169401
tgttacaggcttcagtgagcaagtaattatttaaatggagtcagtgtgagtataaatgtgacaactatttcttcacttaaaatgccaagggaaggaggatggtaagcagtgggaatttttccttctaaagagcttttttggttttgttttgtttcaattatttagattaaaaggttagaattatgtattactgtggacaa

SEQ ID NO: 1091 - DNA, 300 bp, Homo sapiens
  misc_feature (1)..(300): DMR6:157308601
tctgggctcttgaaaaagcagcaatgtctatcagcagaagaggaggcaagacggggccctggaaagctgtgcaagatgccaatcagaaatcacttccataaaagcctttctagcagcagggactcaggagagatacaggaagaaagagagttgggggtgggggtggattactttctatcaatcagattggcaaaaatttcagagtaatagaagccactcagggcaaggatcccaagaaacttttatgcattttgtataaacttttctggagggctggttagcaacaaatatcaaaaacat

SEQ ID NO: 1092 - DNA, 1300 bp, Homo sapiens
  misc_feature (1)..(1300): DMR6:157962901
aaggtgcgggctgattagcaggtcagctgtctgagcaagacagtattgaacccaagccaccactgtgaagggcgcccggaggatctttctggcgcagaacagctccggcaagcgacagccaatccaagatctttgctcaccctctggcgctcaagaaggggagagatggcaagtagatgagcctcaaggagaaaggagagaaagtctgtgctgaacaggtgtgttccctttcaaagccaattgccctgtttggctcagtgaggaactttaggtttttggatgaagggttttagaaacaatggggaacgttgtggtggcaaagaggatgaaaagtatagccaacagcagaagtagtgagatttctataaacatcttggcactgagaggcagagaaagctgatttaactaattatgagcaaacccttccggaagtaaagagagtgggaaaattctggctgtctggtcaacattactgtctaaataaatccacgcaggccagcagtgggccactgggtatcgctcaggcaggaagcaagttggccttaaaaacagctgcagctcctgaaatggggccaggcctggagtcttcctgctcacatgccaccaggtcttttttttcttttctttttctttttttttttctttttttttttttttttttttttttgagacagagtctcactctgtagcccaggctggagtgcaatggcgccatcttggctcactgcaacctctgcctcccaggctcaagccattctcctgcctcagcctcccgagtagctgggactacaggcaactgccaccatgcctggctaatttttgtatttttaatagaggtggggtttcatcatgttggccaggctgggtctcaaattcctgacctcagatgatccactcacctcagcctcccaaagtgctgagattacaggcgtgagccatcgtgctcggcccactgagtccgaatatatcaatttacttaaaaacacacaccgtgggggcacttttataggacaaaagccatgctctggttgaagattgagcagaatacctttttaaggtgctacagaagtgaggactccaaagacggaagggaggtggctgacctcggacagagctctattttcctctttatcgtgcacacgaaaccgcggcagatccttttttttgctctcatttttattatgtcttacaaggattcgtgttcggttttgtggttaaaatagtcacatagcttgatctgcaaaagtgctgtaatattttttcattgctattggctttttatttcactctcccttttttt

SEQ ID NO: 1093 - DNA, 1500 bp, Homo sapiens
  misc_feature (1)..(1500): DMR6:159275201
aaaaaaaaaaaaaagaaaaaagaaaaaagaaaaaagtttttgtacccacagattagcattttcttgatgtttgaaaaaagtttaagctatgtcctaatttaaaaatgagcacaaactacttaacagatgtctgttccctcttctcttacttaaattatctttattttcaccatcacctcccagtgccgaacacctgagctctgtgttttgtggttggatcctgggttgccaagttcctatttggtcagtccctggcctgtggggcggtctcaggaagtggcatgctcttcacgagggatcgttcatctccagtataaccattttgttaataatagttgataattcccagcttttaccagatgagttttgacttatttttcctcctttgacctgttcaagctacatatctcggtcagttcgagagggtgggggatttgagaatgtgaggaggagtggggttagaatgggtttgcctatctgggcaaggaaagagttcctagtcgattgggcacaatgacaaaatgattccatggatagaatcgtcccatgttgctggaacacctcacgtgttgtgaacgccttaaattcctgccatcccttctctgattccccacctccctgtagtttccacaggatttatctctctgtacccccgtcctccaactctactctgtcagcctctcctccatcccttacttcccttctaaattccaggagatgacctcactttgcaaagcaaattggagccaccaaattgtagctctcctcggtggaacctgcatctgtgctcatccctgcaccttcttgcagaaagccgccccctcaggccaagatgagtgcctggcccccatgggagactcagacactttgaccccttgtgacttcagcatctccctctttaaagattctctcccaacattcagtcgtgctcgagtctccccatcactcctgccccttcagctcctatcacgctgtcctccactttgatctgagtttctggaatcatcacctttgttttagctctgactctcctccacatcccattcatttctcactccactgtgccatggtttccagggccacctcctcacaccctcactctcccaggtccccagtcacccatgggagctgaatccggtggctgctgggcagtctgttctgtcttggtctttcagcagcacttggcagcgttcaccagcttgtcctcttgaactttctcttgcctggatttttcccttccccgctccggaagagcagccgggccttctcaccccttgtttaaggagatgtggtgcgttgaggtgaaaacagatggtacctgaatggcactttctcctcagacttttctttcaaaagcctaaacacgctgaggagaatgtgtaagggcggaagtgggagtaagtgagtgctttgggggttgttgtggggttgaggtaagacttgagaggagcagtggacgaggagacctttccccgaagtctgcgcactggatgccaggct

SEQ ID NO: 1094 - DNA, 100 bp, Homo sapiens
  misc_feature (1)..(100): DMR6:159743101
gcagtggcacaatctgggcttagtgcaacctctgcctcccaggttcaagtcattgacctgcctcagcctcccaagtagctgggattacagacatgcatca

SEQ ID NO: 1095 - DNA, 300 bp, Homo sapiens
  misc_feature (1)..(300): DMR6:160954401
aacctgtacattttgcacatgtatcccggaacttaaagtaaaataaaaataaacacacaggcactggctgctccctccacctggaattccttccctacatacccacatggccattcccctcatctctttcaagacttccctcaactttcaccttcccaggaggcctgctgtgaccactctgtgtaaaactgcagtccccgctcacccccttctcctcctctttcccttctctctttttggggcttacctccttctaatacactaccacgtatttgcttacttatgtttagtgtcctcatc

SEQ ID NO: 1096 - DNA, 1100 bp, Homo sapiens
  misc_feature (1)..(1100): DMR6:161791301
atgtggcaagtcattcacatacattaaaaaagtagaatatggttacacagtgttccaaatatttaaattcttgtaaagttagtattctagcatctacaaaaatagcatgcgagtttttatgtttatctagaaaaatgtgcaatttactctgctgtccaccttgtttgttctctctcatttgccctccttcacacactctctggcaaaatctgtctgtttctctttctctccatttgcctgattctttcccatgtgtacatcttcatttatactcattaagagagaggctgtggatgaaatgtgacatatatcgaaagcaatgtgccagatatttcaagctatgcaaagatgaggaagcaaatctaagctctcaaggacatataaatccagtagagtgggcaggagagggaaacaaatacttactatacaggacagaatattttaagtcatgttagagagataggatatattgccacgctcacgctctggggtaagcagccttcaagatgttctccagtgagctccacctcctctgtagttcctctccacattgaatggattgactcacatgcaataggaaaagtgcagaaacggcaatgtgtgacttccaagagtaggtcagaaaagacaccgcagcctctgtctgtgctcttacagatcacttgctctgaggaaagcgagcagccatgttgggaggacactcaagcagtactatggtgaagtccatgtagcaagaaactggggccttctaacaacagctggcatctacttggcagccagttggcaagccctaggatgactgaagccctggctgatattttgactataactgcatgagataccctgagcaagaactatccagctaacttgctcccaaattcctgacctgctgaaactgtgagaggcaatgtttattattttcttcagccactaagttatgggatactttgttattcagcaatatctaactaattcaggttcagaggaggaggaggtcatatataggttgaagaccagaaaagaattcatgaatgtaggggcatttgaaaaacggtcaggattccagtgcataaagatgcagacaacacctgaggtcaaga

SEQ ID NO: 1097 - DNA, 1000 bp, Homo sapiens
  misc_feature (1)..(1000): DMR6:162624201
tcatgccactgcactccagcctgggcaacagagtgagactctgtctccacaaaaaaaaaaaaacaaaaaccaaaaactgaaatctactcttctgttacgtgaggagaacaatctgtgtctcatatttaaaatttacaagtatagatacatttttcatgaatatttattaaaaacaattaaataaaaattattccattaactcatttgtttaacatttccatgtaaccacagcaatgcaaagcactttgagagctgcatgggaggtctaagacatggtttctaatatcggagttcaaatagaaatcacatcggaagctgaagccacattgtgtggtgctcacttccacagcagacttgtacagcttgaagtatttaagcagattaactgtaaaggaaaaggaaaaatgttacttagctgcatcttaaaagactcttgggattcaaacaatctataggaggaagacagctaacacaccagcggtagagaaaacacaaacatttttgtttgttcggttttttgtagagacagggtctcctcttgaactcctggcctcaagggctcctcctgccttagcctcccaaagtgctgggattacaggtgtgagacaccatgcccagcaaggacagattttcaagaagagaacacagcagggatgtggtaacaagaggacatctgtgtaactgaagtggaaaataacatatattggagcttgaagggaaataaaattaaatacctaagtgaggaaaatacaattagtgtttcaaccatctgctaccacttcctactatgcccttccttctgggaaggctctatttcccttcttcactcaggtaaggctcttgcataagtgacttgctttggccaatgaaatggaattagatgaaatcactgtgatgtctcttctctctgtcataaggctgaacgtgctccagatagaaccagctccatcagcttctgtcgtggagtgagggcaacttcagccgtgccactgcaaactca

SEQ ID NO: 1098 - DNA, 5600 bp, Homo sapiens
  misc_feature (1)..(5600): DMR6:163054501
taagacagtgcgttcgaagagtccctaaggaggaactgctgcgggacttttccttagttcggctgaagacagggttttttgtcccatggccacgaaaattcatgctcacagacaatttgaatttgaatgagtaagacagggttttgttgggtgaaaaaggaagaaaaaggggaaacagggactctcgctaagccagagtccctgctagggtgcttcccaccagccatcctcatcccattttggggcttcccaccagccattcgcatcccagtttccacacaggaagaggaggggccaggctactccctgcggcaaatggtgtgaacctgtgtggctcctcccagtgggcaggaaagatggagagggtggaccttctccaaggaccgcctcccccctggctgtctcagaaccagcgaggtcaggccaggccagggattggagggagggaattagggtgacctgccagtgttgggggtacaacttcaccaggtcaattgtgctgtgctgaggagaacagaaaggagattcaaggattagacacaaagaaagtcactggtgaccttgataaaagcaacttcagtgaaatggtgagggagtgggttaaagagggaacgggaatgaggaagcaaggacagtgatgataaagaattctcttgaaaaactttactatgaagaataatgtggaaatggagcggggaccggggacagtgtggaaatggagccgtgactggggatagtgtggaaatggagcagtggcttttcagaaaaagtacttaaagagaagtcagatatattattaagacacacacatgcacacatatccaggtgtgcacacacacatgcacacacacacgcacacacacgcacacatatacacacatgcactcacatatatacacacgtgcacacacacgcaaacaagcgcctgaggataaacgtaatataagagggattaccaaagcctaggccaaattcatccactgaaaacaaaattattataataaaaaggaaccctggaagatatgtaaaaggaatttacatacaaaaaatcatcctgtaggaagtagaactgtatctactgtgttaaaaaagtttgtgtctcaaaatataatggcaaattgttattctattattttgttgttatttgttttttattgttttattttttctttggcatttttatcattgtaaaatacacataaaacttaccatttttaccatttttaagtgtacacttcagtggcagtaagtactctcatacagtgtgaccatgaccaccatctagttccagaactttttcatcaccccacatggaaaccccatgcccaataagcagccacttcccagaatcctttcccccagctcttaagcagccactttctgtctcttggatttgtctattccgaacgtttcatagaaatggaatcgtacagtatgtggtcttttgtgactgtcctccttcgcttaggaaaatgttttcaaggttcattcatgttgtgtcatgtatcagatgctccacatcctacttgttaggaaaatgaaaatctaaaccacaggaaataccatttcacacacattagcatggccacaatgaagactacagaaaataacaagtgttgacgagaatgtggagtgactggagccctcatacatggctggtgggaatataaaatggtacagctattctggaaagcagtttggcagtttcccatacaacacagcatttgcactcctaggtatatattcaaaggaattgaaaccaggtgttcaaacaaaaacttgtccagtaatattcatagcagcattattcacaataaccaaatggcagaagcaacccaaatgtccatctgcgaattagtggagaaatgaaatgtgttaagtgcattcaatagaacattattcagccattgtttcattgtgggcaggtctgtgtcaacctacccctaagttggaggaagctgagagactaaagaaagagacatacaaatctagttgcttagaaaagaaacttttaacagggacttataaacagaagccatgtctgtgtccctggcagtgatgagatgatatggtagatcctgaaccattaccccccagaagcaggacttatgtgctgtcagggaggggtacacacacttcagaaggagtggtcatgaatttgccctcacggtgggatttatggtaagtaggtgctcttatacgaggaggaatagataaactgaaaatctcagaggcattcccggaactgaggttaatcagaagccaacatggcagattagcacccaggatggagttgctttggcttccatgctccacccctctaatgcagctcttacagtctctcacgccctcctcttccatgaccatccctgagccttagagagagcgcttgatgttgtcaaactttagcagcagtgctttggcaatggaaaatagatcaggcccagtgggattcctaatgagggaggttcacaggctgttgaagcacctctagtcttcagaatacaatgacctcggttttctcaggagtaaaacagcgtgagatatataacattaataatttgcactcaaggattacagtcaaaagagaatttgtatcccagaacaacaacaaaaaagtacctattccattaaagagccaactaaaagtatcatgaagaaaattaaaacctggttcctctttagacttgcagacagcaaataattcaggatttagcccaaattgtaggtaaataataaaaactcaaaaacaatggtgagggctagtatccaaattttttggtctctagtttccccgtttctgccaaggataaatcataataggaccaatttattttcaaaataaattttggtctcattatacttggcctggttatttgcataaaatatggcaagaatagtgatcagcctgagctgcttatttattttttttccagacagagtctcactctgtcacccaggctagagtgcagttgcgcaatcttggctcactacagcctggacctcctgagctcaagcaatcctcccatctcagcctcccaaatagctgggaccacaggtgtgtgccacaactctggctcattttttattttttgtagagacagggtctcaatatgttgtccagactggtaggctctttttaagttgtctttgctggaacttttatgagaaattgtggattctgctttttaaaagcctcaaggctaggagccaagccaaggattcaccattagactatgcttgtaatacctatacaaattcctctcttcttgaattcccaaaatatcttaaggttcccaggcctgttagtaaatgacattctttacttaccataggtcagaaaccttgtaagagaaccatttagacaaggtactaggccagtctttcctagaaagaatttataaagtcaacctccattcctcagtctggtcaattctgaaaatatgccattccagtcaatgccttggtaaaataaccaatttctccaattatgccctgttagaaaagaaaacagattcttactgaacttatgcaaataaatatattgctatcagataaaaatactcataaatggtttccaaatttagggtaactcaggtagagagaagggtaaattttgttcacaaaattatactttacccaacctctaagctataaacagttcaaaagaaaaagaattttcttgactcttcatcaatcagagtggcagccttctaagcaggattacgtacatccaccttggaactgccatccacaagccctgcagctctttgtccgtcaggtgagagctgcctattgggcaccgtagaatccagcagctccttacacagttccagaatcagtcgaacaaaagccatatctgtgtctctggtggcagtgagacgaggtgtttgatccctacctgttgttctaatagtaaggcaacatatttgcaatgacaacagatatttgcaaataatgtacaaacaggtcataaaaagaactaatgaaggctggccgtggttcctcatgcctgtaatcccatcactttgggaggccgaggtgggtggatcacctaaggccaggtgatctctaataaaaaaaaaaatctctacttaaaaaaatacgaaattaaggccaggcgctgtggctcacgcctgtaatcccagcactttgggaggccaaggcgagcggatcatgaggtcaggagatcgagaccctcctggctaacacggtgaaaccccgtctctactaaacaaaatacaaaaaatttagccaggcgtggtggcaggcacctgtggtcccagctactcgggaggctgaggtgggagaatcgcgtgaacccgggaggcagagcttgcagtgagccgagctcgcaccactgcactccagcctgggcgacagagcgagactccgtctcaaaaaacaaacaaacaaacaaaaaacaaaattaactgggtgtgttggtgcgtgcctgtaatcccagctactcaggaggctgaggcaggagaatcgcttgaacccgggaggcagaggttgcagtgagccgagatcgcaccactgccctccaggctgggcaacaagagcaaaactccatctcaaaaaaaaaaaaaaaagttaaaaaaaaagaactaaacagaagataattttttgtaggaaagaactgctgtggtcagtgatcttggaggatatgaagatgtagagataatttcttttctctttctcaatctctctcactcgctcaatctttcatttgacttttgtctttcaattgctccgtcttttttctcttttctcataacttttgtttttcaaaattttgagaataggaattatgcaggtactcagtatttattgtttgaaggcacattataaaagaaaagtgggaaaaacaaatctgtaagttacttcagagagacacttaaaatctaatgtcagaggaaggaagaaagcagcaggatagaaaagatgtgataaataaaccagttatagcaataataatattatattagaatcagacaaactgcatcaataatgataaagaggataaggacataagggtaaattcaacaatttaccaggaggttataataatgctgaacctcagtgtgccaaacaacaaagcctgagaggcagtgccgtgtcatatagccagactgcttgggcttgaaacctaattccagcactgactagctgcagaccttaggcaagttattaaatctctctctgtttcaatttcctcatattgaaaattaggatattaataatgcctacttcttccagtcgcttgaggatcaaatgaactagcacagtgttcacaacagtgtctggcatcacaaacattggtgttattattgttgctgttgttgatattagtattattgccccaaaacatataaagaaaaaatagaattccaaggaaaaatagacatgtcaacagtcttagtagaagacttttaactttatttatctctcactaagataaatttaagtttggaaatgtttaaggtagctgcaataaaatgtttgaacaggatgtcttagcttaaagtcattacaaaaaagtaaatagaacatagtgtacataacaaaactacaaaatacaaagaaaaaagtaaata

SEQ ID NO: 1099 - DNA, 400 bp, Homo sapiens
  misc_feature (1)..(400): DMR6:164396101
tttctcgccatcctgcctccccgacaaggtgccagtctctgcggcatgtcagtgggggtgcttgagtacaagtgtctttttgttcttgtctagtgtcagctgaagtctcctttgtttcagagcagggctgtgtccatgagtgtgttttccccacacctctcctattagcagatcaacattacattgtgaataacagatggagacgtgcaggttttccaccctcccctgaagctcctggccttggcctaagactagatggcagcagcatttcctggctgtccccaagcagcacatggcatttgcttcctatgagagaagagtccacggtgttgacagttcggtgtctgtctcctgcagtagctgctcaccatctgtgtgtctgggatggctctgggcttca

SEQ ID NO: 1100 - DNA, 200 bp, Homo sapiens
  misc_feature (1)..(200): DMR6:164908601
ggggaccaagctgtctagaaatcacaggactgcatattggagatgagagacctagagagagagagagagactaagatagagactgagagagagagatcctgatcgttgcagagggtccctctcaagtttttagcagagtatcaatcagtgcatttatatgacaaaaagtatctgatgctgagaaagaaatcatttaaaat

SEQ ID NO: 1101 - DNA, 2300 bp, Homo sapiens
  misc_feature (1)..(2300): DMR6:165300101
ataaacggttatgcataattaggaagctttagtgggaaaatatgggtttgaggaatgagttaactgggtgttgattccacatggccccttacaatttacgtgcctgcaggcagatgacctcgagtctctgggagtgatggtccctgtctgtagaagggggcctgtgatacctagcagaatttcagtgcggcttgagatcattcttgtacacagaacctcatgcaagcttctcaactgttatgctgaagatgtatgtttcttaccttaacttttttcaagagatcaccaaatatcaaagaactgttacaaatatcttcaaagacttttccaaagacgtgcagtctgttgaactgctgggggctgcacgtgcaaattttctggagctcctggaggaaaaacagagtcagcccatttcagggtggcttcatctttcttccagaaccgaatttctcaggagtcagtgaggacacagctgccatcaccctggcgagtgggcggggcggcacagggggccagtctcgggggttctgatccctcccaccagttgctgagcttctttgtttccctggtcacccaagatgtgggatttttttaaaaaaatcttttcttctttattgactcccttgctccccgtgctcaagcattcactctccgcctccacagtccccaaaggccctttctctcttccaaccccaaggcctggctgcttcctgggggcctgctattttcttctctttcgtgcatcgtccccatttggaggtgatgcctccagtcagctgttctcctctgagtcggcagcctaccgtagatcttctgtacacatgtgctgcctgggcatacctcagggcgtgacagtgcccatcagctctccctctgccctcacggttcttccaccgtcagccaggcaagccctctctcagacccctctgctgacctacgaacatctgatttactgttgcagccacatggcctccaatgcgtccgctatgggcctcccccagctgaccagttcccagaaggcgccctccttcatttcacccaaactgtccccattgaaggtgctaatgctctcggcacctggtacagtgctgcatcctgcctggacgtatccgggaagcctcagaggacgagcctctcagctcaccgtcgtggctgtccctgacccagagcactgcgcccagaggctgcaccaagagcactgcaccgagaacactgcaccgagagcactgcacagagagcactgcacccagaggctgcaccaagagcactgcaccgagaacactgcaccgagagcactgcacagagagcactgcaccgcgaggtctgcaccgagaacactgccccaagagctatgccccggagctctgccccgagaggtttgccccagagctgtgccctgagagcactgcaccgagagctatgccctgagagctcttccctgagaccaccgcagggctgccctcctcacctgctgcagctttctctcgtggcccgcggccgccttgctcccagtgaagtcattcttcaggagatcttgcttggcgagcacttccttctggaaacgcaggaacatcctgtacctgtctgcgctggtggctccggccaggtaggagctgacatagtggtgccggtccctggtgcctctggacccggcctcctggtagcacagcaccttcaagtcgggcagccggagttcttccctcctgcgccatccaggagggccccgtccaggagggcctcctttcttttcttccttcccctctctgacagcctccactggaaggaaatcctcctctgaagtgtgggaaagagaggcctgggggttcaggtacctgaacagcggggtgtcctgggcctcactggggaccagggccgtgtggatggtgaagtgggccagggcctccttcatcctcgccaccttccctgcgggcggctctcccacctcagaggcgcgctcccccttgggccggtgggcattgggccagtgctgtaagatcgtctccggaggctggtagagcttgttggggttcaggtgtccagagatgtagaggtagacgtcctcccggtggtctttctgaagccgattcagaagtttcttcagattacacagggtcttcactcctggcgtctcgcagtgcttcagattacacagggtcttcacgcctggcgtctcgcagtgcttccacttcaggtacactggtcagaaaagaaaaggaggctcttagggatcgctcttagttccacagtaagtcagctggtgcactggctgagaggcgtagcccctgaccaaaagagggtct

SEQ ID NO: 1102 - DNA, 100 bp, Homo sapiens
  misc_feature (1)..(100): DMR6:165557401
tttcttatgcccatttagtaaaatattgtttaaaatgaacattatcatttatttaaagactttaaaaattataccctaaaagtgaatgacatattttagg

SEQ ID NO: 1103 - DNA, 1200 bp, Homo sapiens
  misc_feature (1)..(1200): DMR6:166002301
tggggaaccatgggggagttggagggggtgaagggagaccaacaaggaagctgttggtgtggtggagatccttcacaaaacccaccttcccctctgcacccaaacaattagagcccaacacaggccatgcatttcccaggctcctttgcggttagatgtggccagcatgggttacctttgcttgaataatgggagtgaagttgctgtgcccctgcccaagcccagttgtctgttgtaccctccttcctctccttgcagcctggtaagccaggacaagtgcagccttggaaacccgggctcccaggacccaggactgtaacgcaggcaagaactccctttgtcattgagtcactttattgtggggtcactctttacagcagcagagccgttcttgctgactaaagagagcagaggagcagccaggcctgcatcctcctcacccccagtggtgcattcatggcaggaacctggaataaccactgtgtctaggctcaagtgtgctcagggcagagctcctggtggtgagtgatgctcgggatggagaacccatctgcggagccccccccagctgggtagcacacctcattcacccagggctggctatgtgatttgcagggcccagtgcaaaatgaaaatgcagggccccttattcaaaaattattcagaatttcaaaaaggtgacagccaagtaataagcaagcccgagacactactgagtaaaagttcctaagagaccacacaggccaaggcccaggacacaggcctgtcccaccctctactatcctgaaacaatgagctcctgcctgtgcagctgccccatcccccagcaggctgcacccaggagcctgtgaatgtccatggcctcagctgcaaagaggagccctgaatccaggttcacactcattggaggagcaccaccagtatgacaggagggaccaaaaaccctcctccaaaaagcataactcactcaggggaaaagggagatagcagagcaacctccccaggactctaggatgggatcaaagccactaaaaaaagaaaaaagaagtaaaagtcactgcaggagagccttagttaatttctaccctgaatatttataaattgtgagcaagctggtttaaatgactctgagttcccataagcgatattccttaatataaaatcataaactagaacaggttccttagagtagacagaaag

SEQ ID NO: 1104 - DNA, 4400 bp, Homo sapiens
  misc_feature (1)..(4400): DMR6:166545401
ggctcctttcctctttggggagaagtctccgttaagctactcactgaagctcctcggaactgaggctgggctaatgtaaggttcctagaacacagcagcactgagtggacagagactatgggaagaaaggaggagaagcagcaaaaccagccttggcatttctctccttttttttctctttctatccaaacttgcctttctgcctccccaccccgtccctgttcattttagtgactgaggagagaggaacctcccaaggatgtttcctctctggttttaattaagccctgccacttcgccactgtttctgccttcgccttcattgcctgttgttcccgtggattattttctcttcccttcttctcagccctcagtctgctggtatttttataaatcacagtcaaggcaaattggactctgaaagttgtgcttataaacggtgactgacagatggagcgccgccacttttgcaggggcctccttcccacagaaaagacgtgcaaagagtggagagccagggcttcctgcacacacatgggctcccagtcctgacatcggccattctgtcggtgtgctcattctgataaatcctccaatccttaacctccctgggaaacgtcagtgtgaagtcctcacggaagcctggggtgttggtgtctgacacggtgttttaggtatggctccgtgaccccttccacttcatcttgaaaattatcttcaatgatttgctttataaagactcattactagcatcggggaatgagacggtagctactgactgacatgagtgtattaagatgcacaggaacgatctccgagaagcctcacactcggggcaggtggaacacgaatgcagattaggtcaagccacagtgtttcctcgtggaacagctttagatgggaccatttccggtctgggcagtgggatgagtgcccaaaggggctgaatacatctgtattatttagcacaactttaaaataacgccaggtaaaaacccggtgacagtgataccaggacgcatgcctggtgtgcacccaatgggacattatttatgctagtgtgtcaccctgactgggaaaactttttttttttttttgtctctgagatatatagtatgaaactgcactaagagatgagagaaaactgataacacgggatttaaaatcacaagtggaaaaacctacatcatcataaactacatcatcagtataaccaagaaaactacagtcatatcccagtgagacctattgggataaatttcctatttctttagcagaaaagggaaaatagaaattctacaactatcatcttctcccagactcaattatcgatgtgtccaatgtgatctcctcattctttttcaaaagcaacatattggtgaatgtttggtcaatacctctaccagaataagttgatggctgcgatgtttccattaagaagaataaaaaatgctgagtcaactaggatgtaaagaaaacgcacatcccaagagtgcccagctgttgggaacgctgagctggtgggctcttctcacacaaagttagtttcttttcttttttttctttgagacagggtcttactttgtcacccagactggagtgcagtggcatgatcttggctcactgcagcctcgacctcctgggctcaagcgatccttccacctcagccctgcaagtagacaaaattagtttctatttcaagtgtactgagcaaaatcgcaaggctatattgatcagaccgttcagatacccagcagagggacgcttgctggggtaagagaggccggtgacgtgcgtcctcctctccagcagctgaaatgggagtgtgcacggggccaactcactctacaatgctgcaacaccaccgacttagaggaaggaaggcagtttgggctctgcaaggaaaggctgcttaagtaatggatttttaaaaaatggtccaccaaatccatggcaatcagtatcacagctgatggggtgatggggaaagtctcatccccaaaatggttctgaaaggtcggcagctgagttggcagctgagtgcccgctctccggcagtggtgctggtgcccaactggtcatgcacggtgtttgtgatctggatgagagctggcagagcaaaactgttaggctgcagatcaggatgaattattcaaattgataacatcttagcaaatggagaggatgtgctagaagatcagaagaggccattccggcaggcagagtgatggcggcagccgcttaacccatggcacgtgtgcagcacgaggtcatgttttcaaaaaaacagtaattgtgccttatatggaactttatattaattgtgatagagagtagtcagctgcaatgcaggaaaggatggaaagagtaactgagtccgtgttttagaaaaagaaataccactgtgagtggaaacgcacctgccctatggggcagactggcgggccctgaacagaaagcctgcttctattctgtacaaattccatggtcgaccaataggcataacgtgcacaccttctgacccagggacctcactcctcagaattcatcaaaaacatttacacatagaaagctgtaacattatttataacagtgaagaaataagaaacaattgaaacgtccagcaagtggggaagaataaggaaaatgatgatctatccaccaaatgaaagtttacgtaggctttcagagtgattgcgctttttcccattactccaaaaagatgaaatacttacatataaagtaacaaaacaagtatagtatctgtgtgtcaaaaattacggaacatattattggaagaaatcaaagatctaaataaatggagagacatgtcatgttgacagctcagaagagccaacatggtaaagatgttaagtgttcacaaatgcacctgtaggtataatctcccatcaaaatctgagcaagcatttttttaagtatagagaagtttattctaaaatttcatggaaaagcaaaagacctgtaatacccaattttgaaaaaacactaaagtgggaggaatcactctacagatggtaaggtttgctacatagctacagtaatcaagatggtgtgctattggtgaaggggtagacacacagatcaatggaatggaatagaggacccaggaatagaagcattcaaatacacccagctgcttttggaaaagcaattcaatagaggaaaggcagcctttttgacgaatgatgctggagcactggactttcataggcaaagaaaaaaagacatttaacctaaattccatctcttatacaataattaactgaaaatggatcacagacataaatataaaacataaactacaaaacttctagaagaaaacataggggaaaattgtccaaacttagggctagggaaaaattcttagacatgacacccaaaccatgattcatcaaagaaaaaagtgataaatcaaacttcatcaaaatttaaagcttttgctttgcaaagactctgtgaaggagatgaaaagacaagctatagagtgggagaaaatgtttaaaccacacatccaacaaaggttctgcatccataatgtataaggaattctccaaagtcaatagtaaaacaaaacaatccattagaaaatgggggagacaagcagatatttcaccactgaagatacacagatgacaaataagcacatgagaatatactcaatatcattagtcatcagagaagtggagagccgcaataaagtatcagtacatacccatcagaattgctaaaataaaaaaatagtgataaacatcaaacatcggtgaggatgcagagaaactggaccttgtacgttgctggtgtaaatataaaatgttccagccattgtagaaaacagtctggccagtgtcttacaaaacaaaacatcccagcaaacgtattccagggcatttatctcagagaaatgaaaactaagctcacacaaaaacctgtactcaaatgttcatagcagctttatttgtgatgcaaaaactcgaacagcccaaatggtcttcaatgaatgaatggttcaacaagctgcagtacatcacatcatggaatactatacacaaatgcaaaggaacaaactactgttagtcacaagttgtatggatctccagaaaattacgctcagtgaaaaaaagcaaatctcaaaggattatacaatgtatgattccatttacatattttttgaaatgcaaaattatagaggtgaacagtttagtggttgccagaggtgagggatggttggtgttgggggggtgtgtgtgtccataaaagggtaccatgggggatatctgtggcgatgggacagttctgtatcttcatcaggatggtattgccacagattacacatgtgatatatttgcagagaactcatatacacacacacgagtacacgt

SEQ ID NO: 1105 - DNA, 2100 bp, Homo sapiens
  misc_feature (1)..(2100): DMR6:167096901
gtagagatggggtttctccatgttggccaggctggtctcaaactcctgacctcaggtgatccacctgccttggcctcccaaactgctgggattacatgtgtgaaccactgcgcccggcctcggtttgcttttttgaatgtggctgctaaaaaattaaaatgacatacgtggctcacgttacatccctgctggacagcagcgtcccagacagagccctggaaacctacatgtttctaatttccttatcttcatattttattgttttcagctcagaattccaaccacatgagataatatggaaccttgagcactatctgtagcatctgttgtccatcacagatcttagaattcagcaggtttgataatcatctttcccttttgcatgcaactcattgatttaaaataattctgaccagcacaaggccaatggcacgatcatgtagcatttcattaatcaattcttttcacaccaaaaatatcacttcccattcctggtggtacaaagtgactcaatcagcaaggaatctacctaagcagcagggtcattcggcctacatttgccattttatctcaggggattttatttatttattttctgctttttttgagacagagtttcactcttgtcactcgggctggagtgcaatggtgcgatcttggctcactgcaacctccgcctcctgggttcaaacgattctcctgcctcagtctcccgagaagctgggattacaggtggctgccactgcacctggctaatttttgtatttttagtagagagggggttttgccatggtggccaggctggtcttgaactcctgacctcaggtgatctgcccacctcgacctcccaaagtactgggattacaggcatgagccatcgcgcccggcctctcaggagattttaaaggaatctgcgagatgctttgctgaagtccagatctgcgggaggtggagctgcccgagcccagcgctcaaggcccagccagaaccgaaccaaggctggctggggccgatgcacgcgaagtgcttgtcccgtttacttctaaatgcccacagggtgttcattagacagcgtggcctgaagtgtttcctgatgtcgagtcatggccgcctgggtttcttcacagctttccttttggagctcagggcggctgtcgtcttgggctccaagggtgcctttccgccttctcgggtccttccgggtgctggagccggcgctccgacacagggagatgtcttcatcaaggggattccacagagccactcccagcctaataccagatataaaaagctacgttcatggatgcaagctcagttttctacttaaaaagtgaagagattccgcttgcaagtttgattcagttcaataccttccctgatacctcctgttttacttttctcatatataattcttccgcctatacacaggaaatgcaacaatttttttccaccaagcctcttctaggtgcccagaccacccccgctaaccccagtgtgccctgcacaaacgtggggtcctgtggatgcccggaggtcataatcggggagccctgctctctctcccgcacctggttccctggcctcaggctgagtcacacagtccctcaggcctggagtgctctctgactctcacctgtgtggcaaacgcctctgcatccttcagcgctccaccctggaccttactcctgctgcgctgctcctcaaggcccgggaaagcttcccaggaccgatctgggtgtggatgtgtggggcacgttattctaacaatttgaagtaagtttcttatgatggaagtgcccctgtccccaggtcaaagtacctgctttctaaagcccaagtctaacatccttattccagtctccaggcacgaacctcgccgagacacctccacactgctccccatacctccctgcagttttcctccctgggttcctccatggacacgcttcactctgcagggaacctcctagctcccctccctgctgccccatgtcaggcacccttggggataaaaagcatctgctgtgggtgcatgaagagcatctgctgtgggtgcatctcctggcacgtctgtcttccgtagctcctcttagaactcca

SEQ ID NO: 1106 - DNA, 1600 bp, Homo sapiens
  misc_feature (1)..(1600): DMR6:167110501
gtggctcactccttcccctcttctggggctctatttaaatgccacattctcagtgaaacctcccctgttcaccctcattgaaattgcagctgcctcagttgcacctccctgcttgatttttctccacggtattggccaacttccatactacgtatcttttcattcattttttttttggttgttacctgtgttccatgactaaaatggaaaccccaggaggccaagacttttacttgttttagtcactgccgtatcccttgtgcctggagcagtgcccagcacgcggtgggcatgaggaagtgtttaccggaggaatcgctggactgccgtgtggtacaaagaggacgtggaagacctagggcttattttctgaattcactactcctggctcatacattcttgggaagttactcaacgcgttttgtgctggtttctttccatctgcaaaatgaaggtcacaatgtccattctcccaaaattgtttgtcaggattaaatgaagtaataaacatgaaaagtactttctaaattgtattacacatgcattaattaacatttaacaatgctatttataatcatttgaaaaaggaaggagaggggtggatgacctagagttgtagactctcacttctgtccctgcagaagccgttggcgtttcctatcaagcaacaattttggactttccttaggggatttgtagcttgcttattatagacctaagtggagaaggtaacctagatttccccttaaattacgaggttgttcttaagctgagcgctgacagttgccttgggagtatggaaacttaggggtttctgcgtcctcaaattggtcaagttgtgacacgtggccacagattgtagaaaatggctaacaaaacaacatgagtattttgagggtggaatttctcctttatgcttagggtatgccttcttttgtggctgccactgacctgcagtgggatattggtgagatactgattctctattcactgtgtctttactcataaagcatatatcatatggtattttcaggtttttttattctcttaagaaaactgtagagcctttcagagaactttacaatcatttgaattaatttgtaatttccaagaagaatcaagaaatattccacagatcaataattctgaaacaaagaaaaatttacgtctgaaattgaaattaccaagtgacctagttacatcaacccatcttccttcctccaccttatttgtctcctttctgtgatctgaagtgtgtgctgaggaataaaacttgtggtaaggagggcagcccagcacaccacccagtgtatgggtgaaggaggcagcagtgtggccggagaggagagctgggctgggagcacaggaaggtccccaggactctgtggtcatcagtaagagagggcccacgtgtatatgctggtgaacagaaatgtcaaccttttcaaagtctgacatttaagagaaaaaactgtggctgttggtttgtggaacagacagctccttctttattggtaagttttttttttgtcttggaacttagaaaatattgtatttcttttgtctcaataattgttttatgctttggaggtaatagagt

SEQ ID NO: 1107 - DNA, 2400 bp, Homo sapiens
  misc_feature (1)..(2400): DMR6:167466101
ttctacttctaaaattataaatcacagaagcaattctcaagctttttggttttggcaccactttatactccaaatcttactgaggccccaaagacttttgtttacatgggttacatagactgacatttacattaaaaattataagtgatgaacttaaaagagatgtattatatcataaaataataataatcccattgcataacaatataaaacacattttcattaaaagtggttatattttccaaaaatattagtgaaaacagggcattgtttcacatttttacaaattggcctgggagaagacaaccagattcccagctccacttctgcactcggccctagtgaggtgtggttttggttgatgtccctggaggaaatctgcctgacttgggaatgaagctgcaaaagaaagctacttgcaggagaggtgcgggactcgttttgggaagctgagtctgacagacagccacaggcatgtgaaaccatggtatcattccctgaggtgttgcttgttaacagcagaggactggcaacaatccaagggtccctcgaaagggggatgattaaataaactacagcccatttgtaagaatggaattctatgcaactattaaaatgaatgatgtagtgtattaagtaccgttatgtggaaatgaaagatttatcgataagcataaagtaaaaaataatctgccgagcctatttatataaatatatagtttatataaatatatagtgtatataaaatacatctggaaggaaacgcagtaaagcattattgatagttactttcccagaagggatgggggccttcacattagggcatcggcaggctcacttttcattttacatcttttgtagcttttgaattttctaccatgtgtatatgttatcaagccaaaattaattaatcaatcactgtaaatacaaatttataacctattctgaagacaaaatgaattaatgcatgacaaaatgcctggccctttgtagatattcaataaatgttagctgttctagttaataattttattattattattaaatcatagaataactctagtttgggttatgtttagtctccagtcttccactacctgggtcacccttataagtgctacaacccctgacggtctctcctgaaagtagttccaggtctggtctgaacgccacagcacaatagaacagcctcagaaaccagtttaggttttatttttgggcgttaaatatttcctgtaaccatattttgttagtctagtcattatcgaaacagtacctttgccttcccctatgggttcgattaatttcccttagagaaacccttccaacacctggagtcttcacgcctccccgtgtgcttggatcgggagcacagagtgaagctctgatgctccccgtgctccctcattctacgtgtgctcattttcctctaaggatttattcccacctcgggttttaaaatacctcccacatatacttcctagatttgtgcttacaaaccaagtcatcaataaatgttatttgtttgatgtgtaataattcacttttctatttcactttgccttagactcacaagattttagacaacacccataattccttctccacattactcagtaatcacaatctaaatctaagattcaatctatttaggaaaaataccacacacaaaaaattcaaaatcattttgtttcatgttttaaacagctaaagtagaaataagcatttgacaagcacgactataaactgcaatgtggtggatcccacacccctctgatccgaaactctgtcattcctgcaccacgtagagacactgcgacacatttctcagccttcaccgagtctctgtgatcatgatgtcgagatgctgccacatgtttctcagccttcaccaactccatgagatcgtgacgtcgagacactgcgacacatttctcagccttcactgactccgtgtgaccatgtcattgagacgctgcgacacatttctcagccttcaccgggtccgtgtgaccatgacgtcgagacgctgggacacatttctcagccttcaccgggtccgtgtgaccgtgacatcgagacgctgggacacatttcttagccttcaccgagtctgtgtgaccatgacgtcaagacactgtgacacatttttcagccttcaccgggtccgtgtgaccgtgacgtcgagacgctgggacacatttctcagccttcaccgagtctatgtgaccatgatgtcgagatgctgtgacacatttctcagccttcaccgggtccgtgtgaccatgacgtcgagacgctgggacacatttctcagccttaaccgagtccgtgtagtccgtgtgaccatgatgtcgagacactgctatgcgtttctcagccttcaccgggtccgtgtga

SEQ ID NO: 1108 - DNA, 2900 bp, Homo sapiens
  misc_feature (1)..(2900): DMR6:167702601
tgtagaacgggaagttgctctgggtgagtcagtgagtgtgtggagcgtgaatctgaaggcccaggtcgtgaccataactactgcaggctttataaacactgtacacttaggatatattaaatttatgcaaaatagttttcttttcgaaatagtagattaaccttagattactgtaacttttttatgttataaacttaaatttttttaactttttgactcttttataacactttgcttaaaacacaaacacattatacagctgtacaaaattattttctttctttatattctcattctataagcttttttctattttttcatttttttttttaacttttaaaatgtttctgttaaaaacaaagaggcaaacacacagtggcctaggcccacacagggtcagggtcctcggtgtcactgtcttccccccaacatctggtcccactggaaggtctgcaggggcaatgacacgcacagagccgtcacctcctgtgatgacaatgccttcttctggacacctcccacaggacctgcctgcagctgctttacaattaacttgtttttctaattagtaggaggagtacactctaaaataacaataaaatgtatagtatagcacgcatcatcattatcaagtagaatgtgctatgcacaactgtacgagctatacgtttatacaactggtaacgcagtaggtttgcctataccagcatcaccgcaaacgcgtgagaaatgcattgtgcaatgacatcacaaggcagtagaagtcttccagctccacgatcatctcagaggcccaccgttgtctgtgccatccatcatggactgaaacgttgctaagcgactcacgactacacaaagaataagagcctcactgcttccttctgttgcctgctggaccccccattgagtgtgtggtcaagggcgcactccacggtgagtatgggtcatcactgcacagtgtgtgtgtggccatggacccactccacggtgtgtgtgtaaccatggagccctccacagggcgtatgtggccagtgaggaaggcaggcatggttcagctcctgaaggcctgggcttagctctcaaggaaccgggcttggacacatttggcctgtggagggctgaccctcagctcctgcctcacactgcccccatgctccactgtcggcagcctttgaagacatttcaggccccatgtctgccaatctcccagggccatgtcccagccacgccagcctcctctgtttctgagcaaaccaggctcctccagcctcaggccctgagtgttccacgctgttggtagctgcccccacccatgcgattcctcccttctaggatggtctcatgcaggtgtctctgtctcccacacagcccaaatgcccagggagggctgagcctctctcagtggagggagccagcctctggaaggcagccccagctcccggctcggacgctgactcagccctgggaggggagggggttccagggaaactcctcccagttcgggagagacacttcccagctccggagagactcctcccagctccggagagactcctcccagttccggagagactcctcccagctccagagagacacctcccagttccggagagactcctcccagctccggagagactcctcccagttccggagagactcctcccagctccggagagactcctcaaagctctggagagactcctcccagttctggagagacacctcccagttccggagcaactcctcccagttctggagagactcctcccagttccggagagactcctcccagttccggagagactcctcccagttccggagagactcctcccagctccggagagactcctcccagttccggagagactcctcccagttctggagagactcctcctcattccagagagactcctcccagctccggagagactcctcccagctccagagagactcctcccagctccggagagacacctcccagttccagagagactcctcccagctccaggaacgtgtctgaacgtggttggcttgttttcctctggccactgccaggaccctgggcgaaggtttggccagcagtggaagacatagcacagtggccccagcagactccacggtcagcacagagctcctgcccggggtcagcctgaggcccaccctcctctggcagctgtcgctggacctgctgcttcagaccactgtactccaagctcctggttttactgccaaatgtgcagcaccaagacagcttgaaatactctttcactggtcttgatgagaattcacccttcttgaagtgaattccttctctttcttttcacgtggtaggtccaatgtctcctcctcagagtggccttctctgaatcctctttatttctgtccctcacagggaaagccctgtttattttgtgtctccaccacccatacagagaagaaaggtcttgagaggggtgtttggtagggcctctctgaccacagcatcctcagagcccctgaactagagctggcccaggaaggaccaaaccagaaatctactttttcttctttgttatttctttatttaatattaattgcaaacaaatttgtaattacaagcatgctaaaaaatcttttattaagaggcacatacacactttgcagcttccaggtgtctgagtttattggttacatttttcaaaaggccatcacacgaccctggagagaagcccccagctgccgagcagcagtaggaggagggcgaggccacaggacggcacgcgggaggcgccagccgcagagaacacgcacaagcctgacggctggagcagcaccacgtgcatttccttaaagaacggaggtgcagatccgggcagggcgagctcagggttggttagttcaggagctctgcgcgtctcagg

SEQ ID NO: 1109 - DNA, 1500 bp, Homo sapiens
  misc_feature (1)..(1500): DMR6:167709701
acagcctgtgaaccaacctggcatcacccatcacaccccacagcctgtgaaccagcctggcatcacccatcacagcccgcagcctatgagccagcctggcatcacccatcacaccccacagcctgtgaaccagcctggcatcacccatcacaccccacagcctggcatcacccatcacaccccacagcctatgaaccagcctggcatcacccatcacacctcacagcctgtgaaccaacctggcatcacccatcacactccacagcctatgaaccagcctggcatcacccatcacaccccacagcctggcatcacccatcacaccccacagcctgtgaaccagcctggcagttgccggacagcacaactcagacgccagggttgccagtccccattcatgtggagagatggctctaatgggaacgggtgggcaggtgccctgggggcagccccggctcctgaaaagtgtccatctggggggcggctcttgagtccagggtgccgctgggtgcccgacacagagctaagtcctcgatattcatcatcctgatccaaagctctcccacctccaaataacctcccagacgcactagtgaaggccctggggagacgggaggagttatttttaaaaagaaaaggaaaaagagaaccaggagcattgagggcaatgtcatcatcaaagacgttctctggggctccagcaagccatgctggcctcgttgtacaggcatcacatggtgacttcaggctcttaaatattctgtcttctctcatggaagcttatcacagagagagcacgggcgagcaattacctcctcctaatttccatcacatcttggcaccttccatgcagctggggttatctttgtgatgcacgctttttatgaataatgagagtcatcgggaagcaagtgctcaccaggggacagacgcaaacaagtttccatcccttctccctttcacacacggatggcaaccccagttcccttgctgggtctttcctggtgggttttgcagtcacacagcctgcgccatagcatgtgtgcctgcagaccccgcacccgccggagagagcccagcagagccgtcttagtgatgctgagagccagctccttctctgtgtttcaaggaaaagttcccaaagagaccttgccaaggaaatgaagcctcactacctggaattttcataaaacaaaggaagaaacatagaattctagaaagttagttggaaatgtaagtataatgacaggtttcaggggagttagggatcgttctgaacttttataattctcaatatgatggcattattatatactaggggaaaaaatcaatgtgacaaaaccagaattaaacagaaatgtcacgtgttgatgtgcaaattggataatgtgcacaatgaagtcaggtcattagaatttctccataaagggtagaaagctaagtccaatcaatgtttttaaataattacttcaaattctagtaagtgatggcctgtccctc

SEQ ID NO: 1110 - DNA, 6100 bp, Homo sapiens
  misc_feature (1)..(6100): DMR6:168234001
ggggaggaggagcacatgcgataactaggggaggatgagcacggtgtgataactaggggaggaggagcacggtgtgataactaggggaggaggagcacatgtgataactacgggaggaggagcacggtgtgataactaggggaggaggagcacatttgataactgggggaggaggagcacggtgtgataactaggggaggaggagcacatgtgatacctacgggaggaggagcacggtgtgataactaggggaggaggagcacatgtgataactaggggaggaggagcacggtgtgataactaggggaggatgagcacggtgtgataactaggggaggaagagcacggtgtgataactaggggaggaggagcacagtgtgataactaggggaggaggagcacatgtgataaccaggggaggatgagcacggtgtgataactaggggaggaggagcacatgtgataactaggggaggaggagcacggtgtgataactaggggaggaggagcacggtgtgataactaggggaggaggagcacatgtgataactaggggaggatgagcacatgtgataactaggggaggaggagcacatgtgataaccaggggaggaggagcacggtgtgataactaggggaggaggagcacatgtgataacgaggggaggaggagcacatgtgataactaggggaggaggagcacatgtgataactaggggaggaggagcacatgtgataactaggggaggaggagcacggtgtgataactaggggaggaggagcacatgtgataactaggggaggaggagcacggtgtgataactaggggaggaggagaacggtgtgataactaggggaggaggagcacatgtgataactaggggaggaggagcacggtgtgataactagaggaggaggagcacggtgtgataactaggggaggaggagcacatgtgataactaggggaggaggagcacatttgataaccaggggaggaggagcacggtgtgataactaggggaggaggagcatggtgtgataactaggggaggaggagcacggtgtgataactaggggaggaggagcacatatgataaccaggggaggaggagcacggtgtgataactaggggaggaggagcacatgtgataacgaggggaggaggagcacatgtgataacgaggggaggaggagcacatgtgataactcggggaggaggagcacatgtgataactaggggaggaggagcacatgtgataactaggggaggaggagcacatgtgataactaggggaggaggagcacatgtgataactaggggaggaggagcacatgtgataactaggggaggaggagcacatgtgataactaggggaggaggagcacatgtgataactaggggaggaggagcacggtgtgataactaggggaggaggagcacatgtgataactaggggaggaggagcacggtgtgataactaggggaggaggagcacatgtgataactaggggaggaggagcacatgtgataaccaggggaggaggagcacggtgtgataactaggggaggaggagcacatgtgataactaggggaggaggagcacatgtgataactaggggaggaggagcacggtgtgataactaggggaggaggagcacatgtgataactaggggaggaggagcacggtgtgataactaggggaggaggagcacatgtgataactaggggaggaggagcatggtgtgataactaggggaggaggagcacatgtgataactaggggaggaggagcatggtgtgataactaggggaggaggagcacggtgtgataactaggggaggaggagcacatgtgataactaggggaggaggagcacatgtgataaccaggggaggaggagcacggtgtgataactaggggaggaggagcacatgtgataactaggggaggaggagcacggtgtgataactaggggaggaggagcacatgtgataactaggggaggaggagcacatgtgataactaggggaggaggagcacatgtgataaccaggggaggaggagcacagtgtgataactaggggaggaggagcaccgtgtgataactaggggaggaggagcactgtgtgataactaggggaggaggagcacggtgtgataactaggggaggaggagcacatgtgataaccaggggaggaggagcacggtgtgataactaggggaggaggagcacatgtgataactaggggaggaggagcacatgtgataactaggggaggaggagcacatgtgataactaggggaggaggagcacatgtgataactaggggaggaggagcacatgtgataaccaggggaggaggagcacagtgtgataactaggggaggaggagcaccgtgtgataactaggggaggaggagcacatgtggtaactaggggaggaggagcacggtgtgataactaggggaggaggagcacatgtgataactaggggaggaggagcatggtgtgataactaggggaggaggagcacatgtgataacaaggggaggaggagcacatgtgataactaggggaggaggagcacggtgtgataactaggggaggaggagcgcggtgtgataactaggggaggaggagcacatgtgataactaggggaggaggagcatggtgtgataactaggggaggaggagcacatgtgataaccaggggaggaggagcacatgtgataactaggggaggaggagcacatgtgataactaggggaggaggagcatggtgtgataactaggggaggaggagcacatgtgataactagggtaggaggagcacatgtgataactaggggaggaggagcacatgtgataactaggggaggaggagcacatgtgataactaggggaggaggagcacggtgtgataactaggggaggaggagcacggtgtgataagtaggggaggaggagcacatgtgataactaggggaggaggagcacatgtgataactaggggaggaggagaacggtgtgataaccaggggaagaggagcacatgtgataactaggggaggaggagcacatgtgataactaggggaggaggagcacagtgtgataactaggggaggaggagcaccgtgtgataactaggggaggaggagcacggtgtgataactaggggaggaggagcacatgtgataactaggggaggaggagcacggtgtgataactaggggaggaggagcacggtgtgataaccaggggaggaggagcacatgtgataactaggggaggaggagcacggtgtgataactaggggaggaggagcacatgtgataactaggggaggaggagcacggtgtgataactaggggaggaggagcacatgtgataaccaggggaggaggagcatggtgtgataactaggggaggaggagcaccgtgtgataactaggggaggaggagcacatgtgataactaggggaggaggagcacggtgtgataactaggggaggaggagcacatgtgataactaggggaggaggagcatggtgtgataactaggggaggaggagcacatgtgataactaggggaggaggagcacggtgtgataactaggggaggaggagcacatgtgataactaggggaggaggagaacggtgtgataaccaggggaagaggagcacatgtgataactaggggaggaggagcacatgtgataactaggggaggaggagcacggtgtgataaccaggggaggaggagcacagtgtgataactaggggaggaggagcacggtgtgataactaggggaggaggagcacatgtgataactaggggaggaggagcacatgtgataactaggggaggaggagcacggtgtgataaccaggggaggaggagcacatgtgataactaggggaggaggagctcatgtgataactaggggaggaggagcacggtgtgataacaaggggaggaggagcaacaattccaggagttggagattttacaaacagcatctagatgaatgacttgatttttccaaatttctgtcttcttttagacagaatgtgtattggtttcaagtatcaggatagttgaggaactgaatgagtttatacaactgattctctgtgtggagagggttgaagtctcattttctcctttggtttattttttccctttgacctgtttgggggttgagcctatggaatcatccctgcaaaaataatcagctttacacgcatgttaatttcactaaaatccagcaaagcctaatctttgaaacgcaagtgtgtttactaggacgagtcacaacctgacaccctgtggctgatgccaacaggcctgacttactcagaatttaccatcagtgtctaataacttggcatggctctgggtggagattttttatggaaattttagtgaattcttaccaatgtggaaccatttccatgcttgaaggactgaatcatataaacaacattgctttcataaagtccgtaggctgaattaggctttaaaatctgaacagcaaaggtgtacttagcattagaaacagaaacactggcgggaggtgaagggtttataaagggaattgtatcttttatacacacgcagcgtcttctcggaaactctctgaaatgccaagtctgagtatttcccagaatgagtcaaaactacatcttgcggttgataaaaagaagcattttaggatgtatttaaatgttgcattgtgtctccctggggcatttgtgttttatctcttactggaataaaactttgctccatagaaagaaatgtgtggtgcgctgttgagatgagggagtgagggcgaagtcccttccaaggccccaggggtcaaccccacaaccctctccacctactgcatagggagccttgagactcggggacaggtcctatttcttctctactttttatgacaaggctgatattttttagaaatattaatgagcatttctattttgcattttctatatacaacctacttagcaaatagcagccttggtgggatgaagatcattacaaaagaatgcaaagagacagagtggacagtcccttccgacacgcaagccaggtaaatgcaaagagacagagtggacagtcccttccgacacacaagccaggtaaatgcaacgatgcgaggcagggaagcctgagagagagaacacgcgatgatttcaccgcctgtgtcagcatcgatgccagctcggtggaaaggctgtgaggtccctatcatggagctgctggcagtaaggagagaggggctgggcagggaagcccacccttcacattccagagagtcactgggaaaggaagggacagagacacaggggagaaggcagggccgggctgccccagtgagaggaaatcaccggggcaggggctgaggggaaggctggtcagggcagccctgctcccacctgcaggcccggctggcagcaggctgtgaagtctgggccgacttgaaagggtcagcgtgggctcccagccaccttctccaggcctcagcggcctgcaggccgaggggagagtgagtcatcctgccctcggcccgtgtggcagagaaaggagagcactgagttactggcctgaggcagggccctgaagagccaggggcctgtggtcagcagaggggcctgtggactggggagggtctgtgataagaaccgaggatctgtggtcagcagagaggcctgcggtcagcccacccaagggctgacaccaccaaatggagtactgcattgctggtcaactggtttttaaatcaccatggactaacgatcagccagtaacccctcctcccacgtcagttcagtcgaaataaagacacgtctccttggacatctgggttgaaggatgggtgaggtgtggcccgcaccctccaccttgcattgcgtctattgggaaacaggtgcttctccaatagccttggttcaggagtaaaacagatgccttgtggctgggggctgcggagggcaaggtggggaggcaggtttgggacaggatgacagtggtggggatcagcacagcgtctcctgtaatcggtgctagaacagatctcagga

SEQ ID NO: 1111 - DNA, 600 bp, Homo sapiens
  misc_feature (1)..(600): DMR6:168290601
aatgccgattaaagagctgatccagggaagacagccatcacttcaacaacgatgccctccatggagggctgattctagggaagactgagcgatcactccaagagtgatgccatctatggagggctgattctagggaagactgagcgatcactccaagagcgatgccattcatggagggctgatccagggaagactgagcaagcaatcactccaagagcgatgccatccatggagggctgattctagggaagactgagcgatcactccaagagcgataccatccatggagggttgattctagggaagactgagcgatcactccaagagcgatgccatccatggagggctgattctagggaagactgagcgatcactccaagagcgatgccatccatggagggctgattctagggaagactgagcgatcactccaagagcgatgccatccatggagggctgattctagggaagactgagcgatcactccaagagcgatgccattcatggagggctgatccaggaaagactgaacgatcactccaagagtgatgctgtccatggaggcaatgagacaggatggaactaaagcacagtgagtaa

SEQ ID NO: 1112 - DNA, 3700 bp, Homo sapiens
  misc_feature (1)..(3700): DMR6:168592301
cctccctgaggcctcacgggcgtctttctagaggatctccgagctcctcctccttcctgaggcctcacgggcatctttctagaggatctccgagctcctcctccttcctgaggcctcacgagcatctttctagaggatcgccgagctcctcctccttcctgaggcctcacgaggggcctctttctagaggatcgcggagctcctcctccttcctgaggcctcacgggcatctttctagaggatctccgagctcctcctccttcctgaggcctcacgaggggcatctttctagaggatcgcggagctcctcctccttcctgaggcttcacgggcatctttctagaggatcgctgagctcctcctccttcctgaggcctcacgggcatctttctagaggatggccgagctcctcctccttcctgaggcctcacgggcatctttctagaggatctccgagctcctccttcttcctgaggcctcacgggcatctttctagaggatctccgagctcctcctccttcctgaggcctcacgggcatctttctagaggatctccgagctcctcctccttcctgaggcctcacgggcatctttctagaggatggccgagctcctcctccttcctgaggcctcacgggcatctttctagaggatggccgagctcctcctccttcctgaggcctcacgggcatctttctagaggatctccgagctcctccttcttcctgaggcctcacgggcatctttctagaggatctccgagctcctcctccttcctgaggcctcacgggcatctttctagaggatctccgagctcctcctccttcctgaggcctcacgggcatctttctagaggatggccgagctcctcctccttcctgaggcctcacgggcatctttctagaggatcgccgagctcctcctccttcctgaggactcacgggcgtctttctagaggatctccgagctcctcctccttcctgaggcctcacgggcatctttctagaggatggccgagctcctcctccttcctgaggcctcacgggcatctttctagaggatctccgagctcctcctccttcctgaggcctcacgggcatctttctagaggatctccgagctcctcctccttcctgaggcctcacgggcatctttctagaggatggccgagctcctcctccttcctgaggcctcacgggcatctttctagaggatctccgagctcctcctccttcctgaggcctcacgggcatctttctagaggatctccgagctcctcctccttcctgaggcctcacgggcatctttctagaggatggccgagctcctcctccttcctgaggcctcacgggcatctttctagaggatctccgagctcctcctccttcctgaggcctcacgggcatctttctagaggatctccgagctcctcctccttcctgaggcctcacgggcatctttctagaggatctccgagctcctcctccttcctgaggcctcatgggcatctttctagaggatggccgagctcctcctccttcctgaggcctcacgggcgtctttctagaggatctccgagctcctcctccttcctgaggcctcacgggcatctttctagaggatggccgagctcctcctccttcctgaggcctcacgggcatctttctagaggatctccgagctcctcctccttcctgaggcctcacgggcatctttctagaggatggccgagctcctcctccttcctgaggcctcacgggcatctttctagaggatcgccgagctcctcctccttcctgaggcctcacgaggggcatctttctagaggatcgcggagctcctcctccttcctgaggcctcacgggcatctttctagaggatctccgagctcctcctccttcctgaggcctcacgggcatctttctagaggatctccgagctcctcctccttcctgaggcctcacgggcatctttctagaggatctccgagctcctcctccttcctgaggcctcacgaggggcatctttctagaggatcgccgagctcctcctccttcctgaggcctcacgaggggcatctttctagaggatcgcggagctcctcctccttcctgaggcctcacgggcatctttctagaggatctccgagctcctcctccttcctgaggcctcacgggcatctttctagaggatctccgagctcctcctccttcctgaggcctcgcgggcatctttctagaggatctctgagctcctcctccttcctgaggcctcgcgggcatctttctagaggatctccgagctcctcctccttcctgaggcctcacgagcatctttctagaggatggccgagctcctcctccttcctgaggcctcacgggcatctttctagaggatctccgagctcctcctccttcctgaggcctcacgggcatctttctagaggatctccgagctcctcctccttcctgaggcctcacgggcatctttctagaggatcgccgagctcctcctccttcctgaggcctcacgaggggcatctttctagaggatctccgagctcctcctccttcctgaggcctcacgggcatctttctagaggattgccgagctcctcctccttcctgaggcctcacgaggggcatctttctagaggatctccgagctcctcctccttcctgaggcctcacgggcatctttctagaggatcgccgagctcctcctccttcctgaggcctcacgagcatctttctagaggatggccgagctcctcctccttcctgaggcctcacgggcatctttctagaggatggccgagctcctccttcctaaggcctcacaaggggcatctttctagaggatcgccgagctcctcctccttcctgaggcctcacgaggggcatctttctagaggatctccgagctcctcctccttcctgaggcctcacgggcatctttctagaggatcgccgagctcctcctccttgggttccttcctggagtcacggccccatgcgcctccccaagacggaaatctcccgtgctgtggtgacacaggacctgtcatgtgcgaattcacccctccttgttccctctaccagcgtgattaagtcctttatagaataaggacttgtctcctgccagagagaaccacccccgtcagctctgcctgcagaacgctgcgttctggggtgccccaggagggagtgacagtcacaggtggaaattgtgttctgtggccttctcttcccaggggccgtcatcagtttgtttaaagatcttctgcctccactgtggcccttactaaaagaaaatggaattgcatttctccaatgagtctgaatttcccacatgcagccaggtttatcaggtaaaattgcatgggttaacagccctcatcaaccacgatgtttatataaacatacacgaagtttcttctgactctgctctaatatctttaatattttatatcatgctcatcaaattttaagaggttgatttaatccatcttattttgcttatgataagctttcaaatatcacataaaatcctcaagagagacgtttcaagaatttttgagaacaatttctatagatgcagtatgttcctggataaagcacagaaagtatgtcgtgtctggatcatcaaaccataaattctgtgcactaataaaatttctgaagaagcgctgcggcggtgc

SEQ ID NO: 1113 - DNA, 2900 bp, Homo sapiens
  misc_feature (1)..(2900): DMR6:168713101
gcattgtggtagccccgagagagtcagaagggaactgcacaggcatgcacagtgcacatggcagaggccatccagctcagggaagagaggcacgtgtgtgcagagagctacagcacagcaaggagagacacacacatgcagagagctacagcacaacgtggccaggatgtggggaaactggaggcacaggagaagacagagccgaggattcctcagtggacaaactggcctgtgagcagaaacagaaaagctctaagcacgtccactgggctaatggccaggagggaaaccatcctagcagggttcattcaggagcaggaccgagccaggtgcccagtcatggtggtgaactgctgtgtctggtctctctatgcaatctgcaattctaagctcattctattaaaaaatgtatctcttaattttaaagaccacctgaagatttacattttctagctgcacatatcctatagagggaaatatttatttcatctctctgggatttttccaggaactaaaacctcaggcaccaaaacctcaggcaccatctgcacttcacccgggggtctcctgtcagatacagattctgcagctctgccctctggctgtccacaccattggtgctgcaccagagctgacccttcacagctacttagtggttacttggagttggtaaaataatggatacttggacctaaatcaaactttttatttatcaaaataaaaaaaaatgcccttaaagatcatcaggtttagtagctttcaaacatcttcaccatggaatctgtgccccaactcaatctgacaaggaagcctggagcataagacacacatcacactggggctggctgggcaaaggttatggaggctggttgctcttaccagcctcctgcttcccatgcccagccccctagtggccagggacaccctgtccagtccctgggattcagagaacccagctttaaatgacactgcagtttactgctgaagccaatgacggggccatctctgcctcagagcctggccaagtgcccgtccagtcatctgtggtcacgcccatgcaggggggtgtgctccttacagatgccattgcacccacaacacataattgggcagaaagaaaagagaaggcctctttctctggcacagggtaccttctccaggactgcagcagcatggcagcatagccaatggcacaggttgggcatctcaatcttgtcctgggtcaggccttagcagctgtggaaccttagtaagttacttgttacttggtctttccaagctctgatgttggcttcacatggagcttcgtggggctcaattaccaagtgacctgcactgattaagtgctcaataaatgtttgtgatgaggagggtaatgatggtgatgaagatgattgatgatgaggatgatggtgaggagagggaggatgaggataatgatggtgatgaagatcatgaggaggaaagtgatgaagacgatgaggatgatggtgaggaggaagagggtgatggtaatgaagatgatgaagatgatggggagaaggaggatgatggtattggagataatgagaataatggggaggaggaggatgatggtgatgaagatgatgatgaggatggtggggaggaggaggatggtgatgaagatcattgatgatgatgatggtgaggaggaggataacagggatgaagaggatggtgagaatgatggggaggaagagggagatggtgatagagatgatgaggatgatgatgatgaggatgacagagatgaagatgatgtgagaatgatgatgaggaggagggggattgtgatagagatgaggaggaggatgatggggaggaggaagatgaagacagggatgaagatgatggtaagaatgatggggaggaggaggaagacggtgatagagatgatgaagatgatggggagaaggaggaggatgatggtgatggaaatgatggtgaggatgatggtgaagaggagggggatggagaaagagatgatcgtaaagattatggtgaggaggaggaggaccatggtgatgaagatgatgatgagcataataggaaggagaatgatggtgatggagaagatgatcaggagaaggaggatcatggtgatgaagatgatgacgaggataatggggggatggaggaggatggtggtgaagataacggtgagaatgatggtgaggagtaggaggatggtgataaagatgattaatggtaaggatgatggtgaggaggaggagaaggacaatggtgatgaagataatgatgaggaggacaatggtgatgaagatgatgaggatgatggcgaggaggaggatggtgatggatatgatgttcgggatagtgaggaagaggaggatggtgttgaaggaagattatgatgaggatgatgatgaggaggaggaggagatggggatgaagatggtgatgaggatgatggggaggaggaagaggatggtgatgaagatgattgatgatgacagtgatggggagaagaaaaaggaggatgctgatgaagatgatggtgagaatgatgatgatgagaaggatggtaatggagatgataataaggatgatagtgaggaggaagaggatggtgatgtagatgtttgatgttgaggatgatgggaggaggaggaggatggtgctagagatgacaataaggatgatggtgaggaggaagaggatggtgatgaagatgacagtgagaatgatgatgaggaggatggtaatggagatgataaggataatggtgaggaggaagaggatggtgatgaagacgattgatgaggatgaggaggaggaggatggtgattaaaattatgttgaggatgatggggaggaggaagaggatggtgatgaagatgattatgaggatgaggagg

SEQ ID NO: 1114 - DNA, 500 bp, Homo sapiens
  misc_feature (1)..(500): DMR6:168803301
ctcctgtctccactccccatcctccaaggaagcccaggcttcacgggaagagtgccctaaataccactttcccttctctgggaccccaaccctgccgtcttcatctccctctgtacctatggaaaatgactgcaatttcaacagttctttctagaggctgggtttgggcacctcgattagactatgaacttgtaggtgtcaggagtcacacatctttcttttctgtcaccttcccgccagtcggtttctgcaaccaacacacacggttcgtcgctgtgagtcagcctgtggactggaaaggcggggcatggcacacagggacagcgctgaactttccaaaccacaggaagaaatcagcatttttggaagaacaagtgagtggatgaatgaatgccgtcgagatggctgagaaaacagttgcatggaagggaggagaaattcttctggttgtgggggaggtgatttgggattaggaaaagcttcatggaagaattgacatc

SEQ ID NO: 1115 - DNA, 500 bp, Homo sapiens
  misc_feature (1)..(500): DMR7:1425701
ctccccttttagcggccacagcaagccccagagggaactacattccccagcatcccttgcagcctgccctggccatgtgactatattctggccaatgaggatagagcaggccacacctggtgggccctggatgtcagcgagggggttatatgtccttggtttctgccccctggacctcacacccacagccagagctggcgtcgaagaccaccctggtcccatgtctctccacctaacgccctccgggccccaccccaccatcctgcccctctgacctctcccagcctttccactcggacggagtccatgcctggccagaacttgcaactctccctggcctcagggcccctgcctggctcagccgcagccctcccaccaggctgcctctccctcccctcagcaccctccccagggccccacgtccctgcagagccccggcccccaggactgccattctctttatgcctccaccaggtcctcgaggacaggagctggtgggt

SEQ ID NO: 1116 - DNA, 1200 bp, Homo sapiens
  misc_feature (1)..(1200): DMR7:1669901
gtgggcggggagggccggggacggaccgcgaggacgccccctgcgctttctaggacctcccctccttccccagcccctgcgcgtcgccgggagagggaaggagcgggttgccgcggggagccgaggagagcagggggctcgggaggccagggagagaaggggagggccagaggctccgagccggactcgcggcggaggaagagggggtggaagggagcgcgcaggcgggcgagggagcgagggagggagagaaggagggagggagggagggaaggggggcgggagggggcagggcgagcttgaattcccccccggccgcgcggcgaggggcggggccgcgcgcgcagatcgatgggcgaagctggggaggaatttcaatcccgggagcgaagttagagcttgaaggacggcggcggctgcgggcgcagccccggaaccgaggccgggcgggcaggtaagcggcgagcgcggccgggcgctgaacctgggggacttgggacccggaccacccccggggagcggcgcggccaagccccccgccacctcgaaccccgggcgtccccgagtgcgcagcgtgcgcccccagcccctgctgcgcccccaggcctggcgcgcgatccgagcgcagcgggcaaagttggaggaacttggcggcggcggagcgggcgcaggctcagcccgacaaagcccgggggcccgggtcggggtcgctgccgcagcccgcacgctgccccgtgcctccgagaggtcccttccccagcgcctctctcccttccgtcccccttcgccgtccgcaccctgcccggcgccccccagacgcggccccctgcccttcccttcccggaaattagggggctgtcctcacctcctggccgagtcgctgacccctccccaggctcgcatcgccctccctgctgggccgccctccccccgacgctgcgagcctcctcgctccgcgcggggaccgtccagtcacgcacggggaggggtcacattcctcggtcccagcccctgagtccaaccactggcgggggggtggggtggggggcttcgctccgaactgaacttactgggtgctttccacccctcgccccacctggagtccatcctcgtcctcgtccctctgggggctgggaggaggctgccaagcctccgtgccccaacctgcctctaaagacaagcgcccccatttccatcctt

SEQ ID NO: 1117 - DNA, 200 bp, Homo sapiens
  misc_feature (1)..(200): DMR7:1905601
cctatggaagatgctcttgtggaattcatgattggtgaagcactgttccaggtgcttggaatagctctgtgggcctgggctctgtgacctccctctgggacctctcccgtgagtgaggccggcctgacccccatctgtgtcctgggatgattttaagaggaacctggggctgggcacagtggctcacacctgtaatccca

SEQ ID NO: 1118 - DNA, 900 bp, Homo sapiens
  misc_feature (1)..(900): DMR7:3648001
attacaggttttatctgagaagttgaaaaccccatacatttatttttctgatttactgagtccaaagtttgctatctttgcatatcaaagatgagcttagctttgtcatataaatacagtctaatttgataataaaattgttctgtgttattttggtttagatatattttctttatttccatttatttctcaaaatatgaaatgtgaatatcgatgccatgctgtacttctctttcctccacgacgttatttatgttggtagttatcagattagaacacaaaatcttaactctgtacagtgccattcttgtgcttaattgcaggttcttgtgctcaaattgcatcctgtagcctacctgacaggaatgtgcaagcacaagtattcttgaatgtttttttcctggaaatgcaaagtttatagatgaatgtttcaaaccttcagtcagctttgcaatagacaacttgccagtaatgatctggattgtgaagtatgggcagtaaacagcatcccaggtgactcagaaacagtctgattcataattgtccatgcttaaatacttgaacatccattaacttattaccatttcatttcaatttcttcaagaaagatttgtttaaattagcgcttgcattggaagtcacaacttaatgctcgaatgaagtagatctggttgtaataatgtttttatagttaactaggctttcaaaataatgtgcttttaaaattttatattttataggcattttgtgaatgtttatagagtatatgtgtgaaccgagccatatttggtataagtaaaacagacgagtagatacgggttccaggcctgctttcaccgtaattctgaccttgggaaaattacttattctccctttgcctccattttgccatgtcgatga

SEQ ID NO: 1119 - DNA, 1300 bp, Homo sapiens
  misc_feature (1)..(1300): DMR7:4366601
taatggaacaaaaatgagtcagaggagctattctttcctatgctttgttgataattcccacatataccccaaaactcatatcacagtcatggactaataaaataagatggcctacaataaatttttccctctttttttttttttttttttaacctctgtcacccaggctggagttcagtgctgcaatcatagctcgctgcagccttaaacttctgggctcaagttatcctcctgcctcagcctcccatgtagctgggactataggtgtgcaccactatgcccagataatttttttttttagagatggagtcttggtatactgcccaggctggacttgagctcttgagttgaagcaatatccctgcctctgactcctcccagaatgctgggattataggtgtgagccaccgagcccagccccttacaaaaatttaatatggaagtccactgctgtggtgcgcacttgtactcccagctgtctgagaggctaaggaaggagaactgctcgggctcaggagtttgagttcagtctggacaacatagcaagaccccacctgtaataaataaagacaaattaaaagactttaatatggtttcagcctcttgctcgtttttgatgtgtgagtgaagcgttgctagagaaaacagcaatggggactggagtgtggtttacccagatggcgccgtgttctatcaccccacgatgcaactactcaaccccaggggaggctggtgtcagtgaagccagtgcttctgggggtcgggggtgtgagtctgggggacacactggagcagcctcccaaaacttggtctcacacgaatgtaaatttgcagttgttaatttttatgcagtgaatgaggaattttcccgagtctctcaactatttcctatctgttgattgcacaaatgtttcagcaccttggggaagactgaatgattggtgtgaattcttcactcccttgtggtcatcttgcatgtccacaccctggtcatggcttcacaaagggcaaggtatttctccaccatttgactttgagcttagccatatgtcatgctttggctaatgggatgttagcaggtgagacgccaagatgtaatgtatcttcatccagttgggcttgtgctctcacacttaggccaccaccatgagaagaacacgcctgaggtatctagctgaccccagaagaataacaggcacagagggaagaggtgaatggaacccaggcctggagacaggctcaaccaaacccaggctcgatcagtcacactccagccaaccagcagaggtgaaccccagaa

SEQ ID NO: 1120 - DNA, 2600 bp, Homo sapiens
  misc_feature (1)..(2600): DMR7:4801401
gactctctccctcccagatcacagtgagtatctgcccaagacgtgtcagcgactgagcgaccgtgtggcccagctgctgggggctgagcagccctgagccctctccatctggccccgtctcaggttgcaggtgtctgtggggcaggtaaggaaacctaggacccaaggggggaacgatcccaggggaccggccatcagggtgctgtgcggggtctggggtgggttcccgcctgagcaccaggcagggctcaccttccggagctgcaccccggaggccgctgagtccgttcctctgcctctctgggagcgcttttccacaggggccgccggactctggccagtcggggtccccaggctcagggccaagtggagtgctgggaggcgtgagcaagcaggacgagtccgtgtgcggggggccagcctgggagcccccacggctgggttgccttccagggggggcctgtgcccagggagcccccctcaagggaagagtacgctccggggccacttcccgggctgctgggccagggtccctgggagccagggggcagctcggggcctccaggtgcccgtcaaggaccacgtggtgcataccctagggagaggaagggtgacagctcaggtagaggagtggccaggtggacacagcactcgggcaactgggcagcctgcagcagaagggccgccaggccgcggggcagaggtcagcaaaggactcccgcagcctgtgcagcttgagacgcgcaagaggcaaaggggcttccccgccatccggagcacagcctgcgctgggccaggactcccggggttcccagagctcccgcctgctgcccccagcccagcttccaacccttctcctgtcctcccgggcacctcggggcacgctggctggggggccccctccccaggtacctcggggcatgctggctgggccccctccccgggtacctcggggcacgctggctggggggccccctccccgggtacctcggggcacgctggctgggccccctccccgggcacctcggggcacgctggctgggccccctccccgggcacctcggggcacgctggctggggggccccctccccaggtacctcggggcatgctggatggaccccctctctgggcacctcagggaatgctggctggaccccctccccgggcacctcggggcactctagctggggggccccctccccgggtacctcggggcatgctggctggaccccctccccgggcacctcggggcactctggctggggggccccctccccgggtacctcggggcacgctggctgggtcccctccccaggcacctcggggcacgctggctgggccccctccccgggcacctcggggcacgctggctggggggccccctccccagacacctcgggtcatgctggctggaccccctccccgggcacctcggggaatgctggctggaccccctccccgggcacctcggggcactctggctggggggccccctccccgggcacctcggggaatgctggctgggtcccctccccgggcacctcggggcacgctggctggggggccccctccccgggtacctcggggcactctggctgggccccctccccgggcacctcagggcacgctggctggggggccccctccccgggtacctcggggcacgctggctgggtcccctccccgggcacctcggggcacgctggctggggggccccctccccgggtacctcggggcactctggctgggtcccctccccgggcacctcggggcacgctggctggggggccccctccccgggtacctcggggcacactggctgggccccctccccgggcacctcagggcacgctggctggggggccccctccccgggcacctcggggcacgctggctgggtggccccctccccgggcacctcagggcacgctggctgggtcccctccccgggcacctcggggcacgctggctgggtggccccctccccgggcacctcggggcacactggctgggccccctccccgggcacctcggggcacgctggctgggtggccccctccccgggcacctcggggcacgctggctgggtcccctccccgggcacctcggggcacgctggctggggggccccctccccgggtacctcggggcacactggctgggaggccccactgccaggcctgccagggctgccggggctggctctgctccgcagaccccacagaaagtggcggacgtagagcaggtgctggtagatgctgtcgtccaggcagttggcttccaagtccacctggaagccgtcgctgggcaggacgatgggtggggggttttcgtaggactccagaacatcctctgcaggggagagaggatgcccgtaatggccacaggagaagctgcctccctcgccaggccgccccgcccaacggtgtgggaacccaggggccagcagattgagccctgagtcccctgccctgtggacacaggaggctgggatcctggccacagtgactggccccaccctaggactcatcccttctgaattcccgccgaccacccggtgtgacatccgagcagttcaggactgagaacaaggccttg

SEQ ID NO: 1121 - DNA, 1700 bp, Homo sapiens
  misc_feature (1)..(1700): DMR7:4863801
cctaccttttaaggtcccaagagctttctgtctcttcttggacagctgctaaacttaagtttctcagtttccaagactggccaatgcctctagggcggttctagtttcagaatcagctacaatcctgaggtttcaaggtatccctttttcttccagccctagagacttcctttattttcctgggtactcagctatgcattcaaaaaaatgatttcttatatttatccaacatttccaggcactttacatagaaagattttctgggataattaatcccatatattgccagaaatataaataccttctttttaatccatttcaacattggcttacatgctcaaaaacagctatcagcaaggtctttggtgacctccatgttgcccaacccatgaccccaatgatttccatcttctttgacctatggtagcttcatcttggcctctgcgacaccatactctttgtcttccacatgtctggccagtcctcagtcaaatttgctgattcctcctcctttacttgacctctaaatgttgggagttcctccagtttccattctaagccctcatttctcctcactgcatgtacattcactgcctggttaatctgctgatttccacagctttaaataccacttacttacagattaattcatattttaatcagactctcttctgaactccagatccatattatctgactgcctgtggttgccacctatatttggatgcctttaacttaacatagtttaaagagaactctaactcatcctcccacagtttgcttctctctcagtagtctccattttaggaaatgacatctctttctacccaactcttgatacaagaaacctgggagtcattctggacacctccctgttttgcatcctcaacatccaattcatttacaagttctgttgatttcacctccagaatatacttaaaatccctctactgctttctacctgttcccttataactctagtccaagccaccatcaactctcatttcaacttctacaacaactaaattaatctcctattactgaccttttcaaagtattctctacctaggagccagagtcatcttttaatccctccaatgacctcccattatacacagtgtaaaatccaaaatacataacaagccaggtagatcttttccccaactatctgtctagccgcaccttctgcaactttcccctctgcaccagctgcaatggccttcttgcagtgcctgcctttgcttcattctctctcatccctggatcttcacacaatgctgttctgtctgaccagaatgctcttcctgccccaccgactgcccactgctctctacctggttggtgtgttgtcatctttgagactggcttacatttcacctcttgagagtgaatttccctcaccccccattccaaatgagcacatgtgcttctttttcatagcacataaaacaacttgtagttgcagtcatgtacattatgacattttggacaacagaccatatatacaatgatggccctgcaagaatacaatattgtatttttactgtttcttttctgtgtggtttttttttgttgttgttcccaagttttattcaagaactcatacaaaatatttcagataaatggaatttaatccttgtcttcctcctcttctttgtcctggttaatctggaagtaatgtaattcgtaactctctttgc

SEQ ID NO: 1122 - DNA, 500 bp, Homo sapiens
  misc_feature (1)..(500): DMR7:5497001
agcctgggtgacagagtgagactctgtctcaaaaaaaaaaaaaaaaaaaaactagccgggcatggtcgcatgtgcctatagtcccagctactcgggaggctgaggtgggaggatcacctgagccagagaaggtcgaggctgcagtgagctgtgatcatgccactgcactccggtctgggagacagaatgagaccatttttaaaaaaaaaaagtgggaaagcccaaattttacatgcattttgcgtcaaatttctaaagcagggagattctgaaaagtcgcccgtctggttctcaaagcagtcgcccgtcctggttctccaggatgcctgggtcagagcatgaataaccaccccgctccccacgcacggagcctcgcagtggctcgagctgagaatcaaagcggccgatccagggcctggtgactccaccagacaggaaatacagaggcttctagcaatctgctctgccatttgaaagtcctgggtttgatcctgcgcttc

SEQ ID NO: 1123 - DNA, 1800 bp, Homo sapiens
  misc_feature (1)..(1800): DMR7:5720701
taaacaaccaatatatacattccagctgacttgcacatttgatactatatttagaaaaattaaagagcgaaatggaaccgaggctgagggaggaggtaaaatagatacactaagctccaattaaaattttctaacatgaatctgatttatgaaaccacaaacataagtattatgacaaaatccaggttttttcttttaaaaactttgcatatatccaaatttaacagtctgaagaaaagggaaatcttaaaagacagttttgtactaactaaaccctaagagcaaaccagaatcccagaaacacaccccaagaccagagcacatcttcctacctctgccatctctttgattttctgctcatagaactcctgctcttgttgcacagctggaaggagagcacgtcggtcataggacctacaatgtcgtcgcttattttcaagaaagaacatcctcttttctatttttatgtcacctagaagatatacgacaatgcaaaagcatgcagacaactatgtgttaggaacctgggccagccatgtccattcttcccggcctcatcctccaccttctctctgatggtacgtttcatgacttttctatcacattctaccatttgggaagactgggcttcttaccattagccaacctaccatccattttttgacctttctgattctttccctctgtttatgctccaattggaaggcatctcctatcctgtcactagtgtactatgtgaatataccacaatttattatctatttcactactgaggacatttgggtttgctgttttgggttaatctgaatagcgctgcttatagccatttgttggtgaatgtatgtccgcaatttacctgcgaattgctagatcatgggataggcttacttccagcttcagaaaataatgccagttttccaaagtggttgtaccagtttacacccttcctccatcagcaatgcatgtgagttccagtctctccatgtccttaccaacacctatcatcggtttttaattttagccattctggtgggtgcaaatgtgctgtatgattttcaaccatttttattttcaaagcattcaaatatacaaggggctgaaggaacagtacctagattcaccacaatatattataacatgagaataaaagagagcagaataacaaatattagacacgtaaatgatctgtttaggttttgtacttgtttcactgatttggcaatttatgattttctttttggagacagagccttgctctgctgctcacgctggagtgcagtggcacattcacagatcactgcagcctcaactcctgggctcaggcaatcctcccgcctcagcctcctgaggagctgggactatacaggcagatgccaccacacccagctaatttttttgtatttttttagagatgggattttgccatgttgtccaggctggtcttgaagtcctgggctaaatgatccaccagccttggcctcccaaagtgctgggattacaggtgtgagccacaacgcctggccaatttatgtttttctagaaaactttatctcattcagattttcaatttactcttgtctgttcttggtaatctcttgattttaatatttactatctggttcctaatacattttattttgattctccttttctcttgctcattctcatgtttttttttttgtttgtttgtttgttttgtttttttttgagacagagtctcactctgttgcccaggcaagggtgcagtggtgcgatctcggctcactgtcagctccgccccccggggttcacgccattctc

SEQ ID NO: 1124 - DNA, 1100 bp, Homo sapiens
  misc_feature (1)..(1100): DMR7:6501801
tgtcctcgctagagggggaaatgctctggcaggcatcctgtatctcgctgatagtgccatggaggtcagccaggtcactggtcagggcccgttggttcactgtagggaagaggacaggggctgcatggggccactctcccagcccaggacagcatgcctctgcctccccatccacccacccagcatacctttggcagccaggggcacggtgggcaggtcctgagcaaagcccaggagttcagggaagtgctggctcagcgatttggcaaggatgtgcaggaaggtggacttcccatccactgtcttggtggagttcagctgcaagtgacccccaatatacattcccgtcaaggaccccatcagatggggtcacatgggcccagcttctcctggactactgtggcatcaatgatgaattcttggcgcccccactttttttttaatagcagggtcttgctctgttgcccaggctggagtgcagtggctccatcataactcactgcagcctcaaactcctaggctcaagcgatccttccacctcagtctcccaagtagcttggactacaggcctgtgacatgcctagctaattatttttgtagaactggggtctagctatgttgtccaggctagtctccaactcctggcctcaagtgatcctctcaccttggcctccaaagtgccgggattacaggcatgagccaccacacccagcccaatccccagcctttgacactctctttccaactctcttccctcactccatttttccagatcctgggagtgtgttcccccaccccaccccaccccaccccaccctttgctgcagtcacatcctggcttcaatgtggcccttttcctgctaggaggagagccctccttggtcacgatgtcctcttctgccctctgccacaactgagctaggcctggcgttagcgccttgctggtagagcaaaccagtcgattgctgccggcaggtcccctcacctctgtcagaaagttgatcttgaagcccgtagtcttgttggttttgggctgtccatcgttgagatagttgcccatggccaacacaaactgtggacaagaaggtgggtaggtcctg

SEQ ID NO: 1125 - DNA, 1700 bp, Homo sapiens
  misc_feature (1)..(1700): DMR7:8401701
tgagccatttcgagggaaccaatcctctcatccccactagcattggccagccatacttctccaagtgttccttctgcttccatttccctctcttctcccttgttcttgttggaccttgaacgagtaagtgcaggtattccttcaggatccctgcatacctgcaccttgtgcagtggtccccatcaaagactgaactggccaatctctgacactgaatgacattgaatgaggagggatgattggcccaaaagaggcgcaatgatttctctccaccccctagtgagagtcaagagcgagtagtttgttacagccttcccctgccctagctctgcctaataccctagctctgcctaagttcctccagtctgcttgctgccccatatggatgagtaaaggttgccacattaccagctcttcagaaagatgttagagactttgtttattaagtgtcagccatactgtatgatctctggatcaaataccttggggcatttaaggtaccagtagttttgattcacttacgaattagttgctgccttctctagggtattcttatattaccccaaattatctttgggggccttctctagggtatttttatattacagcaaattatctttgggggccttgcgatccctcgtttctcctttagaaaccatttacatttaaatttctcattctcttcctgtgaaacaggcttcaagatagggcaactgcttgcacagtatttaatgcacagtatttaaaggtatttggaaagacttgctctaaggaaaggttaaaaatttgacagggaaggagttctcagtagtgtgctgtatgagacacttcttgtgcatcaccttgcttcctcttagctgtgcttcagtgacgagttacatgcagctttccatgggtgtcctcttttagcacctcacctcaggctgcttcatgttatcatggcgtttttagtgacaggagcttgagttctgtgcatgtgcaacctggaagtgcctgtggactcatccttggccaatgggagacagaagccaatggataaaatgtgtctgtctctcttttgtctcctgagtggacagctctgatatttcctgagactacttcgaatgcttcagccaggtcagatgcgagccatctgtaatgcagtggcagtctcagcattgcatccttgtattgctgtttctttcttcttctctgtttcattctaactagtccctcactcctgctccttgcatcacattcccaaataaactacctgtgcctaagactttacatcagtctttgccttcagaagaatctcagactgtgacatcatgaacattttagcacatatatttaataataccatatttctctcttttttcactctaggaattttggggccatcactgaagcgctaggaatattttattctatttttgcacttctctctccttttcacatatttcttccttctttcattcttttttatttcttaagcacttgctatgtactaaggattattttatcagtttgggatacatacatgaataaaacagacaaagattcctgcccttagagagctgacattctggtggagggagacaggcaataaacagtaaaccacatagtctgttagaaggtgataaaaactatgagaaaaacaaaaattaaggagggtaaggggaaatcaagagttccaggggttggatgggtgttgtaaa

SEQ ID NO: 1126 - DNA, 1600 bp, Homo sapiens
  misc_feature (1)..(1600): DMR7:8646101
cctatccattaatgtgaccaactcttcaacttttaaatggtcttaaaatatgtctttcagcaaagattttaactttttctatgatgaccctgtgtcacttttcttagatgtattactgggtgtaattagttattttattttttattgtaaatgaacttattagagatacatttttaaactctccgtgagtggtaaatacaagtgcaatggatttttgtacgtttatctcatatccgacaatcttttaaactctattattcttataacttgtatattatttcatgctttatctgtccacaatttgtacgtaatgacaatattatttcttttttgcctatcttgattcactttattttgttttcttgtctgatattcctggctataacctccagtaaactttagaagagaatgctaataaggagtatctttttcttgcttttaaaagaaatatgactataggctttgttgtactatttgtagttatattttatcaagttcaagcattctcttctattcctagtttctgagatttttgtttttaaagtcttgaatgccaattttataatatgtttttcctattctatcaaggtgatcatataatttttctcattggatgtgttaatataatgtaatataaatcttgctggaaatcagtggaccccaaacagtccctctataattttatttttatttatgtttattatttatttttaaataaggtttacttaatcagagagcctctgaaggcatcaggtttctgtcatttttttttttaaaggcaataaactggcaactcgggtgcatgatgggtaggaactgggcatggggagctgggaggggtacatggagagaacacaggggaacaggcactggggaggggaggagagagaagaaggtggaggagtatcagatgggaccatagaacagtcagacccagctcctagccacccctgggacaggcagacaatcggacagacacggatacagacacacacaaagacacgtgtgttctgtgagctcaagagcctctgctgtcctgcacaagcagggatcagtcagagccaagtgtggagaaactcaagcagatgcacaggctgcgcctgatccctcaaccctgaccctcaggcccacagtgtctccactggccacccagaggctctctccccagggactggacatccaggcccagcgcaggtcatggcaaagcagaagtcagctagaagagaaaacctccagaccactcatgcccagccctggcaggaaaataaaggggtgggaggcagagaggcaggcagtccttctgtccatccatggtcacacgattgcatttaacaggaagaagacagcccccagtgccaggccagttcagccataaaatatatatattttatatatatttctttgatttcatttatgaatgtttaggttttaatgtttatattcatgagtgtgttggtttgtaattgtttttcttgaaattcttttgtgtggtttttatatctctaaatgatttggtaagtattccctatcttttaatcgctagttatgtttaaatgatgttggaattatgttcaattccaatatattatatcctactcta

SEQ ID NO: 1127 - DNA, 900 bp, Homo sapiens
  misc_feature (1)..(900): DMR7:8713501
tgcagatttttttttttttgctacctgggcattgaagactgaaatatatattgtagtctttgcaaccttggcttgtttttacccgtccttcttgggaagcctttccaggtattcaaagagacttgtgtgctgtgatctaagtttttggtcactgcagccatatctgcattagggagtaccccaagtgcaataacactgtagttcttgcagatttacagagttatcaccttggtggtcttggataagatccagaagaattctctggattaccaggcagagattcgtgttctcttcccgtaatttctcccaagctaatggagtctctctttctgttctgagctgcctggagcttgggaaggggtgaacacaagcactcctttggccaccaccactggaactgcacagggtcaaacctgaagccagcacagcactgagtcttgctcaaggccccggcaaccactgtttggctactgccttgaatactaaaagacctagggctctacaatttacaattagcaagtgtcaaagccaaacaaggccctgggtgggttcagaaatgcagtctaggatccagggtctagagtgtgaaatcttttaaacctacctggtgccctaaactactgcagctgagctggtactgaaaccactacacaaagtctttcccactcttcccttccctttctcctgggagaggagcctcttcctgtgtccatcaccaccataggcccatggagagtattgccaggctaccactggtattcacttaaggcccaagggctctttactcggcttgtggtggatgctgacagacctgggactgactcacccttcagggaagtatgcttccctctggcccaggataggtccagagatgccattcaagagccaaggcctggaact

SEQ ID NO: 1128 - DNA, 900 bp, Homo sapiens
  misc_feature (1)..(900): DMR7:9288501
gaagccttttagcgtgatgtgattattttgtcaatttttgtttggttgcctgttcctttgaggttttactcaagaaatcttagtctagaccaatgtcttgaagtgtttccccaatgttttctttcattagttttatagttttgggccttacatttaaatttttaatccattttgagttcacttttgtatatgttgagagataggggccaagtttcattcttctgtatatgcatatccagttttcccagcatcatttaatgaagagactcttcccaatgtattttcttagtgcctttgttgaaaatgggttggcaattaatgtgtggatttatttctaggatctctgttcatttgtccatgtgtctgtttttatggcagtaccatgatgtttttgttactatagctttgcagtaaaatttgaagtcaggtaatgtgattcctctagctttattctttttgctcagagttgccttggttattctggatcttttgtaatgtcatatatattttagggtcgtgttttctgtttcggtgaagaatgtctttggcatattggagggatggcattgaatctgtatacgacctttggtatagacattttaaaactgttgatccaacccatgggtataggatatatttccactttttaagttctcttcaattatttttcatcactgttttatagtttttattgtagagattttttcctaagtattttttgtagctattgtaaataagattgcttccttgattattgttttcagattgtttgctgttagcatataaaaatgctactaatttttgtatgttgattttctatcatacaattttactaaacttattagttctaatgattttttgtcagcctttagatttttctaaatataagattatattatc

SEQ ID NO: 1129 - DNA, 600 bp, Homo sapiens
  misc_feature (1)..(600): DMR7:11220901
gcttgagcccaggggtttgaaaccagcctgggcaacatggtgaaaccccgtctgtacaaaaaatatgaaaattagctaggcatggtggtgtgtgcctgtagtcccagttactggggaggctgaggtgggaggattgattgagcatggcaggttgaggctgcagtgagctgagatcacaccactgtactccagcctgggtgacagaatggaaaaaaaactgtggaattttcaggtttgtattctcttaaatacatttgagactgatgagagcaggttgggaagactgtaggagcctggagagaacctctagattcctgaaatactgtcataaataagtctagctctaatgggcaggaaggaaagataagaaagagggaaggtaaataaaacaaaagaaagaacaaaatgtggatatcagctcacactaagtgacagacacttcacatgtgttctggtgtagcgtgtagtccacccacacagaaaacatcccgctcaaggacttcaagaggtggcacataccatttcatctactctggaaagttgaattgtggctgaaatagacaagagtctctctcatgaaaccccctttaagaggagaaa

SEQ ID NO: 1130 - DNA, 800 bp, Homo sapiens
  misc_feature (1)..(800): DMR7:12440701
ggacatttttctggtgatggcaggttctccatggctctgtgtgggcactgcagctctgcctctgaccaacaactggtgaaccataactgcctgtctggaatattgttagcgttctacctcaaaccaagccaagtacctggcatcagcaccaaccatcagtggagttgaaattaaaaagaagcttgtgttataaactagtgctcatgaattttggtccagttactgccaaaatagaaagggttattatttgtatagtacattgtgtggatggaaagagctgaataccgctagaacagattaaacagattagcccgtgagctgtgaccagaggctacacctgatcctacagaacccaagagatccagtcagcaccatgtcacaacccatgctccatacatgagcttttcaagatataattgtagggcagactgcagtagtggattcatgtgcccatgtccctgggtaaggctctttcttctctggattttgaaagttccttctacaagatgtagatgcctcatccatcctgtttactaagatcatagcaatttccctcctctgggaggaatcaccttccttcctttgtgttttgccagacactgaggaatgaaagccttcagcaaaagtattaccttgcttgggtttcaattgtaagaatttgggagaaatcagccagacctgaaatgtcttcacatttcatggatttccagtgttgccaacttgtctcggtacaatccagcagttcagagtgcgggagactctattacgtgtgacctagtgactcaagatccttccatcat

SEQ ID NO: 1131 - DNA, 1600 bp, Homo sapiens
  misc_feature (1)..(1600): DMR7:16553901
tagtcatctattgagcacttgttatgctccaagcctaagctaagacatatgatttgtgaaatgccacacttaatataaatcctacagcaatcctgggaatcagtaatatagatttctctaaatggataataataataacattttacggccaggtgcggtggctcacacctgtaatcccagcacttcgggaggccgaagcgggcagattatctgaggtcaggggttcgagaccagcctggccaacatggggaaacccccatctctactaaaaatacaaaaagtagctgggtgcggtggcacacgcctgtaatcccagctactcgggaggctgaggcaggagaatcgcttgaacccgggaggtggaggttgcagtgagcagagattgcaccattgcactccagcctgggtgacagagtgagactccatctcaaaataaataaataaataaatagcattttattttaataatagctgagtatcaggacaatagcatatcttataatgttcctgaccttaacaacttgctatcttgcaatgtctattgaattctaccttgaaatactacctcaatttcctccacttctttcttctcctgcaacctttactctactttgggccaccacaaattcttctgatttagggaaacgccctccttattcatcttctgccattgtatttaatatcccctgtaaatcggccattttctttctaaaatctaattgggcaataacattcttctaaacaagatcttttaatagctccccaaggtcctcatgatttggctttgactccactccatctcccttcactcccccttaccttcacaaacaccgcaatcctataatccctatgatcatggtccaaggatgttaatgctcgtgggaaaaccatgattctataatcaaggtcaaactgtcaggtttgttagtgttcttcttgttttaatgagcaacgcaagagaaattaaagtctcagctaatgagttctattaatgtgtggttggcaggtaactggaagaagagagaggaaaaagttctgatttccactggcattgttttcctacgctgatgtcaagtgtggctattattaaagcagggagtggtgagaggaagaacagaaggcagcgaattgctgccaggaggccagtgggaaaagttcgaaagtgataaggagccaacagggacactcaccttctggctttgaatggtttctcctatcttggggaaacacggcttctctcatgacataacaaaacatttggtgaaattactaatggtcttccaggaggagtgctggcataatttggtggagatgagtctgtgaacgatcagatgaacagcacatgatatgccttttatagcttcataatttgtgaatgttgccaatataaaaacaaagtaaagaaatttcatcaaagaagttaattttcaaacttcgaatacaaatctaaaaaggcttttctgagatttgagaggggcatgaataaaatgtccaataaatcctcactaagtcagatgggttgggatcctttttctgaatctgttcatcaatgagcaaaatatttttatttaactaataataatagttcctggccggacat

SEQ ID NO: 1132 - DNA, 300 bp, Homo sapiens
  misc_feature (1)..(300): DMR7:17335901
taattcatctagaaagaagagcacaggtgagagacattgagaagatagaattgacgaacttgattgagagctacatgtgcagagctatagaaagaataataaaactctagggttttatcttgggcatatgaaagacacatgaaaagctagtgtcattggtaaaaaagaagaaaaatataacaatgctttatttagaatatattctctaaacccagcagtgattttaagagtttcttacacatgctgcagatgagtcctttatcaaatatttgtattgcaaatgtttcctcccactctgga

SEQ ID NO: 1133 - DNA, 500 bp, Homo sapiens
  misc_feature (1)..(500): DMR7:18675701
tacggcccaggtcactgcaggaggctgctcagcctctcctccctgccccaagagttgagaaccgtctagggttgattcagctgcagccctttcatgacttacagggaagttctcaggctggaatgttctttgggagaccctgtgagtacattactcctcttcttcctctccactgccttttcttctgtctcctctcacctcccataaaaagaatcctggattttttttcaccagatttcaactaatgattcactaattttaaaacaactctaggtgtgaatgattaacatgatcattgttccgaaggatgtattaagaatatgtgttgatcacggaggatctttggataagctatgtctgtgcccaggtctcctctaactttaattctcaccctattatcagcaccaaaaccatcaatcagaaagcaaaactcagaaaattggcattgtctagtagcctatagggggttctcttgtcatatttgcactggactctgcctt

SEQ ID NO: 1134 - DNA, 200 bp, Homo sapiens
  misc_feature (1)..(200): DMR7:19053501
tcagacaaaacagactttgaaccaacaacagtaaaaaaaaaaaaaaaaaaaaaaggacaaggaagggcattacttaatgataaagggtttaattcaacaagaaaaaattatcctaaatatatatgcatctaacattggagcactcagattcataaaacaagtacttccaggcctaagaaaagacttagacaactacacag

SEQ ID NO: 1135 - DNA, 1400 bp, Homo sapiens
  misc_feature (1)..(1400): DMR7:19924901
atcctggggcagtccattttatagaagtggaaaggaaaagggaaggaagtagaggagactattcatgtaggagaaaatcaggagtatgtggtatcccagagaacaagtgaaaattttatattaaaaaggagaatggtgaattatatcaaatgcttgcaataagctgagcaagatgagaaatgaaaagtttccattgcatttggcaatttacaggttcttaatgagaagtttcagtggaggactggggactaaagcctgttccaggggctttaaaaaggaaacaagaggttgtaggaggataggaagtggtgtaaggaagtatccatacctctttttgaggagctttgttataaagagaacatagaattcttatagtagctgaaagtttatgtggaatttctggatttgtttgctttaataaaggaggaactaccatatgctgattagatgatgcagaagagggaaaaagtggatggtgtgggagaaatagagcataatttcaagaaaaaagaggagaacaccaatggctttgaggctacccaaatccagaaggccttgactcaggagctgttgaaaatactaaaataatttacaatactaaagtgagctatacttcaaagcatactaagagttcataagggaaagataaggtcaaccccccttaatgctcaaagacaatcatctctaaattgaaagttaatggcctgtttgcatcttctctttctacctgccttcctaccatttcctgttgtgtgttggactgggcatacagctaaaggagactgataaagatagtgcttgatggtgcaagcttgatgtgttgagcttggcttgagatgatgcattagctcgccagtattgatgttctgcttcatgactaggactctgtaagatgcactggcttccttatattataaaaggctgccaagatgagaactaatgatgaacattttaggaactataacacccagaacttatatatcatagaactggtaataaaataatttataatattattggcccaggggtagccaaagatcagaaaatattaattcactatttcatctgtttcaaaaaaatacttaaaagatgctaagcaattattatttaggataattcagctttatgataacaccacatctgctgatttcagagatggtgcaccaaatatttcccttagctacctaccatcagttcacatagataaatatagaggcatttcttcataaggaatgtcccaagagaagattcacgtacctatttatggcttctattttattggctcatatgtataatgatagttattctactgttcagtttgacgtttcatgaaaactttcccttaataaaatcactcctttttaaaaaaacttctattatctttctttcttccttttttt

SEQ ID NO: 1136 - DNA, 1000 bp, Homo sapiens
  misc_feature (1)..(1000): DMR7:20888001
atcctgaacagtgttttccaacttggttccattctccccatcactttcaggtacaccaatcaaacatagatttggtcttttcacatagtcccatgtttctcggaggcttttttcatttctttttattttttttctctaaccttgttttcttgatttatttcattaatttgatcagaccttagtttcttgttcataaaatatggaaatgggcaggggttcttaaggtattttgctatgtcaagttattactctaaaattttcccacactatattgggatttaaaaaatattgactacaattagccataaaagcaaataaaaaatttagaataaacacccaacatcattctattgtgcaaactgttttttcgtaatagaaatttttgcttaataatattatgttttatgtcaatccacgatgaatggacatgtcgggtttctatggctttgtctcctttctcttccaaacatgtagtatagaccagggattcccaacccctggcactggcaccggtctgtggttaggaaccgggccacacaacgggaggtgagtggtggcaagtgagcattactgcctgagctccacctcctgtcagatcagcagtggcattagattctcacaggggcacaaactctattgtgaactgcacatgtgagggatctaggttgtgcactccttataagaatctaattaatgtctgatgacctgatgaacagtttcatcctgaaactatccctcctccacccccatctgtgggaaaattgtccatgaaaccagtccctggtgccagaaaggttggggaccactggtatagattatctgttgaaatatttcaaatctagaaactcgaatgaaattgaggtgggttctctgatccactggtcccacccagtacctggggtgtgggctttaaccatcacactatcatgtcctaccctctgagggaggtgcttgcttgtggtattctttgtagttagtatagagctcagcaaaatgtcac

SEQ ID NO: 1137 - DNA, 500 bp, Homo sapiens
  misc_feature (1)..(500): DMR7:21999101
ttaaccaattactaacgggaaaatagtcattttactttggaaaaactggtagtcacctccttgaccgggaatgaaggttcatatctgtagaaagagacataggacgtcatttgatgcacagagaagggcgcaatctgatttccatggcattcctgcgaaaaatgcttgacctcctttatccatgagaaaatatcagataaacccaaattgaagcacattctatgaaataaccgattcgtagtcttcaaaagtgacaaggtcaggaaaggcaagaaaaacctgagaaattgttatagactagaggggactaaggagtcatgacaactaattgccacgcagggtcctaggctgagccttgaacagaaaaaggatgttaataggaattcaaaaaaggttagtagattcagttcacagtattgtagctgtgttcaaaatcttttttttttttttttttttttttggagaccgagtctcactctgtcgcccaggctggagttcag

SEQ ID NO: 1138 - DNA, 1000 bp, Homo sapiens
  misc_feature (1)..(1000): DMR7:23988501
ttatttctttgaaaagataaaatcgttagaccaatagctagattaactaagaagaagattcaagtaagctcaattagaaatgaaaatggagacattacagttgacaccctagaaatctgaaagatcgtttgagactactgtgactacctctatgcacacaaactagaaaatctagaagaaatggatacatttctagaaatatacaaccctcctagcttgaatcaggaagaaatagaaatcctgaacagacctataacaaagagtgagattgaatcagtaataaaaaaatttgccaacaacagtgaaaaaagtccagggccatatgagttcatagccaaattctactagacattcgaataattggtaccaatcctactgaaattattctaaaagattgagaaagagggatccttcctaacttactctataaagccagtatcaccctgataccaaagccaggaaagaacataaccaaaaaaaaaaaaaaaagaaaactacaaactaatatccctggtgaacatagatgcaaaaatcctcaacaaaatactagcaaactgaatccaacagcacataaaaaagagaattcaccatgatcaagtggatttcatccaagggatgcagggatggttcaacatatgcaattcaataaatatgattcatcacataaacagaaccaaaacaaaaaccatatgatcacctcaatagatgcagaaaaagcattcaataaaatccagtatcactttatgataaaaaccctcaacaagctaggcatagaaagaaaataccaaaaaataataaatgccatatatagcaaacccacaaccaacatcacactgaatggggaaaagttgaaagcattctccctaagaactggaatgagacaaggacgcccactttcaccacttccattcaatactgggagtcctagccagagcaatcaggcaagagaaagaaataaagggcatccaaattggagaagattaagtcaaactatctctgc

SEQ ID NO: 1139 - DNA, 900 bp, Homo sapiens
  misc_feature (1)..(900): DMR7:27601301
gggattaaaaatactaacaagatgaaaagcatcagttaccaatataattctttcagtacaacaccaaatgataattgcaatgcctaattagcactgaatagtgtattttattatgattgtgcaataagcttgatacactgttaatcatgtattaacgttaaatacctatactataaacgtgctaaaaaaaagcttatcagtgattaatgttgaatactgaaattctcattgatattttgtaaaggtcaattttgggtatttaaaaagttataaaagtgcatttaactgggtaatgttggaaaataaaaatttaaaaatttaaggtaaaggggaaaatacgtaaagctgtcctgtgtactcatattatgattaataactaaataaggtattctggctttttaataatccaattgctaaaagacctatgaaggatattatgttagaaggttaaaaattctggttttcacttgtttatacatgtttgccctttttgttcctttagttaactagattaaagcacttaaaaccaaaaataaaattactttagattacctatgtgaactttttttggttagctaataattctttctatattttgattgtgggtattgtgtgggagtggggtcattgaatggtgtgatatcgatagaacaagaaaaagtatttttctctattttgtttttaaatgaaacaaaccaaagccttttagttattctagcaacccaaagaaactccaaacttgaatgtattagtctcctgcaataatattgaaaatcctctacctaaaatgtcttatttttgctaaatcaggctaattcttaaaattgcatattgtcctattgtgccttcctgagactcaacttcctcactgaaaaaaaaaaaaagaggataatctgcatt

SEQ ID NO: 1140 - DNA, 1400 bp, Homo sapiens
  misc_feature (1)..(1400): DMR7:27784701
gtatataaataaacgaatcattgctcatgcctgtagtcccagcacttttggaggccgaggcaggaggattgtttgagcccaggagtttcagcctgggtgacatggcaaaaccctgtctctattaaaaaaaaaattagccaggcgtggtggtgggtgcctgtagtcccaactacctgggaggctgaggtgggaggatcacctgagctgtgattgtgccaccatactgcagcctgagtgacaaagtgagaccccaaacaaaaaacaaattatcgattaatttagtatatgaaaatttaaatatatgttatcatttcaagttttatagtcttagcttctcaaatttggagggaacaaatgtgggattaaaattctaagaatacatagttttcttaaagatatgcaaatttgctttactgattatgtttctgtgttttctcaaaataccttgttgtcacttctcagggtcttactgaagtaacacaaagcttaaaaatggaaaatgaagagtttaagaagaggttcagtgatgctacatccaaagcccatcagcttgaggaagatattgtgtcagtaacacataaagcaattgaaaaagaaaccgaattagacaggtatttctcatgcttttaaaaaataaattcaataaaaattttaaaactttaaaacattataatgttactttatcatacctatcttagtttaaaggacaaactcaagaaggcacaacatgaaagagaacaacttgaatgtcagttgaagacagagaaggatgaaaaggaactttataaggtaatttattttttaccatatctattgcctgttgcttcaaaagaaatgaccccagaacttaggggctgtaggtcagcaatttaggagcagcttagctgagtggttctggctctagcctcttgtgtagttgcagtcaggatgttggcaaggggtgcagtcagctaagggcttgattgggactggagggtttgctttcaagatggcttactccagtggcttttggcaggagaaccttcagctcctcttgaagtggtcttttcataggctgcttgaatatcctcacagcatggcagctagcttctctcagagtgagtgatccaggagagagcaaggaggaagtcacagtcatgttgtatatcacccctaaaagttagttttcagggaattaatttgctgctgttttagatacttaacaggtagtgtgtaataagttgaagaggtttaatggaattaagatacttgtttatcacaattcatgtaactatttttcctttttaagaacatatatatatatacacattggggagaacattaatttagtaataatcccattttagagtttgacttttagaatatcttcagagatgtcattttgtaaaaatatcctcact

SEQ ID NO: 1141 - DNA, 200 bp, Homo sapiens
  misc_feature (1)..(200): DMR7:29439401
tgttcattctcaccttagaatggctttgcatgtctggtgttctctgcctggggtcttcttccccacaagatctttccattcttgcgttttcttgtccttcaggtgttggctccagtgtcgcccctctaagaaggtcttcttcagctgaccatcctcactcaggccctcttcatccacatcccccatatgaccctctgctg

SEQ ID NO: 1142 - DNA, 1500 bp, Homo sapiens
  misc_feature (1)..(1500): DMR7:29667001
tgtttgtttgtttgtttgcatatggatgttcattactccagcaccatttgttgaaagtggatctttcctttctttccttcactgaattgcttttgtgcctctgccaaatatgtcaattggacatattttgtatgggtctatttctgggttctctgttctcttccactgatttatgcatctacccctctgccaataccatataggtttttgttgttgttgttgttgtttagactgagtctcactctgttgcccaggttggagtgcagtggcatgatcgcagcacactgcagcctctgtctgctgggttcaaacaattctcatgcctcagccacctgagtagctgggattacaggcacatgccaccacgcccagctacttttttatttttagtagaaattgggtttcaccatgttggccaatgtggtcttgaacacctgccctcaagtgatccgcccacatcagcctcccaaagcgctgggattacaggtgtgagccactgtgtctggccagtagtcttaattaacgcatctatgcagtaagtcttagaagcaagtagcctgattcctcctactttattcttttccaaaattggtttggctaggttctttttttcttttttgccttttcatatatattttacaacatgctatatctacaaaaatcttgttgggactttgataagaattgcattaaatttgtaaatcaattttggaagaactgacatctttattgaatcttccagtttatgaacatggtatatctcttcatttatttagatcacctttgattcctttcctcagcattgtatagttttgatcatctaagtcttatacgtattttgctagatatacatttaagtttttcatgtcatagaattataattttaattttggtgtccatcattagcacataaaatacatttttttatgtttatcttttatcacgcaactttgctgaactcacttgttctaggagttttgttgtggttatctttttgttgttgttttagatttgctgggattttttacatagttctggcatgggcaaatagggacagttttatttcttactttttaatctgtatgctttttatttccattatttgccttttgcactaaaacttttagcactgtgtttaataagtggtgaatgtgaacatacatgccttgttgtcagccttaggagaaagcatcagtatttaatcattaagcataatgttagccacaagttctttgcacgtgatttttacacagttgagaaaatctcccttttatttctttttttttctgagagttcttaccatgaatgggtattgaattctttcaaatttttttttctgtaccaatttatatgattatgtgatttttcttattttgcctcttaacatgtaatatgatgtatttgaatattgaaacagccttgcatccctggaagaaaacctcatttggtcatggtatataattaatatattattgaaatctatttttgcaattttgtttg

SEQ ID NO: 1143 - DNA, 300 bp, Homo sapiens
  misc_feature (1)..(300): DMR7:30071001
actttgctgacagaagaaggtaatgttctctgtacagggggaaaaaactagcagaatatttttcctgaatacccactgtggttatctctgggagaaaggattataggtttctttagttctctccttttaaaatattttccttattttcaacaacggacatcaatcatgaaacccaaaaaaagcgataaatgttatatttttcaaaacttccactgtgccttaggtggaagatcagaatctttgacatgatggataaaggtcctcacaatttggcccaacccagtttgcaagctctggtgt

SEQ ID NO: 1144 - DNA, 200 bp, Homo sapiens
  misc_feature (1)..(200): DMR7:30932101
ggcctgagtggagtggcttggggaagtcacctgccctctgtggtcctcgccccgtgagggtcccagctcttggagctattgactgattttcacgggtggcgaggtaagtttggaaaccacatcaccctcttggagcctcaccattcgagtcagcagagcagaggctctgacaagttcttcaataagaactcattttattt

SEQ ID NO: 1145 - DNA, 300 bp, Homo sapiens
  misc_feature (1)..(300): DMR7:32513501
aatcagaatatgtttaagtgtacctatgacttggaagcctccttctttgagttgtcccacccttccagatcaaaccaatgtaaatcttaatgtattggtggatgtattgaagggggcctgcccctccacacctgtgggtatttctcgcaaggtggagacgagagactgagaaaagaaataagacacggagacaaagtatagaggacgaaaagtgggcccaggggaccagcgctcagcaagttaggacctgcaccagcgctggtctctgagttccctcagtatttattgatcactatcttt

SEQ ID NO: 1146 - DNA, 1300 bp, Homo sapiens
  misc_feature (1)..(1300): DMR7:32736701
tagctgagcatttagtttgtttggtacagttataataaaatactgttgccatgaacaccttggtaagcaaatttttacagttttttttttttttttttggatggagtctcgctctgtcgcccaggctagagtgcagtagtgcgatcttgactcactgaaacctctgcctcccaggttcaagtgattcttgtgcctcagcctcccaagtagctgtgattacaggtgtgcaccaccatgcctggctaatttttgtatttttaatagagactgggtttcgccatgttggccaggctactctcaaactcttggcctcaagtgattcgcccacctcagcctcccaaagtgctgggattacaggcctgagtgcccggccagtttttagaaatttatcagcgacatgggattgccagaaacaaagatatgcttttgttcaaggcatttgatctttattgccaaattgctcattagaaatggaaacagcttctagcaaggtatactctttaggactatgaaaaattttttaaccaataaaagcttgtgaggtttttgatatttataagtgcagattggtagatatatttcgagtaatatcacctgtcagagtcattatttcattcagggctctttttttttagcaacgaaaagatttagtgtgtcagaaaattataggtatattcagtcatttgaatttcataagttctgaccatgtggaatatcctaatttttgcttgaattgtgattagtgtgtaatagttctttaatttacctatttacatatgagctgaggaaaaaaaagaacaaagaagccatatatacataatgggttatttattatgtgtaatatgtttcagagagccagtgctcagttgaacaataaatttttctatttttgttggtttttaatttttttctactgttacctctgttgtgttctgtctcattttgtaaagttaattttgttctttctcctagcttcttagttcttttattttttatttatcattttttaatgataaaagcgtttaaggctgtttacttctcgttaacatgtagtcacttcccatagctttggatacttaccgttttcattgtcattgagtacacattttttatcttttaaaagtcagttctatcgaggaataatcatgttaactgcattttgatattttcttttacttgaaagttattttaaagtgtggctttattgtggttatccttactactaccctatcgttacttctagtgttaatttagaaatattgcaccgtggctcggcactgtggctcacgcccgtaatccc

SEQ ID NO: 1147 - DNA, 200 bp, Homo sapiens
  misc_feature (1)..(200): DMR7:34672001
aataatacattctgggtatttttattatatagtaattactttggttcctacgacattgtagagatttggacttaatttgctcaaatgttagttttccatatttcaagagtctagtgcttaaatagcaatttaaatgttaatctcagttcttgttatgtagctgacatttcattcgtttattcagcaaatattaattacta

SEQ ID NO: 1148 - DNA, 300 bp, Homo sapiens
  misc_feature (1)..(300): DMR7:34781901
acttaaccaccatagagagctagccccatccaggcctcagagccattataattctgtgcatacctgtgctctcattcttgtctccttgactaatttatacgtatactattaccaacattacagcaggggcacctgtgccctgggcaacagctcagccatagaaagctacgccttgccccaaccctgaagccactgaaagactgtgttctcagctcccacactactttgcatgtgcactcatgcctcacatactataccatgcagcagaaggggcatctgcaccttgagcaccaatgtcat

SEQ ID NO: 1149 - DNA, 1100 bp, Homo sapiens
  misc_feature (1)..(1100): DMR7:35170201
taaagaacaagataatgtcctttgcagcaacatggaaggagttagaggccagtatgctaagtgaattaatgcaggaacggaaaactaaatactgtgtgttctcacttataagcgaagctaaacactgagtacacatggacacaaagaagggaacaacagacactggggcctacttgagggtgaagggtatgaggagggtgaagactgaataactgcgtattgagtactatgcttattacctgggtgccaaaatactccatacaccaaacccccactgcatgcaatttacctatacagcaaacccacacatgtatcccatgaacctaaaatagaagttggaagaagaaaaagtgtcagcagaaaaatagaacacataaagaaaagtcaaaattttcagagctcaaaaataaaataatcaaaataaaaaaccttaatggatggcacaagaggagaatggcagagatagaagaaaataaccagtaaactagaagacagaaaaatagaaattactcaatctgagcaaaagagaaaaatcagatgctaacagaataaacaaacaaaacagccctagggacctgtggaactttaacaaaggatcctacattcatgtcactggagtcttggaaggagacgggaaagaggcagggctgaaaaagaattcaaggaaataattactgaggctggtcccggtggttcatgcctgtaatcccagcagtttgggtggccagggcaggcagattgcttgagcccaggagttcgagaccagcctgagcaacatagtaaaaccccatgtctacaaaaaattaagaaaaattagccaggtatggtggttgcgcatctcaggaggctgaggtgggcagatcccttgattccaggagtcagaggttgcagtgagctgagatttcaccactgcactccagcctgggcgacagagtgagatcctgtctcaaaataaataaataaatacatacataaataaataaaaaaagaaagaaaaagaaataatgactggacttcctatatatggcaaaagatataaacctaaatattcaaggagctgagcaaatctcaaacagaaaaaatctaaacaaatccacact

SEQ ID NO: 1150 - DNA, 2400 bp, Homo sapiens
  misc_feature (1)..(2400): DMR7:36250301
gactgaactttttaagatccacttggcagctgtgactggaggagcaggaggaagggactagagggatggaggtgcacaaggctagaagggtggatggtgcatggagatggagctgccctgagtggcccagaatcctgcacaggaggcccttctagatcagaacaacctatggccagtctgcaggtgaaatctggcccatagcttgtttttataaagttttattggaacacaaatgtacccattcaacttattgtctgtggctgcttttacactataacgacaggttaagttgttgtgacagagacagtatagcccataaagtccaaaatgtatcttatttggccttttatagagttagagtttgccagctctcgttctagatcagtggtgcttggctattgacccctttaaatatcagatgaaagcttcatgccctcatcccagaaagatgcgtatatgtacctctccacatatagaggtactcattgagtttccacattcaggaggtcccagcactgttgaagcttctccatggagccctcaggttcatacttcttgacactagtggaggtaggattcatttctttacccccaaaatgttgaaatagcttctctcatctaccaaatgagatgagcctagtgaggaaatgaatcaacccttaccagtggggtttagtgcccagtcaacaggggggccatttatgtggttagagtccagtcagattttagacaatatcatgtcccactggcacagaaacaacatcccatccattctgtttctttggcttatggtttgaccccatatgggttattctaaaggaattatctggtttatagacatctatgctcccattcttaatcctcttctttctagagccatttccttcctctataacttcagacaaatgtaggtcttcctaaacctccaattgtgctggcatttgccttcccgtcatttttgccactgtcctatttctcttctttcctctactggtaggtttctttctttctttctttctttctttctgagatggagtcttgcttttgttcccaagtctggagtgcaatggcacaatctcggctcaccacaacctccgcctcccgggttcaagcaattctcctgcctcagcctcccgagtagctgggattacaggcatgcaccatcttgcctgcctaattttgtatttttagtagagacggagtttctccatgttggtcaggctggtcttgaactcccaacctcaggtgatccacccgccttggcctcccagagtgctgggattacaggcatgagccactgtgcctggccccctactggtagttttcttaaaggtaaattctcatcctacacagccaaccttcatccctcctcgactctccttaactcttaggaacctggcccctgtcccagttcatctaacaaatcatagctcaccttccccaacttctaacctaacccaaagcattttagttttcaaaagttttttgctttctagtattaaaaagtattatgaaataattttatgtagaatttaaaattacatatatgcaatgattttttggtaatttctgtacagttatttgatttttataatgaaaacattgattttatgttgaaatatatattttaattttgcagccacttagacgcagtgatatgaattcaggagtgagaaaaggaaatcaatcctgctcggagcttagcttatctaggtcagctgagctgcttggggaacctgcatccactgccatcttttactcacgatggttgtttaattaatttttcttcatactctgaaagtttcgttacttcttagtcttcttattgattctggatttatagaaaaaaagaacagaagtcttataatatccatgcggattacagactcaggcagaggccaaggcagggcctacaccaagggcagaaaggtcatttcagtcagacctgaaggttttgggggcgcagttgccttttgcagttgtttgggtctaaatgtggacaggagagccaggtttattctggcggtgaagaatcatgccccgcccccctccatgttttgctatgacttctgttagcatcaactagagagagttttgctggcctgtcatggtggcttgtaaatgataggctggttttgtgaacttgtctagcccatggtttaagcatagtgtggccatgctaaaaacttttcctgtgagctttctatctccttgagatgccctcttttttctgggaaagcatctggagtttccagttctgaatgacaagagtagcttatatcagaataaccttccctcaaataacaatataagcgccagggaaaatgcacacgtgtattcgaaggtaccaaagtgtggccaaaacagggagaaatggaggagcttcagccgctgagagga

SEQ ID NO: 1151 - DNA, 2600 bp, Homo sapiens
  misc_feature (1)..(2600): DMR7:41890401
atgttggtaatatcagaccagagagttacaaagagccaaggtcactgatgacatcccagatctgatgtgtctaccttctctgcccggggatggaaattaactttcttcttatttaattcactgctgtctggtctctctcataatctgacgaataaactttctaaccagatctcatgctttcctgattactggatttaatcctcacaaccatattgttaggtgagtggcatccattttatagatgggaaaatggcagcgtagggaaattaggcaactcaaccgaggtcacccagggggagcagcaggaatgggtactcatgcccaggacagcagatgccaggtgaacatgtgcagatcaaggcaaggctgcctgcatcagagcccaccaggggattcgctggtccaggagttctgggtggggcctgggaatgtgtactagaaacaacttcccacgcaacgttaacacacagctggaatcactgccctttctgtgttttatgattgttggacaaaaaaaaaaaaaaggtgaatggaaaaggaaaagtgagactgaagtaacaagagtgggagcatgagggaggatccctgtgggtcagacacactcagagggtgggaaggagagagagaggaacagcttcaagtcaagaggcttccagcagctgcagagacagggacagtctgagccacagcagctgggacacaggcacactggtcagttaaggagatcttggctggacacccatagcattagctccagtatgaaatgcattagaaaggacgaagctgagttgactgtgagctgttgttctcgcggttaatcctagacaagggaagggcaggctgtctttagcttcagtacacactgtccacgtggctcagcaaaaagctagggggtttctgtgaccatggccgctgatggctccagcctcctctgcttctgtggatctgtttttatcatgttactgaaagggtgttaatagatggaagaagaaagagagcgtctactttcccgtttcctttctcttactaaggcttgtttcagtagtgctgagaaattaactgctcaataactatcagattcaaattaccaaaacctcatgaattgagactagctgcaagaaaatccaaagtatagaatttttcaaatgccattttattagtgaacagcacatacaataatgtgtcgtctgttagacattttcaagtgggatggaggtggcagaggctccagaacctcccatacccttgtgctgctccatctgcaccctttgctctgactttgtcctccctttcacttccaaaaagttcctgttagacgcatacacataagatgagaacttcatctcattcactcagtgccactacccttgcatcttatggagaaagaaccactcatgtatgcccccttcatgcagtgctgctgggtactccacattgtgctcagggctaagagtacaacccaggaaagcctgactcttacctctaaaagcccaccgtggagtgtcccatgagcttggacttacaatgctacccagtgagtgctatccagaagtagacacagtatattttgggcgcacagggaagaaatgaaaactccatctgtgtacaggaaagggcaagaagtgtttttaaaaggaattagttttagtcttaaaatatgaataggaattttccaggtcagagggtgggcggagtggggtttccaggaagagggaagccgtgggcatacgcacagaggcaagaaagctgagaaggagttgggacgctgcagataattgcgggggcgaccactgcacactgaaggccggctggatcagacaggcctctctaatttaagaatggtatctttccaaacagagaggacaattttgccttcaaaatatctctaattctcacagatattttagttaaaaattaattatttcaacaaatgtgaactaataacctaaagttcgcctggtcagtagatttaaacatggatcagatcaaaattcatgttcaaatttggatggctctgagtcttcctctgtcctaacagcctcaccacccacaacacacggcccggctctcagtgggaagcttcccttgaggctagtgccccctgttacccctggagaccctgaaggacacctctgacatgccccctgcaggccatctgctgctgcttcattcagtggtctcctggcccctgcagactccaggctgcctgaagtagcttccagctggctcctggggcaacagctcaggggtgggttctagagtgggagagtggccttctctttatcatcttagtccagagaggtgatgcttactcccaaaacctcacaaaatatactttgaaagcagctctatcagcttctaagtttccctctccccacaatgaccaggcatggccaggaagcaagctgttctcattctcctctggccccagcctgctcacagcattggtccttaccccttctcaagtgcaagaagaaagccttctgtgtatgtatgaaggaaaacaaatggggaggaggccaaaaagccagaaggcccagtgagggcttgaattctgactggagaaatgagaaggaaggggaaatatggactctcctctc

SEQ ID NO: 1152 - DNA, 300 bp, Homo sapiens
  misc_feature (1)..(300): DMR7:43658201
ctcgtctctactaaaaatacaaaaaattagcccagcatggtggcgggcaccgggaggcggaggcaggagaatggcgtgaacttgagaggcagagcctgcagtgagccgagattgcgccactgcactccagcctgggcgacacagcgagactgtctcaaaaaaaaaaaatttaccactgaaaagaaattagctcaaagatgtgataaaatgtcatctgagaacaaatcaaacctctcgaaactaagatataacataaacacctgataaaacatatgctaatattcataatgaattataaaa

SEQ ID NO: 1153 - DNA, 900 bp, Homo sapiens
  misc_feature (1)..(900): DMR7:43768301
tgcttgggtagttcaggactgacaggactggacaccaggtctcctgtttatccttgaagctctctgggtgaatgtaagacaggacctgtcaaggcctctggcacagcctgggtttgagtctagaaccagaaagtctggaaattgcagggcagtgccgcagtgccttggctgtgaagcagggtgctttaccctccctgaactccaggcacttcgtctgtaaaatggaattaatactagcttttttttttgccagggttctgaggattagggttaatgtgtatgaactagctgacccagagaggctcacatctgttctcatcctcctcacatttgggtgttctgttatctgttatctgttctgtcactgttctgttatctgactatcactcacgtgcaagctccaagggagacttgaatgaaagttcttaaaaacagaagtaaagcacagtagggtgttggggagggcatctctgtggggcctccaggtagccaggggagggcgagcagagtgtgcttgctggggaccctctgctcccgtgtcttcatgcaccctcctacttagagtgctggcgctcccaccccacccaccacctgcgggtcagctctcagtgtcttagttatccttctgagattttttttttttttaaatgagacagggtctctcatctgggtacaaaatagtttggggaaaaaagagataaggtctctgtcaccctgtgagtgacagaggtgacgacatgtgagatagtgactcatgtcactatcactctaggctggagtgcagtggcgtgatcatagctcactgcagcctcaaattcctgggctcaagtaatcctcctgccccagcctcccaagtagctaggactataggtgtatgccacaatgcctggctaatttttt

SEQ ID NO: 1154 - DNA, 1000 bp, Homo sapiens
  misc_feature (1)..(1000): DMR7:43979501
agccctggactcacaggccccagagaacctggagaagccagcctcgcatggctgggattttcatcgggagaatcccactggccatgtactgggctctctcccagtccgagattgggctctgggctcagcactgagcaggacccaaggaagtggcttaagtctttgtggccaggcggtgtctgctgtagaaagcagtgtggcatgtggccgggtggtactgtggccagggagagaggttgcctggggctgtccaggcttcagcctgggaaagggagcacccagggaaccaagacaaggtgcagggctggaggcagctttgggctcagctgtcggggaagcatattggcaggaggggcctcctggatgtctggtcagagatggccagggggccaaggacatatgagaggcagctgagggttgccgggcgagctgcctcatgcctgtaatcccagcactttgggaggctgaggcgggcggatcacctgaggtcgggagtttgagaccagcctggccaacatggtgaaaccccgtctctaccaaaatacaaaaatcagccgggcatggtggcgggtgcctgtaatcccagctattcaggagggtgaggcacgagaatcgcttgaacccaggaggtggaggttgcaatgagtcaagatcgcgccactgcactccagcctgggtgacagagccagactctgtctcaaaaacaaaaaaaaagaaaaaagagaggcagctgaggggagggacaagggtcattagtccacatgggagctggctgaggctggtgcccagggataggggagctgagtgggtgcaggcccaggaagtgagcaattgccagtgacaccgggtggagggacaggtggaggaggagttgtgagctcagctgcacaggacattactccaaatggggctgaggagcaagggggacccccacactccccacatcccaatgctgaggcatgtgggtagggggctacccaggagggcttcagggaaaaag

SEQ ID NO: 1155 - DNA, 1800 bp, Homo sapiens
  misc_feature (1)..(1800): DMR7:45188701
ctggttcacctgccccacccccccgcccccaacccagagtccaagaagacagggttctctctctctagctcccaatcaaggcatcttgacatgatgccccttggaggagcaggttgccagcactgctcacccccacgcagctctgcgctgcaggggccgagctccaggcaggagcgaggggttggcttccaacatggtccttgagaaggcgaggcactacttgtccacagcctcatccctgcctgctgagagccacgcactgggcagctcctggccctctcgatgcccactggcacagcagaccatgagctccagggcacactcaaatcccccacctccgtgagactactggataaggttccaggaagcgagagagtccacgggtgagaggagtgggctggagggtgggggcctggattttcctgaggggtgctgaggagtgaagtggactggccagaggctgctggcccaggctgttttacagagagcaatgggagatatgggaagggtgtgttagaggtgcaggtcacatgatgggagcagcacatggcagaagcgagggatcttgaggggtcttgggcaggaggaccagccccacctcaccccatgggtggggacagtggaggggagctgggggcatccacttcaactctggcttcctgttgacagggaaggacggtctgtcaggggacggagggcccctccctcacacaggcatctctatttccttcaggccctgggccagcctccgcttccctcagggtggtttctgctctattggccgttgaggcagcgtgacccttcctccctgagcgggagaatgttccgtcctgaccccttgctgccagggctgtgagctctgtgtccatctctgttcacacagagaggccggctggcatttcaaggcactgtcttaataccctggtgcccccttccctgcaagcccctacagcccttccctcagtgtccttgctcggactggcctgggctcgtgcatcacaggcattgcggccagggggcctgtgatgcatgtgtcagctttggttacacgcctggcatatgtgtagacacagcgatggagcagccacccgggagggcgcacaagacctggcaccagggagcagaagtgggggccgaatatgtagagcctgctttggggtaactgaagggaagaaggaaagcaggaccgcaggagcatggggcctgcactgttacccaccagaaaaccgcctgacgtccaggaggcccactcctggccatggttaccaaggaagcaaggtcgaggagagagctggttgaaaataacttccaggtgggcgtggtggctcacgcctataatcccagcactttgggaggccgaggcaggcggatcatgaggtcaggagattgagcccatcctgactaacagggtaaaaccccgtctctactaaaaatacaaaaaaattagccaggcatggtggtgagcacctgtagtcccagctactcgggaggctgaggcaggagaactgcttgaacccaggaggcagaggttgcagtgagccaagatcacactactgcactccagcctggttgacacatagtgagactccttctcaaagaaaacaaaaaacaaaaacaaaccaaaaaaaaccttcctgtccttttttttttttttaaatcaaattcagttaaaattggattaactcaacttcaaatatagttgaaatgattccggcaaatggagggtgatcagtcagcaccaagcggcgaggacaggccactgggaggaagaagcctcctgaaggtgcaggccttagtcaa

SEQ ID NO: 1156 - DNA, 300 bp, Homo sapiens
  misc_feature (1)..(300): DMR7:45199701
tgacctgcccagtcttcctctccacaccgccctggccaactccagccttacgacccttctcacctcatacacttgggtgctctctcatgcctggtctccacacatggtatctattcccctctcttgttttaactcctcaaagagtccccctcaaagtgtcccctgtgccctccatggagacccctccttcttctcagggctctcagctccatctcaacacattctgtcagcccttgtaaggacctgttgataacatctgtcattcccactgatggtcatagcagcccgcggtgagctcct

SEQ ID NO: 1157 - DNA, 800 bp, Homo sapiens
  misc_feature (1)..(800): DMR7:47497401
ttctccgcagtcctcttagtaggggttaattcctgttttatagaggaagaaactgaagcccaaggtcacatgggtaagacaaagcagagtcaggatccagacccaggtctgttattcattcttctcttttatgagtcctcaaagtttcagaagctgcttctgagagctacacatgcaaatttccattttgtacttctgttctcccaaagaggccaggcaagagaaaataagtattcgcctagtacagagtttcacgtatggaacacacacacacacacacacacacacacacacacagagcaggaaatgttcaccgcgtgctcttttcttttgtttttgtttacactggagcgacgtgtgcccatggatgcctggccttgctgctctgtcccctgcccctcgagctatatggggctccctccaggaccgggctccccaccctggtctatctgacccagtcagggcagtcactcaaacattcattactgtcaccatgaaagtggcatctgttttgaattcaggggcctcatcttctctgggtgtcccactctgtcatcagagcctggctgcatgaggtcagctggccccttctctcctccgtgacacccctggtaaacagacacccaacaacatcccgcagggtggaggtggggagtgaaccttaaccaacagcacgcttgtccaaattatttctcaagtaatggaggttctgcagggagagcttctttctcaggttagaactggtcaaaagacacagaggtggggttcagaagaagatttccagggcacctcgaaagccc

SEQ ID NO: 1158 - DNA, 200 bp, Homo sapiens
  misc_feature (1)..(200): DMR7:48137101
cactgcactccagcccgggcaacagaaaaagactcaatctcaaaaaaaaaaaaaaagaaaaagaaaaagaaagaaatcctctttaggcacatgaccaataagtactctaacactagccacacaaaacagtaaccatagtgtgaaacaatgcaagcgtgtatgtgaaatttggctttacactaaatccagcttcatgttta

SEQ ID NO: 1159 - DNA, 300 bp, Homo sapiens
  misc_feature (1)..(300): DMR7:48350601
gatacagaagttgatgtgtcctaatctgttcactttcctcaggagggctgctggatgagatgtttaaccatgcaggcgctggacgcttccgtttcttgggcagcatcttggtcaatctctcttcctgcgtggcactgaaccgtttccaggctctgcagtctgtcgacatcctggagactaaagcacatgaactcttgcagcagaacagcttcttggccagtaagtactcaatgaaaaaatatgttcgccaagatgccaactcctgtaagttgtcattttgggagtttctccctaaaggtg

SEQ ID NO: 1160 - DNA, 700 bp, Homo sapiens
  misc_feature (1)..(700): DMR7:49018601
ttcagcacagctctctcaggcagcatttagagcactataattctatagtagttctgcaaagatggaagcttgtgtttcagggtagttaaaggcgtgcgcgtgtgcatgtgtgtgcgcgagtgtgtattgtaaaccaaaaagcgtctgaaactggtctcaatcgatttagaaagttggttttgccaaggttaaggacttgcctgtgacgcatctcaagacgtcctgacatgtgcccaaggtggctggggtacagcttggttttacacattttagggagacatggtgggaggggaatcaatatatgtaagacgtacattggttcagtccagaaagacaagacaacttgaagtggggagtgggcttccaggtcataggtagataagagacaaatgattacattcttttgagtttctaattagcctttcactgaatgcacaatgtacaggaatagtcacttatgccttagtctggcttagtgcaaagcaagtgatcacatatgcatttgtctcaggtgagcagagggatgactttgagttctgcctgtcctttgtccacaagaaattttctggtgggtaaattgtgagggtggtatgtagcttttcataatctttatagctgtcttacctaggaatagaatggaaggcggatttgctcaacgtcgttcccagcctgacattttcctttggcttagtgattcggg

SEQ ID NO: 1161 - DNA, 1700 bp, Homo sapiens
  misc_feature (1)..(1700): DMR7:50125501
gatacacaagagaaaaaatttgaaaagtcaaaagttatttcctacctaagtgtccatagacagatgaatggataaagaaaatatggtgtgtgtgtgtgtgtgtgtgtgtgtgtgtgtgtataaatatatattagaatattattcagccataaaaagaaaaagaacttccatttaccacaacatggatgaacctgaaggacattgtaagtgaaataaaccaggcacagaaacagaaatattgcatgattttacttatatgtggaatcttaaaaagtcaagcttatagaagcaaagagtagaatggtggtttccaggagctgaggggtggagaaaatgaaagatgttggtcaaaggatataaactttcagttttaagatgaattagttctggagatatattatggggactgtagttaataatactgtattttttacttgaaatgtgacaagagaaagatttttggcatcctcaccacatatgcacatacacacacacaaatgataacaatgggtgatgacagatgtgttaattcacttgactgtggtaatcattacacaatgtatacatgtatcgaatcatcatgttgaacaccttgaatatatacatttctttttcaattaaatgtttttaaaagcccaaaggtttagctttgaaagaattaatgaaagtgatagacctattgttagactgatcgagaaaaagagaatacacatcatcaatataaaaaattacagatcctaaaaaaagataaaggaatattacaaacttctgtgtgccaattaatttggcacttagatgaaatgaataaaatctttaaaaatcaaagttaacaaaattaatactaagtaaaatagaatatgataaatgcatatatatctgttttttttttaatcagaagacttaccacagtgaaaacttcaggcctagatagttttactgataaatgttatcaaacattctaggaaacaaccaccaatcttatataggttatttcagaaataaaagagggagtacttctcaaacaattttaggagtctaactttacctcatataacaaaatcagacaaagattttacaaaaaatagaggaaatcttagattaatatttctcacatacacaaacacaaacatctttacaaagcaaataaaaaacaataatttatagaaaagatatatcctaatcaagtaaagtttatctcaggaatgcaaatattcacttaccattaaaattaatcaatgtaatttaacatactaatggagtaaaagagaaaattaatcattttgctagatatagctttgaagaatttttaaaaatatataatgaacacgtatattgaacacagagtagaaaaaggtgaaaaaggaaatcacaagcagaaaagttaattcttcataggaatagaaaaaatactaaatttatatgaaaatgcaaaagacctggaatagccaaagcaatgctgtgcaaaacaagaaagctagagacatcacacttcctgacttcaaaatattccacaaaactatagtaatcaaaccagcatggtactagcataaaaacagacacagagaccaatggaacagattagggagcccacatataaatccacacaattacaaccaactcatcttcaacaaaggctccaggaatacacaatgggaaaaggacagtcttttccataaatggtgctggggaaactgtatagc

SEQ ID NO: 1162 - DNA, 200 bp, Homo sapiens
  misc_feature (1)..(200): DMR7:52113501
ttccattctaattaccagtgcatgcagcccccagtcacgtgccccctgcttgctcaattgatcacaaccctcttacgcagaaccccttagagttgtgagcccttaaatgggacaggaagtgctcactcggggagctcggtttttgagacgtgagtcttgacgatgctcccggacgaataaagcccttccttctttaactc

SEQ ID NO: 1163 - DNA, 100 bp, Homo sapiens
  misc_feature (1)..(100): DMR7:55998401
gcttacgcgaacgtttgagaaatcaccatttctcctcacagtatggacttttcctacctcccacaaataaaacaaatatccaggtaggatctgttttttt

SEQ ID NO: 1164 - DNA, 200 bp, Homo sapiens
  misc_feature (1)..(200): DMR7:57337201
tccatccatccatccatccagtaagtacctaccaagcatctcctttgtaccaggtccagtgctagattcagaggagctagaaataagtaaggcttgctccctgacctcatagagctcccagtccaggaggagaggtagatatgatggatggtaggaaggccttgttcatttattccacacatgtttcatggtgccaccaa

SEQ ID NO: 1165 - DNA, 1200 bp, Homo sapiens
  misc_feature (1)..(1200): DMR7:58879801
cgatttgaggacaattgcagaaaaggaaatatcttcgtataataaccagacagaaacattctcagaaagtgctttgtgatgtgtgcgttcaactcacagagtttaacctttcttttcatagaggagtttggaaacacactgtttgtaaagtctgcaagtggatatatggacctgtttgaggccttcgttggaaacgggatttcttcattgaatgctagacggaagaattctcagtaaattctttgtgttgtgtgcattcaactgacagagtggaacgtccctttagacagagcagatttgaaacactctttttgcggaatttgcaagtggagatttctagccatttgatgccaacagtagaaagggaaatatcttcaaataaaaaccagacagaatcattctcagaaaattctttgtgatgtgtgcgttcaactcacatagtttaacctttcttttcatagagcagtttggaaacactctgtttgtaaagtctgcaagtggatatatggaccgcattgaggccttcgttggaaacgggatttcttcatttcatgctagacagaagaattctcagtaacttctttgtgctgtgtgtattcaactcacagagtggaacgtccctttacacagagcagatttgaaacactctttttgtggagtttgcaagtggagatttcaagcgatttgatgccaacagtagaaaaggaaatatcttcaaataaaaactagacagaatcattctcagaaactactttgtgatgtgtgccttcaactcacagagtttaacctttcttttcttagagcagtttagaaacactctgcttgttatgtctgcaagtggatatttggacctctttgaggccttcgttgcaaacggggtttcttcctttcatgctagactaagaagagttctcagtaacttttttgtgttgtgtgtattcaactcacagagttgaaccttgctttagagagagcagatttgaaacactcttgctgtggcattttcaggtggagatttcaagcgatttgaggacaattgcagaaaaggaaatatcttcgtataataaccagacagaatcattctcagaaagtgctttgtgatgtgtgcgttcaactcacagagtttaaccttttttttcatagaggagtttggaaacacactgtttgtaaagtctgcaagtggatatatggacctctttg

SEQ ID NO: 1166 - DNA, 200 bp, Homo sapiens
  misc_feature (1)..(200): DMR7:60233201
agaaaattctttgtgatgtgtgcgttcaactcacatagtttaacctttcttttcatagagcagtttggaaacactctgtttgtaaagtctgcaagtggatatatggaccgcattgaggccttcgttgtaaacgggatttcttcatttcatgctagacagaagaattctcagtaacttctttgtgctgtgtgtattcaact

SEQ ID NO: 1167 - DNA, 2800 bp, Homo sapiens
  misc_feature (1)..(2800): DMR7:63231501
aaaaaaataaataaatatttgttcccatttcagattgttttcttgcactgggatcaagctgaaagtattaacaatcaaaatacttagaattttgttgatgagttaatgctaattatttctcaatctctaccacttttgggcatgagccaccatgcccggccaaaactccattttaaaagcccaatttttcacttccatttgcttcagtgtttttcatctgttaaatggagttaataacaacacctgctacatctacctctggtgattgtttttagatatgtgatgaagggctggatgcagtggctcacacctgtaattccaacaatttgggaggctgaggtgggaggatcacttgagcccaggagtaagaccatcctgggcaacacacaccgcatctctactaaaaattaaaaaaaaaaaattagcccttcatggtagcacacgattgtagtcccagctggtagggaggttgaggcaggaggatcacttgtgtgttcgctttcctagctagttgctgtggaaggagaatgctttcttcatggcctcatctgtcatttcgtgtccctctgaagaaaactagtttccactgtgtaacaggcaggcatgaaactatctaaagcacagttcagtcctaaaaggtctgagagaaccgaatgatgtactaggtgaagcagtgcattgtgggaatcacaaagcaaacagtactccagaaagacaaatatcagaagcttccccttccattttttttctttttttttttttgagacagtgtcttactctgttgcccaggctagagcgcagtggtgatcacagctcactgcagccttaagctcctgggctcaagcaattctcccatctcagcctcctgagtagctgggactacaagtatgcaccaccatgcctggctaactttttgaatttctatagtaatgggatctcactatgttgcccaggctggtctcgaactcctggcctcaagcaattgtcccacctcgacctcccaaagtgctgagattacaggtgtgagccacctcacctcggcccccttctccatatgcctccagaaacatgtccctggagagtagcctgctcccacactgtcactggctgtcatggggccaataaaatctcctgcgattgtgtatctcagacatttctgtgtctttcatcctcaccctgggaccctaaaggcagagggcccgagtgtcagtaactctggtcctcccctaaagagaaacggagatggtggctcatctaggaagtggaggagcagggggttcctggttctcaggccacgtgtgatctctgcccacccagggcctgccccagcctgcaggtattgctgtgtggtgggaatacccgcttcccttgtgcatagcctttgagaggggatcgtggcctcagcttcacgggttcctggccagggccaagcgctccttctgcagaggcctgcatgcatcctacccctttgacttgtatttccgtggcttcccctccccacctgccccccagccctccctgactggccagcccctcagtagtcctcctcggccagggagagcagcacggccttgggtgtgttcttgaaaagggttgcccagctctgctgctgctccttcctcacccaggggccatagattcagaaagcgtaggcgtcgatgagccggcgcagaggctggagggtgtaggggtgggtctcggatgacgatctcccgggtcaccgggttcacccggtggtactggtagtagctccgcactgaagccaccacagtcagagcgatcacctgaaggccacgcggagaagctgggctgcagcccccgccctgccaggccctgcccctccagcacaggactctctgggctcatttgccacgaagccttcagtggcttctgcggggccctcctagtgtcccccacttcccacttggccagcatcctcagggacggagccagtgggctgacacctgccatctctgaagccatcacagggcggctgggaggggaggggtgggtactctggaaacccgcggggtataaggacccctgggggaggagacggcttagaggtttgcacttggggagctggcggcaactgccacagggtctgggtcaggaggcttcgtaccttgaacttcccccgggggctgaagtgccgcacttcctccaccacgtactgcaggaagaatgggtgtgccaaggcctcttccgctgtgcagcagctctggggttgcaccaacaggaatcgggagacctgggagggaaggagagggtacccgagaaacttaaggcaggtcccctccagcatgtcaggagaggcggggcctccctgggcaagggagcctggcatcgcagccctgagcccaggagccagtcggccttctctctcaccaggtccttcatggtgtctgagtaatcatcctactcaggcgacccaaactggtagatgctgctcatgatcatcctcagcatcagcatctgcttctggtgccagaagggtggggagccagccagcagcatgtacatgatgacgcccgtgctccacctggacgtgagagggcccagggccacttacccagtgccaggggcaccgacccagccctgcctgcttcctccctcgcccagcccaggcgggtgatcctcctcctggcgcactcacatgtcccctccttccgtagcccggatggtcctcattcatggagcactccatgatctcagggccaggtaactgggggttctgcagacctctgcaggaacagtcatcatcaggacaggtcagcagggcgctcagaagaggaagtcc

SEQ ID NO: 1168 - DNA, 1200 bp, Homo sapiens
  misc_feature (1)..(1200): DMR7:63556001
ggtgcagcgacacggcaggcactgggtaaatgccccatggtgggggtgtgtgagcggcgtcggggtgcggccgctgtgaggggcagctcctcttgtggctggggcggagctgaggacactcggagttggggtgggagagacgggactcaggacttagagggagcggaagggggcggggctgggaagggaggtagggcggggagctgggggagcgggtgggacggggctgtgtggggccaagctgagtcggggggtgggatgcagctgggcgtggctgagtgggggcggagctgagtggggggcgggatgcagctggaccactcattgtaggaattgctggaaggggctggtggagcaggtctggttgtgggagttgggtggtggcagtgggcagggccggcggtgatggaggagcctgtgggttggggcagggccggtggtggagggcggggccggcggggaggggtctgtgtgtgggcggggctggggcggggcggagcggggctggggcggggcggagcggggctggggcggggcagggcggtgcagggagctgggcggattaggcccccggcccactgtgcacgctccccaggcactgcgggcgtgatgatctctctgagccgcatcctcacggagctactgctgcccgacgagcgcgccagcatgctcatcttcttcctggtgtcggtggcgctggagctgctgtgcttcctgctgcacctgttagtgcggtgcagtggcttcgtgctcttctataccacacggccgcgcgacagccgccggggcaggccaggcctgggcaggggctctggctaccgcgtgcaccacgacgtcgtcgccggggacgtccacttcgtaagtgcgcaccgcccacctccgttccctcctctgtccccaccgcgacgtagggaagtacctggggcccagcccctgccctgcatcccaggctgcggcctcctgctgtggtggagaatccttcccgccagcaccctttattctgtcgactcaggtgtgggttcttagtggcaccccacgtctcgtggcctaaggccccactccacccgcatctgtggtccggagatctgcccagctgctgtgtcccacggtgtggggcgtgcatggtccctgtccgcagtgacaccccacatgatgtacactaaagtttccatccctgggacagcccacgttcgttctgag

SEQ ID NO: 1169 - DNA, 1100 bp, Homo sapiens
  misc_feature (1)..(1100): DMR7:69482101
tggttaggtgggtctcgaactcctgacctcaggtgatccacacgacttggcctcccaaagtgctggcagtataggagtgagccaccgcacctgacctccatgtattgatttatgattttgcctgtagcttctgctttcttggaaattacccctgcctttaaaaacccttatctgcaagccatccgcaagttcaggtcttaagcatgagctgccctgattctccttgctttgtacctgcaaataagcaactccctctatgccaatgcaaaaccccagtgtggatatctggtcttactgtgccgggcaagcagaccccagtttggttctgagagacaggactagctggatttcctaggccgactaagaattcctaaacctaacactggggaatgtgaccgcacctacctttaaacacggggcttgtaactcagctcacacccaaccaatcaggtagtaaagagggctcactaaaatacaaattaggctaaagcaggaggtaaagaaatagtcaaatcatatatcgccagacagcacagtgggagggacagtgatcgggatataaacccgggcatttgagcagggagcggcaaccccctttgggtcccctcccattgtatgggagctctgttttcactctattaaatcttgcaactgcacactcttccggtcagtgtttgttaccgctcgagctgagttttcgctcaccgtccaccaccgctgtttgccgccatcgcagacccacagctgacttccacccctccagatccggcagggcgtccgctgggctactgatccagcgaggcgcccattgccgctccccatggggctaagggctctccattgttcctgcgcggctaagtgccctggttcatcctaattgagctgaacactagtccctgggttccatggctctcagtgacccatggcttctaatagagctgtaacacttactgcatcgcccaaggttccattccttggaatccgtgaggccaagaaccccaggtcagagaacaaaaggcttgccgccatgttgggagtggtccgctgccatcttgggagctctaagaacaaagacctgccggtaacagttctataacaag

SEQ ID NO: 1170 - DNA, 400 bp, Homo sapiens
  misc_feature (1)..(400): DMR7:71269201
atgcctataatcccagtactttgggaagccaaggtggtaggatcacttgaggccaggggttcgagaccagcctgggcaacatagtgagaccctatctctacaaaaataaaagaaaaataagctgggcatggtggtgcacacctgtagtcccagctactcaggaggcttaggtgggaggatcatttgagcccaggagtttgaggctgcagtgagctatgattgcgccactgtacttcaggttgggcaacagagcaagaccatgtctattaaaaaataagcctttgcttcccttgctctgtcttctcccctcttctctcgtctgccttggtcttggaggaggcagtagaaggagtaggggctggaggaagtatggagggccatgccactgctcatctgtctg

SEQ ID NO: 1171 - DNA, 5500 bp, Homo sapiens
  misc_feature (1)..(5500): DMR7:73173801
agggctgttcacgggaggttgaagtgagatcttacagagaaagtgcttagcaggtgccccaggtccagagtgtggggttggctgggagtcgtgtgcatttcctgccctgaccccctctgcaagcttggttcctgagtgcttgagtgaggcacacttgacctgcttatgtgattcccatggcaccatggtgtggggaatgtctcccaacaagacaccttatcaagcgctctctctccactctgctgttcctaccacatattcccaggcaggtcaccctacctttcttgttttcttttgaagacagggtctcgctcggtcacccaggccagagttcagtggcaaaatcatagctcactgcagctcctggactcaagggatcctcctgcctcagcctcctgaatagctggggccgcaggtgtgtgccaccacacctggctaatttttacaatattttgtagagacagggtttcactttgttgcccaggctggcctcaaactcctggcctcaaacgatcctcctgcctcggcctccaaaagtgctgtgatttcagacgtgagccacctcacctggcctgacccggcctttctgagccttcagccctcatctttgtctgggggcattctaaaaaccaaggaatagaataccagggtcagactcagactttgcgttcagtaggccatgaatacttgggttttcgctcagtttctggggcattgagactgatagaagcaactgacccccttagctaaggcaggcaggcaggtattgtcaccaagagaccctggagatcaggagaggttatttggggttggggatctccaaggaggggcagggaagttagtaccatcgtcgggctggaaatgggaagcgtttggctcgttggaagtggtgaggctggggtgtgggaccctcgccatgtgacctacgtggggtgatctcagtagaaattgggacctgccaaccatggttgcctgggagagttgcctgggcacctgcctgtgatcccaactactcaggaggctgaggtgggaggattgcttgagcctaggaggtagaggttgcagtgagccaagattgcatcactgaactccagcctgggcaacagaacaattctctgtctcaaaaacaaaaacaaaaacaaaaacaaaaaaacaaaaaaaaactatttacccaatttcccttgcttatgcatgcttaaattttgtataagcttaaatatcttttccatctaagctgtactctatccccttttataactttaggtggctgtctttattaaaagttttttcttgaaagtcttaaaacaatatagttcttggcaatttgaaagttatttgagaaggggaaatttataatgacaattcaaatgaagcaaactaaaaaataatgaagaaagacagaggaaaaagcagtattcacttgaacacatcccaaacaaagaaaatttcaaatgtaacaaggaaaaagcctgctaaagctcacaatacagaaataactattgatactcaaaatagctttaaagccctgctcaccttttgaatgttgggaattgaccaggaggtgactgtaactgtaagatggttcttccagtaatgaccattttctttttcaagatgatgattattctccaccgtctaagagaccaaaggccaatgagctaccgcagccaccagtcccggaacccgccaatgctgggaagcggaaagtgagggagttcaacttcggtaagttctcagcgaacgacgtgaccttttccttcatcttctggattctcagtgtgactgataaatgttgcaacatgctctgcagggggaaaatgctttagcgtctattactgcatcataatctcatctttggaaagccaggagcattttgaaaattacattacagacattgtttaaacatagtttggatttaccaaagcataggacattgtcttgtctgatgttaattagtcagctcaagattagtgctaaagacttagtaatttagttatttctcttagctttaaaatctttatttcagaactatttcacctcttggttttcttttttttttttttgctctgtgttactgcagctgctaatctgtgagctctcaatggatgatgtatcctagcaagggactgaatgagatattagcggcaaattatgttgatgattcatattttgaataaatggaatattaagcttgtatacatcttgaaaatagtactttaatattctactgtgtcatagtcacaatgattggatatgaattgaatttttgtactttttaaatatgtttttgttctttatttttaatttttattattatttttttgagacagagtcttgctctgtcacccaggttggagtgcagaggcacgatctcagctcacagcaacctccgcctcccgggttcaagtgattcttctgcctcagcctcctgagtagctgggattacaggcgcccaccaccatgcccagctaattgttgtatttttagtagagatgggatttcaccatgttggccaggctggaatcgaactcctgacctcaggtgatccgcatgcctcagcctcccaaagtgctgggattacaggcatgagccactgcacttggcctgttctttagcattttaagttgcaactatatatccgtaaagtcttatttccacacaactaacacatgttttaggaagtttgctaaaagacccctggagacctttatcgtggtctcccttttgtcgtgtttcatttgcttgatcttttctgccctcctgcttttcagaaattaaaaggctaaaaagaggtgctaaatgttaaaacttctcgtgtagtctcccatgagactattaaaagtaatggcaaaagccacagttacttttgcaccaacctactaattctaagaaccaccaaaaaggggaaagttcttggaaagcagtaaaatgatatggacagttgggatgtaaaaatgtagaaaatatgtcattgtatgttcagtcatcccaagaccctagtgctgccccgatggtagggacttcttaatgagaattaacttttgctcaattttcagagaaatggaatgctcgcatcactgatctacgtaaacaagttgaagaattgtttgaaaggaaatatggtatgtctaaataggaaaattcctgtaatactttgttcatgagcatttacacaatggcgttactgttcatcatgggggtgatgtggacaagcccagcccagggctgccagtgaaccgtgccacactttcttacacgtctctcattgtaaggtccttagtagtgtctgtctaaatattagaaacagtctttgtttctagattacagtaaagctaaggaaaagttgtatttctgtagttatcagctaacatttcttttaaacttccagcatggatatttgggaatttatttacatatttattacaaagctctggatcttgggggtttcattaaaaattatttttttaactgatagtttctgttaatctactttgttaaatccagtatttgctgagatccccctattgtctctacttttatcttttttttttttttgagacggagtctctgcattgcagtagtacgatctcggctcattgcaacctccgcctcccgggttcaagcaattctcctggctcagtctcccaagcagctgggactacaggtgcccgccaccatgccctgctaatttttgtatttttagtagagacagggtttcaccatgttggccaggcttgtctcaaactcctgacctcaagtgatcctcccgccttggcctcccaaagtgctggcattacaggcgtgagccacccttcccggccactgcttttatcttgatgtataactgagttgatgctagatttcaattccttctttgtccttttactattctgtcctatagccacctttatataatgatcaaagaaattcacaatttgttatcatttttattttttataaaatatttaaaatgatttaaaataaaaatcattttatttttatcatatttattatcatctgttatcatttttatttggatgactatttactttgccattaactagcaagcggtaaaattgtatgatatgcagttttaactgaattgctataagtgaaaatttaaatgcaataaaccatattgatggtatttgtgttaacaaacttaaaatgagcattttttcttcatcatgagtaatataacctacccctcaatgaaaatctacaattagagtaaatttgctaatgaattcagtaacttttccatatttttagtggtttacttaaggttctcttagtgtttctcccagtttttaatagcttacaccttttttgcccgtggttttttgttttttgtttttttttttttttttttttttgagatagagttttgctcttgttgcctagtctggagtggcacgatctcggctcactgcaacctctgcctcccaggttcaagcaattctcctgtctgagcctcctgagtagttaagattacaggtgcccgccaccatgcccagctaatttttgtatttttagtagagacaaggtttcaccatgttggccaggctggtcttgaactcctaacctcaggtgatccacccacctcggcctcccagagtgctgggattacaggcgtgagccgctgcgcccggcctcatgttttctattggttcattatgaagcaaaaacttcatagcatgtgctacctggaagcactgtgacctagtggtaagatcataggctctggggacacagtgccttgccacgtctcttctcctgtctgagtcttagtatcctcttttgtggtcatgagaactgaagatctatcctggagattgataagatagtaaagtgcttcacgtaatacctggcatacatgtaataaatgcttcctgtgtgtatatatatacacacatatacatatatatgtatatgtacatatacacatatacatatatatatatatacataaacacatatacatatatatataacacagtgaaacccccgtctctactaaaaatacaaagaattagctgggcgtggtggcgggcacctgtagtcccagctactcgggaggctgaggcaggagaatggcgtgagcccgggaggcagagcttgcagtgaaccgagatcacgccactgcactgcagcctgggagacacagcaagactccatctcaaaaaaataaaaaaaaagttaaagagcactacagattcaatgatttattattcttttctacaaattgtgtttaaatgatatctctttctctttttgtccttatagctcaagccataaaagccaaaggtccggtgacgatcccgtaccctcttttctagtctcatgttgaagatctttatgtagaaggacttcctgaaggaattccttttagaaggccatctacttacggaattcctcgcctggagaggatattacttgcaaaggaaaggattcgttttgtgattaagaagtaagactcttggattcctgttgaactctt

SEQ ID NO: 1172 - DNA, 2500 bp, Homo sapiens
  misc_feature (1)..(2500): DMR7:74747501
acaaaattagggccaggcgtggaggctcacgcctgtaatcccagcactttgggaggccgaggcaggcggatcacctgaggttgggagatcgagaccagcctgaccaacatggagaaaccccatctctactgaaaatacaaaattatctgggcctggtggcgcatgcctgtaatcccagctactcaggaggctgaggcaagacaatcgcttgaaaccaggaggcagaggttgtggtgagccgagattgcgccattgcactccagcctgggcaacaagagcgaaactttgtctcaaaaaaaaaaaaaaaaaagaagaagaagaagaagagaagaaaaatgggtttctgtagaaatagaaaaatggtttctgtggaactcgccggaatgacaagaatacccatttcaatttgaacctagctttgttttctggcacaggctggacttgaagattgtaacctagagacacttacgtcattaaatgtgtgttgattatcattattttttctgtcttttaggccctaataacaacaatcctcaaacctcagctgttcgaaccccgacccagactaacggttctaacgttcccttcaagccacgagggagagagttttcctttggtaagtaagcgttttatttttctttctttcatagttttaaatagaatacgttcattatgtttcattttaccaggtgaattgttcctattggtgagtcagtatatatcaaaggttaaaggaatagcccgtagagccaggctgcctgagttcagatctgagttcaaatccgatgccacttgggcaggcgaatacaccctgcctcagtttccctttgtgcaaaatggtaataacattactttctttctcatgaggttatggtgaggattataaatactgtcatttaaagtacttagaaccatacctcgcatgtagtagagactataatttgtgggggcattttgggggttttcatttgttttttctttattttagcatttgttcacttatttgtagtcaacataaaagcaatgtactaaaacagtttgcttatgtatcaggatgggagtagttgtcaagtcatatcatggtaaaagattatgcattttttatttcttcttaaagatgcacaaataaggccaggcgcagtggctcacgcctgtaatcccaacactttgggaggccgaggtgggcggatcacctgaggttgggagttcgagaccagcctgaccaacatggagaaaccccgtgtctaccaaaaatacaaaattagccaggcatggtggcgcatgcctgtaatcccagctactcaggaggctgaggcaggagaactgcttgaactcaggaggtggaggttgcagtgagcagagatcgcaccattgccctccagcctgggtaacaagagcgaaactctgtctcaacaaaaaaaaaataagatgcacaaataagatgaaacactcctgcctgtgaatgtgtattgataagtactgtgataagtattgcaatttaactctcttatgttttatatgcagaggcctggaatgccaaaatcacggacctaaaacagaaagttgaaaatctcttcaatgagaaatgtggtaagtctattttgaaaccttcttactgccacgcagggtgccttcatgggagtaggagggagcagagtgggatactgagcgttggagtatccctgtcattggcaacgtgtgggtttttcgggattgaatggcgtcatttcgcccatgttctgtttcgtgtacgcggctgttttgcaggggaagctcttggccttaaacaagctgtgaaggtgccgttcgcgttatttgagtctttcccggaagacttttatgtggaaggcttacctgagggtgtgccattccgaagaccatcgacttttggcattccgaggctggagaagatactcagaaacaaagccaaaattaagttcatcattaaaaagtaaggaaactggatgaagtgggattagcatgagttgattgtgtttgacactgggagatgggtatgtgggtttgtgtttgtggcagggctgaattagctctggagtcagaaaaactgctttttaagctgcactcttgtatatgtttaaaacttctggccaggtgcgatggctcacacctgtaatcccagcactttgggaggccaaagcaggtggattacctgaggtcagaagttcaagaccaacctggccaacatgatgaaacccatctctactaaaagtacaaaaattagctgggcgtggtggcacgtgcctgtaatcccagctacttgggagactgaggcaggagaatcacttgaacccagcaggcagaggttgcaatgagccaagatcgtgccactgcactccagcctgggcagcaagagcaaaactccatctcaaaaacaaaaaaaaaaaaaaaaaagaagaagaaattttccttatgctgctggtagaagggaaggaggactccaccatactagagagataacgacttttggttgctaaatcta

SEQ ID NO: 1173 - DNA, 300 bp, Homo sapiens
  misc_feature (1)..(300): DMR7:75250501
tcttacaatggttttaaatttacagaaaaattgttaagacagtaggattcgcatatatcctgtaccatttcccccttttattaacatcttgcactggtatagtatatttgttaccgttaatgaactgaaattaatacattgtaattaacttaagtccatactttagttagatctccttaatttttaccaatttcctttttcttttcttttttttttctttctttcttttttttttttgagacggagtttcactcttgttgcccaggctggagtgcaatggcgcgatcttggctcaccgca

SEQ ID NO: 1174 - DNA, 500 bp, Homo sapiens
  misc_feature (1)..(500): DMR7:76629301
cgagaccagcctaggcaacatggtaaaacccagtctctactaaaaaaaaacacaaaaatttgcctggtgtggtggcatgtgcctgtagtactactcaggaggctgaggctggagaatcgcttgaacccagaaggcagaggttgcactgagctgagatcgcaccactgcactccagcctgggcaacagagtgagatcacacacacacaaaaagttaacacttctgtatgggaaaagacaagatacacatctaaaagacaagccaagactgggaaaaacaacgtaacacatataaccaaaagaggattcataagtagaatttataaagaactccaaagaatcaataacaaaaagatgacccaacttttaaaaaggacaattgatataaaaaagctatcgaatgggaaacacaaatacctaataatatatacatatgtgcatatacgtacatacacatatacatttaacctcactagtaatctaggaaagactaacaatattt

SEQ ID NO: 1175 - DNA, 400 bp, Homo sapiens
  misc_feature (1)..(400): DMR7:77441801
aagatttaaaaatgtgaaagtatttgggggaaaaaaatgaagacttcgcaaatataaagtattaacatcaactttgttattaccatcaagcacaggtaacactggctacttttttccctagataactatgtataaagtagcattaaaatgtgttttggggtgggcacagtggctcattcctataatcccagcacttttggaggccgaggcaagtggatcgcttgagcccatgagtttgagaccagcctgtacaacatatcaaaactctgtctccaccgaaaaaaaaaaaaaaaaaaagcacaaattaggcgagcatggtggcatgcacctgtagtcccagctactcagaaggctgaagtgggaggatcgcttgaccccaggaggttgaggctgcagtggg

SEQ ID NO: 1176 - DNA, 500 bp, Homo sapiens
  misc_feature (1)..(500): DMR7:77481101
aagttattgaattaagtacaaattgaaattgagttcaaacttagttgatttacatttttctcaaaatagatttagaaggcagaacacaaagcataaaaataaatcatctggccgagcgtggtggctcacgcctgtaatcccagcgctttgggaggctgaggcgggtggatcacctgaggtcaggagttcaagaccagcctggtcaacatggtgaaaccccgtctctactaaaaatacagaaagtagccaagcatggtagcgggcatctgtaatcccagctgcttgggaggctgagacaggagaatctcttgaaccgcagaggcggaggttgcagtgagccgagattgcaccactgcactccagcctgggcaacaaagagcaaaactctaactcaaaaaaataaataaataaatcatctacttcagaggaaatagatgactatcagtcattgtgttaaaactatagaaatttgatagagttcaaaataacatttaatatgc

SEQ ID NO: 1177 - DNA, 900 bp, Homo sapiens
  misc_feature (1)..(900): DMR7:81747801
tgcgtgcctgtagtcccagctacttggaaggctgaggcaggagaattgcttgaacccaggaggtggaggctgcactgagccgagatggtgccactgcaccactccagcctgggcgacagagcaagactctgtctaaaaaacaaaaaacaaaaaacaaaaacaaacaaataaatatgaaaacatgaaaagtatcatctgattcttacagtgaggaaaacaagtctcacaaaagttttaagagacttacctaaaacacaaaatgttaaacctgagccaggaacacaaatcttctgacccatagtcttagtattttttttgcattatcccaaactgcctttttgttttatatattttaacttatttcctacatattctaactggttatactttatgatatactgatagcaataactttagaaagttggtatccctacccttttcaacattgtcctcattgccctctgcttttttgtttacaacagttaacttgctctcctgttgaagtctcatctattggaggaattgcagggaaagtgcatgggaatgtaactagattggacaccttatccaaagtcaatggctgaaaagttggctgttttaccacggaatcaagccatcaagttagtcataagaattatctcaagaaagccaaatttttaactcatattcacttttcaagctttgggaattctcagattcttctaatttttcttaaagtcaagcagttcaggtgaaaccaagtccatgtattcaaggaaacaggtgaacatataaacgatgtaacagtttatatgtaggagtgccctttggctctgtctattgctgtcagtacattatttacctgctccagcaagttctcctctaaaacaaaacaaaacaaaacaaaacaaaacaagctaa

SEQ ID NO: 1178 - DNA, 800 bp, Homo sapiens
  misc_feature (1)..(800): DMR7:83488601
aacatgcaagactcaacactggactctgtatccttcttccagaagctaggagaggatatgcttccgcaacatggcagactataggtggtgggcctgagaaactgaagttctatataagtcaggggctgagagaatgctccaggtgatggtgaagctaagctccagccagacaagtggagcatggaggataccttcaattaaaaaccaaaacattgtaaactgatgaaaactggtaaattgtactacattgagaggagtataaaaacttttgtagagaggctggcgaaaaattagtgaaactaatacaaaaatcttatcaaatggaaaaaatggggtaatgtttaatttcaagaggaacaagaaaattgtagaagtaaaggaaagaaggaaggaaacaagggcagaagaaagggagggaaaagtgtgataaaattccagcatgtggctcagtggtgaatactatcttcctaataggtaaagacactggtatttaaccaaaagttttggtataattattttgggaagatggagggcaagtgattggagggttgctgatgaagtatggtacacagaatattttaactgtggtattgcaaaagaaggatgctaaaattctcatcttccttaaagatgtatttcttaacagatattgcctaaaatgaaacatatcaataaacagtatgcaaatgttattttgaaatatgtagggaagaaccagaagaaacaacaagaagtttaaaattattacctctagggatagggaactggcagaaaccaaggaatgatgctttgtcataatt

SEQ ID NO: 1179 - DNA, 700 bp, Homo sapiens
  misc_feature (1)..(700): DMR7:83708201
attgtttcatgtaatgtaatattattattttgtagttgttccatagttcttgaatattctgctctgttttttgttgttgttgttctctttgcttttcagttttggaggtgtctattgagatatatattaaaactcagagattctttcctcagctctattcagtctactaataagcccatcaaaggcatttttgtttctgttacagtgtttttgatctctagcatcttagggtttccatctttctatttacattgcccatttgttcgtatatgctatctactttatccattagagaccttagcatattatcatagttttttaaattttctgtctgataattccaatatccctgccatgttcaattctgatgcttgttcctcttcagactgtgttatttgccttttagtatgccttgtaatttttccttgatagccaaatacgttgtactaggtgaaagaaactgctatacataggcctatagtaatgtggagataaagtgtgtggtgaagggaagagttctatagtcctatgattaggtcttagtcatttagtgagtctctgttcctctagactgtgaattttacattttttttagtacctgcatccccactattggtacttagaaaacaatatctcagaatacggggccttgtgagagaggagaaggaagaaatgggtcaagcaggcagttagggtgggt

SEQ ID NO: 1180 - DNA, 400 bp, Homo sapiens
  misc_feature (1)..(400): DMR7:84429501
aaaatatagagtttgttatatatatatatatatatatatatatatatagcgagagagagagagagagagagaggttaaaatcgtatctagtgtatctgattacatgttatcattccactttttcctgccctggtcatcctacacccttcccctaaaaatagaaagatagaacctcagcattttaggtgggggtaggagaggatagagggcagatctcttatccaagggtgttctgtcaggtaagacgcacaaaagaaagacatggtaaaggaaagaatagacggtgtaaatacttacataatcttagttttatttactgtaaggaaaaatgttgggaggaagaaaatgaggcaggaaaatggacatgaagcctttccttccgatggcatctttaacaaga

SEQ ID NO: 1181 - DNA, 400 bp, Homo sapiens
  misc_feature (1)..(400): DMR7:86726701
cacatagttaaaaatgaaagcactaagaacttctttaaagtcccattaacttcgcattcactgttcagctaatctgagaatctattgccaattaatacagtcacttcctcttgtaacactattcttaacagaactggtcaatctccgtcattcaagagtgataactatctgtcaggagaggtctcagtactggcaataaggaacaagtttgaaatggacaactttgacattgcagccaggatagaggcagggggagaaaagacccaagtgggaatcaaatacaagtaataagcaaggtcccaagacccagtcagggatagaaactacagattaggagacaattcaagttagaataagacacagttctctttcctagggaaattaaataaaatgggcagga

SEQ ID NO: 1182 - DNA, 2300 bp, Homo sapiens
  misc_feature (1)..(2300): DMR7:87205701
tcactatcagcatttggtcaaaaccaatcaacaagtctctaggaaggaaactttcccacatcttcctgtcttgtgagccctccaagtctctaggaagtgccaaacttttcctatcttcttctgagccctccaaactgttccaacctgcctgttacccagttccaaagttgcttccacattctcgggtatctttacagcagcaccccactcctggtaccaatttatgtattagcccgttttcacactgctgataaagacatacctgagactgggtaatttataaagaaaaagagatttaatggactcacagtttcaagtggcagaaggcaaaagataacgtcttacatggtggcaggcaagagagaaaatgagagccaagcaaaaggggcttccccttataaaatcatcagatctcatgagacttattcactaccacaagaacagtatgggggaaactgcccccatgattcaattatctcccaccgggtccctcccacaacacgtgggaattatgggagctaaaattcaagatgacatttgggtgaggacacaggcaaaccatatcatcatccttcagaactcaacactatcaacttcactgtaaatcctttctggacaccaccctgggcacctcccctcagagcacccacatcactttgctcagtctttacacttaactgcatcaaaatgtattgcttgtgtcccacactggcatttaatgatgggaaagacagtctacaagtagtcccccttaccggcaggggatacactccaagaccaccagtggatgcctgaaaccacaaatagtaccaaaccctatacatactgttttttcaatcagataacagagatggctactaagtgactaacaggcaggtagcatctactggacaaagggatgattcacatccccagcaggagcaggacagagtgagagttaatcatattacatagaacagtgcacagtttaaaacttacaaattatttctgaagttttccatttaatatttttggaccatggctgaccacaggtaactgaagcctagaaaagtgaagctgtgaattagtgggaactactacacttgttttccttcttgacagtgtggcacactgtaagcactcaatgaatgttcgttaaatgaaagactcaaagcagaaatggccaacggtattttctttagaatgcctctcaccagtagagaccattcatctcatcttaccacttagggcctggcctatcaataggaacataatgtgcctcactgctgcagggcaggcatgcaatggcaccacagaagctgtggcctgatcctgcagaccaacaggtcacggtctgccagccacaaaggtgcaacaccctaacagatacctcccaggctaggctctgttgttcccaaagaaatatcaatggtaaacaatggggatctctgaggtccacgttttcctgagtagaagcccagttactttctgctagggcaggaccaaggactgatttataaggcatcacagctctgaactccagctgacaaatcaatccttcggcaatgctccccaacactcccagagaggggcaaggcaaaacagagaaaagtctttgcagaaaagcaaaagccggccgggcgcggtggctcacgcttgtaatcccagcactttgggaggccgaggcgggcggatcacgaggtcaggagttcgagaccatcctggctaacacggtgaaaccccgtctctactaaaaatacaaaaaaattagccgggcgtggtggcgggcgcctgtagtcccagctactcgggaggctgaggcaggagaatggcgtgaacctgggaggcggagcttgcagtgagccgagattgcgccactgcactcccacctgggccacagagcgagactccgtctcaaaaaaaaaaaaagaaaagcaaaagcctggatggacaatgccatgaagacattccctactacattcttgagggagaaggcagggtagagggtggaggaagattgagaactccatttttggtgttacttctaaactttctatgtgattctacaaaagtctttctcctcagacagcatcgcagggagtcctatagacccacatcccttaccaggtgctcaatccgatttccaggttagacctcacaccttcaagtgtcctcctctgtcagacatcctacccctgggaagctgttccacatgagcaaactgcatcctaacagagctcatgcccctgtgtactcagccagagctcatgagacttatttaccaccacgagaacagtatgggggaaaccaaccccatgatt

SEQ ID NO: 1183 - DNA, 200 bp, Homo sapiens
  misc_feature (1)..(200): DMR7:88302301
ctcaaggagctttggtcttgggaaagatgaagcatataatcaaattgttgcaatgcatagtgtaatggccagagcagacgaatgtgtagagaggatgggcgcctacaggctaggagggacttgaatctgccaggaagcggaacaagtaagttttccaaagtctgtgcaaaagttttgcagccacaatttaacttgagctc

SEQ ID NO: 1184 - DNA, 500 bp, Homo sapiens
  misc_feature (1)..(500): DMR7:88683701
gtagggaagagcctgcaagggtctttctcaggtcaggtgcctaggccagagacagtccagaagaggcctgagaagtgaagaggagggttcaaggggctgttaaaactcacaagggccatggaagagcaagccaacagaggactactgcccactcccgctgccgggcagctctgttctcataccttcttctggcattggcaatgggatgtccagaacctcccctcactcaatagatccctcacagtgaccacggtacactgtactgtgggactttgccttccaggagctcacaggttgttggaaaatcctatagccctcttcagtttagactgtcattttaggaaggtaagtggcaatgggtgtgcaggaactgcagttgtaggccccaaagaattctactgatgaacgctggaggcttttggcatcagagcctgaagcactgatgtagtctggtgttggacttcaggctgtgtggccagggcatgagaaccaggagccca

SEQ ID NO: 1185 - DNA, 2800 bp, Homo sapiens
  misc_feature (1)..(2800): DMR7:90642601
aactcctggcctcaagtgatctgcctgccttggcctcccaaagtgctgggattacaggcctgagccactgtgcctagcatgaattgggattgctgagatttcttgcataggtattgccatgttactttctgaagggttgaaccaatttttctcatttacattttttttttactgttaactatataatttgttccacagtaaacgtttaaaggtgtatttctttgagtatcaaagtaaattattgttaaacctccatttgtttcctattactgccttgagagtgatgaaagttatttattaaatgaactcatactgaatacccactctgtgtcaaaacttgtaccagatactggagactggagatgcaaagtgagaaaggcttagtttcgcactcagaaaagttccacatctcgtggggaaataattacagtaggtaacatgaaggcgtcaagtatgaaaaggtgtttgaggaggcacctggaggttgtggccagcataggaggggaggtgatatgtatgtacagctcaaaagatgagcagacctttgcctggaggcaagatgaggacaaagagagggcattcctggtgcaattacacacacagcctccaaacacagtgatctgggcaagcagttcccacaggttccctttgactgaagagttgtcggcttttttgtgtttctaatttattcattagtacatttggttgttttctttgtttttgataatatgctctgttctttgcattccatacacatattaatagtaatgttaaatgttacttttaagacaaatatttccttttagtctgtcctttgactttttatttttcatcatatttttacattctgggattgtgatgatttgttttgatatacaccatatggaaatttcttaatttataacattatggatttagctggtccagtagtagcaaagccttgtttcttaaggtggttttcccgctaagtatgagaagagttgtaaaatatatgtggggcccttatttctcatgcccaagctctttctgtgtcgaaccgctttataataatacagcgtgacgttaacttgatggctgagttaggaagccagatgacagcttctctttatttactgtcttctcagggtagaatggcttcattcacttgatctgaagagccaagccaacagccctactctgggcctccacaggtctgtggcagcagtaaattgaaaaacctgttcacatctcaacagcctcaaatttttatttttttagcaatatagtagatagtaaggagtgaaacgatataaatcagatggaaagggaattggtatggactgaattgtttctcccttcaaaattcgtatattgaagcgccagtctccaatgtgactgtatttatggataaggcctttatggaagtagttaaaattaaatgagatcataagagtagggccctgatctaattgggttaatgtccttatgttgaagagataacagagaactctctctccctctactccgtgtgagtatacagcaggaaggcagacatctgcaagctaggaaaagggtcctgaccaggaaccaaaccctgctggaccttgatcttggactttccagtccccaaaactaagaaaatcagtttcggttgtttaagtcaaccagtccatggtattttattattgcagcctgagcagacgaaaacagtcataatgataataaccaaaacaattatttattacctaacatatatccattttggattcccttaaagccaagtatgagttaagtcatatctttatctccgttttcctgatgggtaatctaatcattaagtaacttccttcaggtctcagtgccgggaaggtgaatctgtggatccttgttgagcttatgtctaatttaggtaacagctctatgtaattcatttatatatttgagaggaaaagagactcaacagcaaccacaagtagactacaaactcctgcacaaatatgtttgggaaactcacatcctcttcttagtggatatgcgtttaatattcaagactctgtgaaatcctacacggaagaaacctgtttaactttactttatcagaatacttctaggggcacctctggtgataccatgggtaacaatgtttcttggacatcagtttgggaagtgcagcccagagtggtcattagattcctgcactcgccaccataggcctattcaatttgaaacatacttaaatgttgatgagcatgcatgcttattacaatttattgaactaaaaaatgtaatgagaatatacatatatgttacttcaagaaattcagtcgaatttagcttttctttttgcataaagattagacaaaaccttaaggtagatggttatgaattttagacatcttaccgctaagaaaagaaagtagatggctctataaaagtaagcttttttattattattttagtgagcaccaaatgtggtagacatttctgtagggcagaaaggatgagagttccagtctcatggaatttacattgtatagagatgtggagattaagggttacatgtgttcttctcaacatgtttatatatgtatatatattttacacattattgtagttggaaggttttttgcacattgtggccttggccactcataaatacatcctcagtttttttcaggtattaatattttgattatggaaacggactttgggcctatgcttggcttacaatgtttcagtccacaaatgaatcttatttttaattattgaatgaatgatttctctttaaataaccttaaaatgatttaaaatctctaaagag

SEQ ID NO: 1186 - DNA, 600 bp, Homo sapiens
  misc_feature (1)..(600): DMR7:92794101
ataagataaagaagtgtgttctgctctttaaaatccttctattgtcttttatccactggacaaagtagcagaagaaatagctaacacttactgagtgcttactgtgtgtcagacacaatgctaataattttgttttatgtatttaaatctctttaccctataatacaggtaccatcatctctttcacagatgagaagaattaaggtatagaagtttagtaaattgcccagcatcctaaagactgtaaatgagagagccaggatttgtactcagaaaaccaagcaagagaaccctcactcttaaacactgcataccccatcccatggcttattaggtcactcgtgatcttgccccactcgccactccatcctcatcttttattggatcctaaaaatacttacagttgctagaatgtgcgtgatttttgtgctgtgcctcaacaccagctgttactgctgcctagaaagctctctttttctctgtccatctggtgacgtccctactgatcttcaaagattatgctcacacattctccatatccttactgtctccccttccaccctccctctcccacagccaggactcctctgtgctaccaca

SEQ ID NO: 1187 - DNA, 1200 bp, Homo sapiens
  misc_feature (1)..(1200): DMR7:93119301
aggaaagccaagagaattcacagaccctttgaaggaactgtatcgccactgcagtttctctgagatgccaaaaagaaaagtcatgagtctgcttgctttctcagcagggaggctgatagccaggggcaagttctcagccctggtcaccgactgcctggaaatagattcgatgttgttggcaggggcacagtgggagtgagactggcctttaggagtgtgggttgtgtggaaatggggtgaggcctgtgactgctggcttttccccacttccctggtgtcctatgtcactcagtggagacagccataatccccctgggaacataactccattggcctgggaaccacacccccgccccctacagcaagtgcagcagaccccacccaataagagtctgagctcagccacacctatgcctgccccaacctgttggtctttctttacctgccctggttgcaagacaaaggacatattctgcccactgcctcagaaacatgaatatataactagatgaccctaggtcaagtttgcttcctccctatagtaccacagctaatgcactcttgaaaatgccacctcctggctggaggccaaccaacacaaaaccagagcatttaacgaagatataaccaaggacccttacagagtccacttcactcccctgctacctccactggagcaggtgctggtatccacagctgaaagacctgaagatgtattacatcacaggactctttgccgacacttcccagtaccagtctggagtccagtagctctgctagatgactaggcccagaagagaaaaaacaatcactgcagtttggctcccaggaagccccatccctagaggaagtgggagaacactacatcaagggagcaccctgtgggacaaaagaatctgaatagtagcccttgagtcccagatcttccccctgacacagtcacccaaatgagaaggaaccagaaaaacaattctggtaatatgaaaaaacaaggttcttgaacacccccaaaataccacaccagctcaccaacaatatatccaaaccaagacaaaatctctgaattgccaggaaaataattcagaaggtttattattaagctaatcaaaaaggcactagagaaaggtgaattctaacttaaagaaataacaaacatgatacaggatatgaaaggaaaattcctcagtgaaatagatagca

SEQ ID NO: 1188 - DNA, 1300 bp, Homo sapiens
  misc_feature (1)..(1300): DMR7:95339701
taaatgagagagggaaatgggtcatggtaaccaggaagtaaagttggctttaacaccatgctctgaaatgaaatctgggtgacattgctggcacatggaaccaaacagacccagaagcctatcaagtttctaaggtattgatatttcaaaagcaaccagaagcatggcctgaaaatgtcctcagactctcagacctatacctgtaggaaatggatactaaaattacatggtcttttcaagacccacttcagaggtggccttaaagcataacagactaggaagaatttccaaagggcaaaatttgaaatcataaagaacatggggaagtacaccatggtcaggacaggggaccatctcacttcctctctggtggaataataatctcattgctatgcaatgtgaaaagaaaagaaacaacttttcagtgactattaagtgtattcccttcttcctttcttttcctaagactgcttattatagttactctgatcacactctagattgtaatctagatgtgttggtggataataattttgttttctagccttcctcatgcagccctagtggacctaacgtggaggtcagaacatcacctggagatactgtactttgaagtgggtgcagaaattggatgggggttggggttttatcccttggtgagggatgagggagtcaatgtgtgagagaagggtgcagatggctatttggtggccaaatggcaggcacagattgctaattgctcactaaaatttattttctttttccttgaacatgtctctccagtcatttgacattacccatttcttttttgcaattagttgggtatggccaggtggctagattttaccattagaagggaatttgaagtgctgagtaccattgctggtcctgggccttaagacattgggtacttctttacattccctctagtctttcttcttccactttgacagaacacagacacagtagtgacctagattcaaccatgcagataaccgcagtcacctaggaatggttagcaatatgaaagagccactcactgctcaagattcactctctatgcagccccctcaatgctccgtccctggaggcattatgaactccaccaatagctcccttgccttctggcttctagttcaaagggtggaataagttaagtcaggatatctattccctccatgccctctgtgctgagctgtcacaggttggcttcatccttctaccaatggccacagcatctactgggagagtctccactttgtctaccctcttcttgtgccagtatctgcttccactcctt

SEQ ID NO: 1189 - DNA, 1400 bp, Homo sapiens
  misc_feature (1)..(1400): DMR7:95616201
catcatcctgatatcaaaatctgagaaagatacaccaaaaaaagaaaacttcagaccaatatttttgatgaacatcaatgcaaaaattctcaacaaaataccggcaaaccaaatccagcaacatctgaaagcctatccaccacaatcaagtaggctttatccctgagatgcaacgttggttagacatacgcaaaacaataaatgtgattcatcacataagcagaatcaaagacaaaaaccacatggggccgggcatggaggctcacgcctgtaatctcagcactttgggagtcaaggcaaatggatcacctgaggtcaggagttcacgaccagcccggccaacatggtgaaaccccatctctactaaaaacacaaaaatgagctaggtgtgatggcttacacctgtagtcccagctattcaggaggctgaggcaggagaatcgcttgaacctgggaggcagaggttgtggtgagccgagattgtgccactgcactccagtctgggcaaccagagtgaaactccatctaaaacaaacaaacaaacaaacaaacaaacaccacacagttatctcaatagatgcagaaaagactttctatgaaattcaatatccatttaggttaaaagctctcaataaagtaggtattgaaggaacacagctcaaaataaaaagaactgtctatgacaaacccacagccaacatcatactgaatgggcaaaagctggaaacattccccttgaaaatgagcacaagacaaggataccctttctaaccactcatattcaatatagtattggaagtcctggcctgggcaatcaggcaagaaaaataaataaagggcatccaaacaggaagagaggaagtcaaactatccctgtttgcagatgacatgatcttatatttacaaaaccccatagtcttagcccaaaagcttcttaagctgataaacaactttagcaaagcctcaggatacaaaaatcaatgtgcaaaaatcactagcattcctatacaccaacagcagtcaagccaagagtcaaatcaggaacagaagcccattcacaactgccacaaaaagaataagcctaggaatacagctaactagggaggaaaaagatttctactgggagaactacaaaacacggctccagaaaatcagagatgacacaaacaaatgaaaaaacattccatgatcgtggataggaagaatcaatattgcaaaaatgaccatactgactagagtgatttatagattaaatactattccaactaaactacagttgagattctttgcagatccagaaaaactattttaaaattaatatggaaccaaaaagagcccaaatagccaaagcaatcctaagcaaaaagaacaaagctggaggcatcacactatacgacttc

SEQ ID NO: 1190 - DNA, 600 bp, Homo sapiens
  misc_feature (1)..(600): DMR7:96343901
gagccgagatggcgccattgcactccatcctgggcaacaacagtgaaactctgtttaaaaaaaaaaaaaaaaaaagagacagaaaagttgttattttcttgttgaatcgtatatctttattctgcatattaattttccctattatgtatactgcaaatgtaattttcctattccaattgttgaaaacctatatagcttaggaaccaaatctaacccactgtttttcatctttttaactttttattttgaaatggttatagactcacatgaagttgcaaagatagtacagaaaggtgccatgtgctcttcacccagttttccccagtggttacattttacataattatagtacagtgtcaaagccaggaaattcatatgggtacagtatatgtttgtgtctatgccattttatcacatgtgtagattcacacagcctccacctcaatcaagatgcagaaatattcccttatcacaacatctccccgaagctacctctatatagtcaccgccatgcactatatccagtcatgcctgactcctaaccactcatctgttctccatctctataatttcatcattttgagaatgttatgtaaatgg

SEQ ID NO: 1191 - DNA, 1800 bp, Homo sapiens
  misc_feature (1)..(1800): DMR7:96490501
cttaactgcctccctagagttttaagttttgtacagtgtaaatgattgttgtccaggaattaagaccacaggggtgtctctttaaaatgcctgcgatataaagcaggaggcaggatgcctgttgtctgaacttcagttgcagaggtgattattcatggggtcagggtgggggtggactaacatgcaagccacaagcccaagccaaacgtgatcacattggaaggtgtgctgtggattgtcagtcagttggaaatcagagcgagagaggcttattttggatgaggtggcatctcaggatcacaatcaaaattgtccagatggctttattttggatccgttatgccaatatcagatatgggggtggtttatggggggttctttgaagaccactctgtgaccccctgcagtggcagtggatacagtgggacataaaactgaattcaggattaggagccctggattctggtctcagctccagcacacaggatctctgagattacttgcagtttttaagaatactgatgtggggtatacaaatgtaatgaacgtctaaattcatgtatctcgctttgcattgctgcatctgctttacagaggtatctctttttttctttgaaagagagaggtttggttacttatttagattgttagaagtattttctcatcagtggattctggctttgacatcctttttgataaaaaaaattcttcttatattaaccaggaacatgataatgtttagaagttatgaaaatatctaagtgtttttataacatttatgatattttaaaaattctttctaaccacacgctaatagttatgataatttccagttttctttcttaaccagaggcagtggtaggcttttaacatgtcttacttctcccttgaacctccttctctatcaatgaactgagaggactgaaatcatccgggcatttctgagcaaacgtcagctttctgagaacttggaagttttctcacatcttactagtttatttagtcgtaaagattcgttaagataaaaaccaaacacagtcaagtgtatgtgacagatgtttctgggatttgggctagaggcacaggcaggaagggaagctgtcagtcaaaggcagcctcatatttactgctgcgttttcctgatttttagactttgcgtaaagaaaggggtgcccttcctgcatgagcgaggcatatctttgctctctgacagctgctgcacctcttctttgaagttattctctggcatgcaagatgcacagtaatatatctgaagtctaattctgtcagggaaaaagttcaaattgaagagtaattttttttaactgtaaagaaaactaatatttgtggagcacctaccaaatacaaaaagagtgctacatgttatttcttttagttctcatcattgcacccttttacagacaagaaaaagaggcatacagctagtaagtggcaggtcctatgtttgaattcaggtgtacagattccacttgtttcttggaagcacttccttggtttgccctcagtgtttacacagtctttctttatgacattcatttttctatttggaagtatacataatataaacttaaccattttagccattgttgagtatacatttcagtggcattaagtactttcacattgttctgcaactgtcaccaccatcgtctccagaatgttttcatctttccaaactgaattctgtacccattaaacaataactctccattcccctctcccttcaacccctgataaactccatctacttcctgtctctaggcatttgactattacagg

SEQ ID NO: 1192 - DNA, 3500 bp, Homo sapiens
  misc_feature (1)..(3500): DMR7:97176701
tcattcattgatcatttctcacacatgaaatgtatttctactttccataagaaacattattcccataattattataaattataccctaagtgaaatattctctgaaattatgcacaaagttatgaaaattttcaaaaatgggaaagttatgtattcaccactcagatttaacaaatattaatattttgaaatatttagttcacttttttaaagtaaataaatattaaaaggtacagctaaaattccattcccctttcttactcctcagaggtaatcaggatcctgatgttggttgtttccatgcttgtttttatgttttgtacatttgcatatatttgtaaatgatatatatatttttaaacttttaaaaaagatttttgctttatttttcaacaatttaactatcatatgcttaggtatagtattttgtattctgcttggaacttgctaagcttcttgaatttatttttccttaaaatattcattaaaattcataaaactttataaaaataagatatccggccaggcacagtagctcaggcctgtaatcccagcactttgggaggctgaggcgggtggatcatgaggtcaggagattgagaccatcctagctaacgcagtgaaacccatctctactaaaaatacaaaaaatttacctgggcgtgatggtgggcatctgtagtcccatctgctggggaggctgaggcaggagaattgtgtgaacccgggaggcacagcttgtagtgagccgagatcgcgccactgcactccagcttgggcaacagagcgagactccgtctcaaaaaaaaaataagatacccattaaaatttatttttctgctaaggcagtaacctcttttcttggattccacttaaacttacggtagatcttttggcattgtttcacagatcactgatcttttactcattttttaaatagttttgttctgtttaaaactggataatttctattgctgtattttcaagttcatgaatcttcatctccagtctactattaagtgacatttaaaaaattccagatagtgcatttttgagttctagaatttatttggttcttataattcctcattctctgctgagatttatctgccccatttatgatgaccgtattttcttttacatacttaacatttatagtacctgctttaaaatctatctctgcttattctaatgtctgaataatctcaggcactggtctccattgattgcctcttctcttaactgtgtttgtaataatttttaatttttttcctggacactgtaaatgatacattgtagagacattattctagatttttcctcacccaaacggaaactcggtggccattaaacagtaacaccctctcctacctcctcccagcccttagtattatctattctttctgtctatgaattttcctattctagatatttcatgtaagtggaatcatacaatatgtctttttatgtttggcttcttagcataatctttttaaggtttatccatgttgtagtatggatcagaacttcattcccttttaagggtgataaatattccattgtatgtgtataccacattttgtttatctgcttgctggtggacatctaggttattttccaaatgtcgtctattgtgtatacaagtatgtgtttgagttcctgttctcagttattttggtaatatacctatgagtgcatttgctggatcatatggtaattctgtgtttaactttctgaggaactgccagtcttttctgcagtggctataccattttatattctcattatcaatgtatgaggattctagtttattccaactgttatttttctggggtttaaaaaattattatagtagacatcttagggtgaagtggcatctcattgtggttttgatttacatttttctaatggcaaatgattttgaccatcttttcatgtacttggccatctgtatatctttggagaaatgtctattcatgtgctttacccatttttaaattgggctatttgtcttttagttgtggttctttatatattctggataataaacccttttcagatacgatttgcaaattttttctcattttgtagtttgtctttttactattaggtgtcctttgatgcacagaagtatttaattttgatactgtccagtttatttttgttgttgttgcttgggcttttggtgtcatatctaagaacctattgccaaatcaaaggtcataaagatttacctatatattttcttctaggattctcatgattttagctcttatatttaggtctttgattcactttgagttaatttttgtatatggtagaagatggggtgtctaacttcactcttttgcatgtggaaattcagttttcccagcaccagttgttgcctagattattctttcctccactgaatggatttgacatctttatcaaaaatcaattggctatatatgtaaggatttacttctggactcctcattctattggtgttatatatctattctaatgccagtgccacacttttgtttaatgtggctttctagttaagttttgaaattgggagttgtgagtcctctgtttttgctatttagagctccttagttgtccatttttgtaaatgaataatttcttaaagcctgctttttagattttattttttggagtttcatccgtgttgatacatagacttgtagcttatttgttgtgacatctttattatcatctgagtaaatttcagtgtatttgacttttctattgaagtacaattatttccatttttttttttttttttgctttaacaatcaacattcttctgcatgatacttgttcacatgttttaaagtttctttaggatggtagggtgatttttgccttgccaggaaacctttggcagtgtttcgagacattttagattatcaagacggggagaggggtgttactgccatctggtggtcagagacaagagatgctgctaaacatcctgcaatgcagactctcactgacccctccccacccctaccccccctacacacacaaaatagtgccaaggttgaaaaaccctgcctgccctgaagcatatagaagtggaattgataaaacttgaaatgttttcatcttaataagtggatttctgtaaatcatggaaaaaatattttctccataggtttggaatgtttggaattaaagttgctctggcaatgctgccattccagcaattacaagcaatttatatatctcaagccagatcaggtagcagcattatccagagttagccagttcattcactttaacttcatgaactaaaatactttggcactttgtctgcttaaaagattaattttagagtgagtctgtttcaaaacagtggcacttgtgcagatggggatagttggaatattaggctgaatgtacttaataagagcaaaattagaacatgaaaaagtttttcttgacacagatggttgttaaacattgaagacttaaaggtttaagaagttttt

SEQ ID NO: 1193 - DNA, 1800 bp, Homo sapiens
  misc_feature (1)..(1800): DMR7:99384901
acccagcctcctgagtagtggggattacaggcaggtgccaccacacctggctaatttttttttttttttttttttttttttttgagacggagtctcactctgtcgcccaggctggagtgcagtggtgcgatctcggcttactgcaagccccgcctcccaagttcacgccattctcctgcctcaggctgggactacaggtgcccgccaccacacccgactaattttttgtagttttagtaaagacggagtttcaccatgttggccaggctggtcttgaactcctggccgcaagtgatccgcctgcctcgatctcccaaagtgttgggattacaggcatgagccaccgggcctggcctggatgacttcatcttcatcccatccttaatggggcaggggaagttgggtgggggggggggggtcgtccatcctatgaggaaaccgaggcacagatgacaagtgaggggcctgtccagcttggagtcctagcaccccaccccgccccagggagcatctcccctgtagtaccgtctcctccaccctgtccctggagcctcagagacatcctgtgaaagctgcccttttataaggagggaaactgaggccccaggaggggaagcaacatgtcaggccagttgggagccagggctggcccctgctgctcctctctgcaaactgctgcccctctaaactgaggggcctccctggtgtgaggcctgtgaggatcatctggggcctggtatgggtgaagtcaggggcaaggttggggctgacgtggattctctcttcctctctcgggcacaggagccaagccgccatggcctaccacagcttcctggtggagcccatcagctgccacgcctggaacaaggaccgcacccgtgagtgcttgctgggggccggtgggtggctgcttccacctcctgggatggggaccagccagagcacacatggggactctggagcagccaggcccccggaccatgggctccatgtggctgtcccctggcctcacccctgggtcttccagctgaccaggggcctcctgggttaaagtttaaggagggaatgggccagttgcggtagctcatgcctgtaatcccggcactttgggaggctgaggtgggtggatcacttgaggtcaggagttccagaccagcttgggcaacatggtgaaaccctgtctctactaaaaatacaaaaattacctgggcgtggtggtgggtgtctgtaatcccagctactcggggggctgaggcacgagaattgcttgaacccaggaggcggaggttgcagtgagtcgagattgcaccactgcactccagcctgggcaacaaagcgagactctgtctcaaaaaaaaaaaaagagagaaagaaagaaagaaaaagtgaccaagaaaaagcctttcggaggagatgacattttgacatttacccagagacccagagggggagaggaagggaactgtgccccagctggggaggggctggcaggtgcaggggccctgaggtgtcagcaggagcagcgaagggttcctggttggccagagcaatagggtggggagaggtcccagggttcattgctgcgagtaaaggacagccagttccaggagaagacagggtggcctagcagggcctgaaggacttcagggggcccctgcaaggcagaagaggagagactgagtcatgaaaggtgaggtgttgttgcctaggtgcactgtgtagtgtgtcctggcagagggcagtcatggagagggcccctcaatctccctccatctccccttcagagattgccatctgccc

SEQ ID NO: 1194 - DNA, 300 bp, Homo sapiens
  misc_feature (1)..(300): DMR7:99635901
gccgggcgtggtggcgggcccctgtagtcccaactacttgggaggctgaggcaggagaatggcgtgaacccgggaggcagagcttgcagtgagtggagatcgcgccactgcactccagcctgggcaacagagcgagactccatctcaaaaaaaaaaaaaaaaaaaaaaaagatttaacatgagggtttcaagtttcctccggtttaggcatttatacctttgtgcttgttttgtttcaggatgttactatagcattgatgttggataacccatatttatataccttaaaatgcaatcatt

SEQ ID NO: 1195 - DNA, 1600 bp, Homo sapiens
  misc_feature (1)..(1600): DMR7:101239401
gaaaagccccatgtctccgagctgcccggcactctcaaggacatggcttcaggaaagggaggaaggaagggtgtgggctctgggctgcggggtggacaaagaaccccgtgccaacctggagggcaggggcaggagaggaccaggagtgacgtctccgccccctgtgcccagcgttcagaacccacccctcccctcaacgcagacacgggggttcccaagccacagccccgttttatttacactcatcccaaagcacatgatggggctgaaggacgaatctcaggggagcagaaattagctgaaggccacagaggatagagacggggggcagggggagaacagggaaaggacagcgaggatggacaggccctcctggagcgttctccgtgggctcccgcgtctccttcaggatttggacttggacacagcaagtccgatgagtccggccagtcccgccacacccagggccatgcctcccacgatggccatgcccacgagtccatctggggaaggaaagggacagtgtcaggagcccggcccctgcggaaaccctgaccgtccccttccgccagccctgcccctcaacagaggcacacccctacctggagtcgcagggcaaggggctctaagaactggaaggggtggggctgaggggctgcctggaggggttcatttacagagagaccaaagtgcccaggcgtggggaagagcggggctgaacaaaggggccgaggctgtcacctttcttcatggccttgtcaatgagccgctccagttccttggcctggttgttctggggctctgtctgcagcaacccgcggacgtactttaaggccttctcgtattcctgcgctcggggaaacgcgcacgcgtcatacacaccgcagtgtttttttgtttgtttgttttttaataagagacggggtcttgctctgttgcccacgctggacggcagcgtcgcaatcacagcccactgcaacctcaaactcccaggctcaagcagtcctcccgcctcagcctcctgagtagccgggattacaggcgtgagccactgggccggctacacctcagtatccaccactccccctgcccacgtgaagggccttcccttcttcagccctgggggctcctccctcgacctccacccactccctccctccagccccaccccacggagtagagtccacaaacaaccccaactctgcgggagataacagcgcaaggcttgggcctgcacccagtctcttgacgtcaccttcctccccaccccctcgccactctgatcttccctcggagtcctcatctgacaccgctctgcacctctgcaccccttcagccttcccgctgtccagggctccaccctggaggacacagtaagaaggtcctgcagccccagaggagggtgaagggaacggggtccccacctcaccttgagccggtagttccccacggccaggtagaagacgtaatcccgctgttcctccttgctccctttgggcagcagctctggggaggggcagagaagagggtgagaaatgcttctttcctaatactttcctaatactgtgtcccagaggccccttccactctctgaatgcct

SEQ ID NO: 1196 - DNA, 1000 bp, Homo sapiens
  misc_feature (1)..(1000): DMR7:101451901
ttcaccattttggccaggctggtctcgaactcccggcctcaggtgatctgcacccatcggcgtcccaaagtgctggaattgcaggcgtgagccaccgcgcacagccaaaatcatttgctttttaccagttttgtatgagttaacatccaacttggcagaatctgagctgcaatgcatagtgagcggtaactcaaagtgacattctcctggggtgtcatacggcacgtgggcaggctcatgagatagtgctgtagcctgactctagaaggttagtccctcagctttttgccctatttccacattttgcagagctcttcttgcagactgagtggatgaaacacagtagcccatggcagcaggtggcaggaccgtgggaggacagtccctgctgactgggaggtcctcaccaccaagtaggttcatgtggggctgtggacccacctttctcaatagaggaggcagaagtgaaggggggtgactgtgagctggtgaattgttccaaaggtgtccaccctcaagggcttggcacttcccttcaagaagaaatttcttatccgataaaccacattgatatgatcaatatacagtcatgcgtggcttaatgatgtggctatgttctgagaaatgcatcattggaagatttgtctttatgggaacaccaaaggatgtacttacagaaacctagatgatctagcctattacacacctaggctagatggtctagcctattgctctgggctacaaacctgtatagcatgtgactatgctgaattctggaggcattaggaatataatggtaagtatttgtgtatatcaacatatctacacatagaaaaggtacagtacaaatatattattattattatttattaatttttttttttgagatggagtctgtctgtcagccaggctgaagtgcagtggtgtgatctctgctcactgcaacctccgcctcctgggttcaacggattctcctgtcttagcctcccaagtacctggg

SEQ ID NO: 1197 - DNA, 1000 bp, Homo sapiens
  misc_feature (1)..(1000): DMR7:101831901
caggctaacttttttgtattttttgtagagatgggggggtctcactgtgttgcccaggctggtcttgaactcctggcctcaggcgatcctcctgccttagcctccgaaagtgctgggattccaggcctgagctgccatgcctagccccgatttttaaactgaagagggatggttcagttgttggggtgtgtcttagaggatccttctggaagccccacatggaaggcgggctagagtgaggagggaggggtgataatggaaccaggagggtgtggtggtcatggcccagtgagaggatgccaggctgtggccgtgccagactcagtgtgcctggccctggcatttcaggcagggaccactgaggggtgatgggagagatggggctgggtgagtggcatttccacaggcatccagaggggtgcgaaaaactgaggttggggaacagcaggggcagggaacagcctgtggagggtgtggtcatcagtgtcccccaccgacatggcacatccagcgagcccactgtgtccccagcacctgcggtgcagggggctggcaccttcaggggcgggcttcgtgcagacgtccacccagtcagtccccacaggtttatcaaacacaagtggggcgacaggacccacacttcggcgttggacgtgactcacgcggggagttggcttggagttcctttattcatccctatttgctttctgtctgtaatcctttgtaattccctggtttcatgatgtaattctaatggaaataaacccgaacctttcaaaattatgtaattaattgcattcagcttcaatgacaatgactaattatagtgatacctggtggcaaggcaggtacctactgctggggggctcctgtctgcttggtactaggactgccacttctgggcgcgtcggagcggctgcacagggggtcagctggctgtcctgtggcctgctccggtgcctctggtccccatcttaccaggagcagcgccatggccatg

SEQ ID NO: 1198 - DNA, 2300 bp, Homo sapiens
  misc_feature (1)..(2300): DMR7:101933301
cagggatttggaggagtttaaaaaaaatacagagcctttgttagtatttatactaagtggacattttccttttttaacaacaacaacaaaaaagaattagatttttaaaaaagaattcagagctagctatttacctttttcctagacaaacactattaagtccatattctcacattattcattgtcttaatggagattaagatttcttaatggactttattatagcttttctttctttttttcaaaattagaactggccgaagaaaatgcttctactattaagatcagatgaatttctacagaattttcagtaggtgtcatgttgtataggaaataaacatttctgttttagtaggttttcgatttcttacctcccgttgaccgttttgatcataaagtgaagatgaatacattcattcatttactgcagtctttggtacttgaacagaaatagcagtgttcttggtttgttcgcatacttgtggcttacctttgagactttctaatttttaaccagacatttaaaaatagccattctgtcttttagccctaatttagaaaaacttgtagcgctttcctttgaaatgatgaaaaaaaaagttctttctgttttctatcatcaaagtttaaaaagcgatgtttggatattttaaaagccggaaagaccatgtatggcgtgctgaggaagtttgctttgtttgatcattttctcttcccctcacccccatcagctggctaataatgttttccatgttaaatgtgtatcacagcctgttgaaatccctgtggttaatcagaagagaagttgtttctatcctatggaaccttaatacagttgtcaggaggtttgtgaacagaaattcagaattcatcacactgtaacgatgatctaaaggtcaagttgtacagtataaatttgaaaatctctctctgacttcctttctacctaaattagagcctaaaagtcatgagaattttgtcttctttttgtttattttagagatagcatagtcgatgttttaaaaagttgccaccttttcactataatgcgctcccattatcagagatgtttattctggttgtatctctctgacaaccttcaatacttaacagaataatttagtttggattcaaagaagtgcctcttctatttctgtgtttgtttctagaaactttgaggtggaggaattattgttccttcttcttggcaatgttcagggtttcacgaatctgacttttaaaagcccagctctcagccccgagcctctcatgagttaaagaaagggttttgcagcttttggtagacgagaaacacattttatggctcttcatgaagttgcccgctccgtccacgtcctgtcctcttcctccttcccagtttctgggctccctggctcttgtcatgaggctttcagttttgtgtcccagaaagcgcttcccccggggacagtgccatgccaaggctgggagaagggaaaaaggaggtgtttatcgccttgaagatgccttccagcctttattattaactcccttccaaagtaaactttcgggtttttttcaagtctgttctggccaaagtacagttgggtttgccgtgttctctaggagtagaggtgaaaacagcattgcccggggtgaggagcaggaggaggaagggtccacgtataggagtggatggaggggatctgtgagacagctgctgggacagatccgacttggagactgtcaggcctctgagcccaagctaagccatcatatcccctgtgacctgcacgtacacatccagatggccggttcctgcctttactgatgacattccaccacaaaagaagtgaaaatggcctgttcctgccttaactgatgacattatcttgtgaaattccttctcctggctcatcctggctcaaaagctcccctactgagcaccttgtgacccccactctgcccgccagagaacaaaccccttttgactgtaattttcctttacctacccaaatcctataaaacggccccacccctttctcccttcgctgactctcttttcagactcagcccacctgcacccaggtgaaataaacagctttattgctcacacaaagcctgtttggtggtcttttcacacggacgtgagtgaaagagactgccattcatgaatggacaaggcctggctccgtccacgctttcccagctctgtgtcctgccatcggacatgctggcacatctgctgtgggtgccctgcacttctccgggcactcctggcccagctggggaggttggcatggtatccaccattttgttct

SEQ ID NO: 1199 - DNA, 1500 bp, Homo sapiens
  misc_feature (1)..(1500): DMR7:103662301
acgaaatcacatgactataggctaagaaatgggaatgaccagcaggcatggtggctcacacatgtaatcctagtactttgggaagccggggtgggcggatcacgaggtcaggagattgagaccatcctggctaacagggtgaaaccccatctctactaaaaatacaaaaaaattagcttggtgtggtggtgcatggctgtagtcccagctactcgggaggctgaggctggagaatggtgtgaacccaggaggcaaaggttgcagtgagccagctgagattgcaccactgcactccagcctgggtgacacagcgagactccgtcacaaaaaaaaaaaaaaaaaaaagaaacgggtgacactattaacagtgcagaaatcaatagaccttggtggaggatgtgtgttaggggagagtaaaaaatacatttgaatagtacagtggaacaaatccatggagagtttggaaagaggggagttcagactctatttagtagacactcagtgatatttctaaactgcatacatgattacatctctcctttgtttaaagtctttcaggggctcccccattgctatctggacaaattccaagttccttaatgcagaacatgcagtccttcttggcctggcccaagaacatttctagcacaatctctcgccttgtaccatgtctcttctgccttgtacccaaactcttttgccatacaatgtgaattcaaagtcactaaaacattctgtcagccctctgaatcttaactttttgtctatcaaacaaactcagggtcattctttaagatgtccttgaaatatcaaacacctttctgtacagtctttcccaaacttcctggctcctcctacccagccccaccactccatctcagactgttagattcttcctttgtgatctaatttctcccagtacactgccattgtttctttacatgcctttctttattcctgatatgtcagctcctaagacaggatctgcgtcttatttttgtgtcctgagaccctagcacagtgttcaatgcccagcagatcctcaataattcttgttgagcgatggcgggattaagggattccatcttcagaaaataaatgaaacctgtagagtttcctgactgtatcctgtcctcactttcctctgctttctctagtcacatccttgccctgtcctctgagacaattcatgccattagcacaaattggcacaaactggaaagcagccttttcaattggcacattgggaaacaccctcttcttctcccgaccacacgtcaggcaggtctgaccaccacttccactcaaagtccccttgtacttgtacttaatgcctactgctactattgctgccaggcttaggctttggtactgaatcaacttacagtcatagctctgatggttcagcctcctcttccccttagatatttgctacaccatctgcctgtctagatccaagccctgcaatgaccacctggtctttagcttctctgttggcct

SEQ ID NO: 1200 - DNA, 300 bp, Homo sapiens
  misc_feature (1)..(300): DMR7:104257001
ctctcccaaaattgtttatgttttcaaaaaggactactagatctcccacatgtgtttctagcagtcaaattaaagtgtaggcaaagcaaaagaagtgccattccgtttctcctcctgaagtggcctccccacttttctccctgtaggtgtgctggtcctctttgggaggctgctgctgcggtcagtttttctaagcctgggtttcggtggataaaggactctagaaacaccctgaaattctgcgtgagtaagcagatgtgcattttttgtgggcagaggggcttcagctttcattagatc

SEQ ID NO: 1201 - DNA, 1700 bp, Homo sapiens
  misc_feature (1)..(1700): DMR7:104594401
gatccgctgttagtctgatgggcttccctctgtgggtaactcaacctttctctctggctgcccttaacactttttccttcatttcaaccttggtgaatctgacaatgatgtgtcttgaggttgctcttctggaggagtatctttgtggcgttctctgtatttcctgaatttgattgttggcctgccttgctgtattggggaagttctcctagataatatcctgaatagtgttttccaccttggttccattctccccatcactttcaggtacaccaatcgaacgtagatttggtcttttcacatagtccaatattccttggaggctttgttcattcctttttcctgttttttctctaaccttgtttacttgttttatttcattaatttgatcttcagtcactgataccctttcttccacttgatcaaatcagctattgaagcttgtgcatgcatcacgaagttctcatgccatggttttcagctccatcaggtcatttaaggtcttccctacactgtttattctagttagccattcgtctaatctcttttcaacgttttcagcttccttacgatgggttcaaacgtcctcttttagctcggagaagtttgttattaccgaccttctgaagcctacttctgtcaacttctcaaagtcattctccgtctagctttgttccgttgctggcaaggagctgtgaacctttcgaggagaagaggcactctgattttgagaattttcagcttttctgctctggtttctccccatctttgtggttatatctacctttggtctttgatgttggtgacgtacagatggggttttggtgtagatgacctttttgttgatgttgatgctatttctttctgtttgttagttttccttgtaacaatcaggtctctcagctataggtctgttggagtttgctggagttccactccagaccctgtttgcctgggtattactagcggaagctgaagaacagcaaatattacagaacagcaaatattgctgcctgatccttcctctggaagctttgtcccagagaggcagctgcctatatgagatgtctgtcggcccctactttgacatgtctcccaattaggctatacaggggtcagggacccacttgaggaagcagtctttccgttctcagagctcaaacacagtgctgggagaaccactgctctcttcagagctgtcagacagggatgtttaagtctgcagaagttgtctgctgccttttgttccgctatgccctacccacagaggtggagtctagaggcagtaggccttgttgagctgtggtgggctccgcccagttcgagcttcttggccgctttgtttacctactcaagcctcagcaatggcagacgcccctcccccagccaggctgccatctcgcagatggatctcagactgctgcattagcagtgagcaaggctccatgggcatgggcactgctgagccaggcatgggagagaatcaccttgtctgccggttgctaagaccttgggaacaacagaatattggggcaggagtgtcctgcttttccaagtagtctgtcatggcttcccttggctaggaaagggaaaccccccaaccccttgtgcttcccgggtgagacaataccccaccctgctttggctcaccctccgtgggctgcacccactgtccaatcagtcccagtgagatgaaccag

SEQ ID NO: 1202 - DNA, 1000 bp, Homo sapiens
  misc_feature (1)..(1000): DMR7:107283801
taaatacctttttaaaaaatgcacctcccataaaaatgtaactctatattaagaaaaagaaaataatttgtttcacaacgtacatatttaccaatatatttcataattaaacattcaggaccatagtaacctttttttttttgagacgtagtctcactctgttgtcctggctggagtgcaacggcgcaatcttggctcactgcaacctctacctcctgggttcaagcgattctcctgcctcagcctcccaagtagctgggattacagctgcccgccaccatgcccagctaattgttgtatttttagtagagacagggttttgccatgttggccaggatggtctcaaactcctgactccagtgatccacccgcttcggcctcacaaagtgctgggattacacgtgtgagcaaccgtgcccggcctatattaacattttaatctctacgtaagtccccactataaatgcacaataatatgcaccaatacctactgtattatctgtttccttaaactaaaagaataacagtaaaatcctattaatgctaatgggggctatgcctttacttgtaaatcatacctatagagttatcgaagcatatggaagaaagaccagcctgcagagacctgctccattagcttggccctttccatccatagctgcctccccagtaaagctcactgactgagagggaagtgtacagacttaggtttttacattttccatttttgtgttactaacaagagtgagacaaaataaaaagtatttatggaagtcctaaaatcacgtaaatactcccaagtggagttctatgctactttgttttataatattcttcacaacatcaaatgtaacctgagaaacatttctttcctgcttgcacttcccatatctttaataattcatgctgattttcatttagcagtcaaactatttgatcttacatttttctttcgacaattactatcaaatgtctataaccattattttcatgtttcctt

SEQ ID NO: 1203 - DNA, 1300 bp, Homo sapiens
  misc_feature (1)..(1300): DMR7:107446201
atattcaaaaatagtaagtcctgagacctttaagaaacaccttatttgcttaagctagctaagttgacacataaaactaatttcaactatttcaattttgaatgaataactggagttttagagaggctaaataacttgcttaaaattacactgcagacctgggattatatatggctaattaggtaatacggaactgacagtttgtcatcttaggcacacatacttacggtaaccagccttcaacatgatcccccaatgatccctgcgtcctggtaatcacattcctctgtaatgtaattcattattatcccagggttggtccatgtgaacaacagaatacagcaaacataacgatacatcatattagagatttgactttaaaaaacattatggcttctatactgtgtacccacatgctctcactgtctctctctctctccccactcacactgggaagtcagctgccacatcatgcacagccctggaaagaggccctcatggtgaggaatggaggcctaccaacaaccatgtgagtcagcttgaaagtacatccttccaccacagtcacaccctggctgacaacttcactacaacctcatgagaggtcctaagccagaatcacccagctaagccacttctggattcccacccctttgcattagttaactattgctgccatgacaaattacaacaaaattagtggctctacacaatacaatttactatctcagttctgtaggttagaagtccagtgggctcaattggctttttctgctctgggtgttgcaaacctgaaatcaaggtattggctgtctgtgttacttaatggaggctctgggaaagaactgcttccagattcagccaggtttttgacaaggttcagttccttgtagttgcagcactgactttctggtttccttgctgcctgtcagctgggggatattctcagcttctagaggccacccacattccttggctcatagctccctacttccatctcacgctttgaatctctctgaacacccttctgcctcacctctctgactcatctcttccaacatcagctgggaaaagttctccacttttaaggtctcatgtattacttagcccatatctaggtccataattgtaaccatattttcaaagtctctttcaccacataatgtaacatatttgggggttttaggaaataggacatggacatctttagggggctattattcttcagaaatgatgtaatttcataaatgtttgttgttttaaactttcactttgtcacacgataatatacatacgaaga

SEQ ID NO: 1204 - DNA, 1500 bp, Homo sapiens
  misc_feature (1)..(1500): DMR7:108102001
tggcgtgagtggccattggcacactcacttaggggaccatgcagtgttatttaatcaatttgaagtccatactccatggcccagaaattccacagctaggtatatctcctagggacaatgtttgcatagatgcacaaggtcacatacacaagaatgtttactgtagcatccaaagaaaaatgaacaaataagttttgtcatacctaaaggaaaaacttctataagaaattaaaatggaagaactaagactacctgatatagaaaagtctcaaaaatataatgtcgaatgaaatacccaagttgctgaaagacacatacaaaatgacataatctatctaaactttgaaaacatgtcaacatatattgttcatagataaaaacacatgtgaaagagtgaaaaaaatcatgataatgcaaaatatatgagtttaccactagcaaggagggtagacaaatgggacagttgtgtacctgagacatcaatatagtgcctgtcatgttttattaaagaaagtcccaagagtgacaggctaagactgttctagagaaagctgatggtggggtataagggtgtatattatattattccctattattttgtacatgcttgaaatatttcatttaagaagttgagattcaagataaaagatttttaaaggtttttaaaaagcgcaaggtaagtaacatgttagcttatgcatcttaacagcaaaattgaattgtctacagccagtcgaatgttttagccaattttaccactttggttcctcccccagcaggcttccatgatactcaaggcgtctgcctctcctggtggaatcctgcataatttcccaactaccaggacagacacagattatttggatcaacttgtttgcagaaggatgagctcttaaagctgaggtatttttgcaatcctccactctccaaaatagggtagtttggagatgccgttaagcagataaggtgcgggcagccccagtaagatcaaactgaactttgctcagacagtgggtaggatccaggcagacccggggactcacgaatgcacgcgtagggatctgagatggtcttgagcgggtccctgtagaagaggggtctgcagcggtcgcagtgctgcccctcagtgttgtgctggcagtcttcacacacgcccccgctgaggccaccgcttgccaggtacgtagtcatgtcaaagtgacagcggctggagtggctattacagctgcacgctgaaaggagaagacagtgactgagaggtagactaaggcctcgggtggcacagccagtgcccccgcactggtcagggcacccgctagtcctccttgtcctcctgccatttcgtgttctttgtatagatgcaccaagcaaacacagggccaaaatgtgtgccctcaggggatcgttctaacactctgattctgctcctacgctttctataaaatgtgctccccatatgttaaatatgtagtttttaaaaatcaagtgaacaaaagtaaa

SEQ ID NO: 1205 - DNA, 400 bp, Homo sapiens
  misc_feature (1)..(400): DMR7:109351301
gaggggctgtttcagcccataccttctgaaattgccacgttccaggcaaagaaacaacattcagaaatgaatgcataaataagtttaaaatcctgaacaaaaagtcactactataattttaatttttatgccaatgaaagcgtattcatgtaggataaaaataaaaagtttaggccaggtgcggtggctcatgcctgtattctcagcactttgggaggccgaggagggctgaacacctgaggtcagaaattcgagaccatcctgaccaacatggtgaaacccgtctttactaaaaatacaaaattagccgggtatagcggtgtgtgcctgtaatcccagctacttgggaagctgaggcaggagaatcccttgaaccccggaggcagagggtgcagtgagc

SEQ ID NO: 1206 - DNA, 200 bp, Homo sapiens
  misc_feature (1)..(200): DMR7:109377201
cccaacgcacacaccccacacacaccatacctgactgctgcttaccatagtacttaaatttctgcatttttctggtttgccgaaccagttactgctttttctgtttcagtttccaaaaatgtgttgacatctcctatccagaaagagttactgatacacatgtgtgttcaatctgctgagtttaactgaaatctctagtt

SEQ ID NO: 1207 - DNA, 800 bp, Homo sapiens
  misc_feature (1)..(800): DMR7:109772501
tgaagcctttggctgccaactttctcccacttccctggtgacctgtgtgacacagcagatgcagccataatccccatgggaacataattccattggcctgggaaccacactccccacccccacagcagccacagcaagcactgcccaaggagagtctaagcgcagacacccttaaccctgccccaacctgatggtctttctctacctgccctggtagctgaagacaaagaacataaattttgggagctctatggccccacccactgcctgaccctagggcaagattgtatcctcttactgcagctgatgcactcttgaaagcaccaccttctggatggaggccaaccaacacaaaaaccagtgaacgtaacaaaaatatgaccaaggaccctcacagagtctgcttcactgcccttctacctccatcggagcaggtgctggtatccatggctgagagacctgaaaatggatatcacaggactctttgcagacactcctcagtaccggcctggagcccagtagctctgctgggtggctagatccagaagagaaataacaatcactgcagtttggctctagggaagtccaaccctaggggaaggggaagagcaccaaatcaagggcacaccctgtgtgacaaaagaatatgaacagcagcccttgagtcccagatcttccctctgacatagtctacccaaatgagaaggaaccaggaaaacagttctggtaataagacaaaacaaggttctttaacattgacaaaagatcacactagctcaccagcaatggatccaaaccaa

SEQ ID NO: 1208 - DNA, 200 bp, Homo sapiens
  misc_feature (1)..(200): DMR7:109855801
ttgcagtgagccaagatcgcaccactgcactccagcctgggtgacagtgtgaaactccatctcaaaaaaaaaaaaaaaaaaaaaaaaaaaaaaaaaaaaaaacaagaagaggaagaaggaagaaggaggaaagaaagccatatatgaatttattgactcagaagtttttgacctcactcaatatttggagccagttgttt

SEQ ID NO: 1209 - DNA, 2100 bp, Homo sapiens
  misc_feature (1)..(2100): DMR7:112502401
tggcactcccttactgataatttgctaggtaactattatttattgcctattttgtgccaggccctgtgcagagtgctggggatatataggtacataaggtaaatgtggtctctgcctttacaggcttcatatctagtgtgaggtagagatgagcaaggcggcaatgataattcagtgtggaaatttaggatgggaaaagtacaggatgctctgggaatccagagaaagggagtctaatccaggcctgggtggtaagagaaagcatatcagttactagtgctaggcaacaaatttccccagagcttagtggcataaaaccaccaatttattacacttacagtatttgtgggtcaggaatttgggatggggatagtggggcagttcttctgttctatgccacctgggacctcatccaggaagactggaatggccgggggctggcatcatgggaggtgtcttccttcacatatttggcccctgggcaggacccacacatgagatctggatttcctcacaacctgacaggcttggaatggttggattccttacatgggaggctcacagctccaaagagcatgtggaatgagagatattgttatggccatcttttgaaagcccaatatgtacagaatatttcccagaagaattgaacattcagcagacctaacgaatgtgtagatattagctgggcaaagaggagggaatagtgtttcaggtagaaagaatagaatgaataagaacctggagttaagaaataaagtgtagtgaatttgaggaactggatgaagttcggaataactggggcatcatcaagtaggaggaggaagtggtgcctgatcaggctggacaggcaggtgttgatggtgtgcgggaggccggtcccacgggacagtgggaaattattaaaagtctttaagggagaataacaaagtagtatttgtgctttaaaaaaattactctggttacactgtggagaattagaagggctaagaggtgaggcagtaagaccagcaggcaggaagttgaaagccagaagatcagctagcagaaagttataagccagtggtcagatggtgatgacctcttggagcaggaggactgggaacagagaagatatttagaggctcaactgggcttggtgataattagaaatgcgggtgagggagagggaagagtcacacatggttctcagttttctggcttgggccgctgggtagataagagtgctgttcactgagatgggggaatactgaaaagaagcaggctttgtgggtgaggaagttgataaattccaatttgaggttgagcaaattctgacacagacagcaaatgtccagtgggcagttgaatatatgggtctaaagtttccaatctgtgttttgaatccatgcttgacctgataactcatatgtgaaactggtattatgaggaagtataaactcgaccagccagcacggacccagccaagttctgtcttggttaaatttcactgtggtaaattttcttttcctgattttctaatatcacagaaataatacatacttctattaagttttaggatcaaatagcaaatttgaattacatgtttcacttgccaagtggtcttggctggacacataactaattgattaacttaaaagaaattagccaggcatcgtggctcacgcttgcaatcccagcacttgggaggccgaggcgggaggattgctttaggccaggagtttgagagcagcctgggcaacatgaggggatgtcagtggggctgcagggatgtggagatgcagggactattaggcagtattcagtctgatggggcctgggctctcaaaatggtgccatgctgcagctgtttagcactaaggtatgtgggattcagtgtgagctccctttctggagcactgctaccgtgtggcctctagagagcttcctatgctagtctcagggacccaagaattgaggggctctcctgtagttaagattgctggagttcgtggtgggaatttggactgttggggatgtctcacttactctttccctgcactggggagcgtttctgggatcccagctggccacctcacttccctctccttttatgcctct

SEQ ID NO: 1210 - DNA, 4000 bp, Homo sapiens
  misc_feature (1)..(4000): DMR7:112585401
ttctattcattgtttgttctgatactctgttccaatctttctactgtgtttttttcttagtgatgcagtcatctttataccttaggagcactgatgttcatctgctctgtatattgcaaacattttcctccaagatattgcttgtttattgttattgttttggtttattttacttttttatcacttattttactatatcaaagtttaaattttatgtagttcattcatcaatcttcccttttatagcttctgagttttctttcttattgtacaaggaattgcaaactgactcccttggtaaatttccaacccgcttgtagtatgctttacttcatactagaggctagaaagtagaaagactacaatgtgtaaaaactaaatttcagaaaatccatcaaaacttgaatttttcatgtaaactaatatctagcagacagtttcctgcctgccaacatttagaaggtggaagtgaagagtacatctatgcctttgctattctagctatttccacaggcaagcagagtgggaggtgcattggattttcagagacagcagtagtagaagtcccagttcctatctttactttcatggctatcaagaaatccggtagataggaattcatttggctgatatggaagggctaaggtagagtggtcttagtgttagtggattccccagcttcctgatgttggagttttctgatcacagaagagttattgtttattttggtggccagatctgcagcgatgtttggaaatcttttctgaaagtactacttaaatcatgctccttcaatcccttctgttaagtttctcagtattaggctctttgtgttaaattgttttctgcttaagccaggtagaataatttctgttatcttcaagtgaactctgactaatatactttgcaatgcctacctcttaaagttatatacttatttccctatattttcttctaatacttttatagttgtggtttttcatttaagtagagactacatctggaatttatctttgtatttggtgctggataaagatgtaatggatagttattagttccaacaaaattctttaaatagtcaattctttttccatggattagaaatgttacatttatcttacaccaagtcccatatatacagataaaggaatctgcttagactttttattttattgtattctttattcattaatgatgtttattgttttaataaatactacactatttgagttaccaaagtttttcacagtatgctttcaaatagatgcagggcaagttccctgtcatactcatacattttcataggtaatattttttttttttgagacggagtctcgctctttcgcccaggctggagtgcagtgacgctatctcagctcactgcaagctctgcctccccgggtcacgccattctcctgcctcagcatcccaagtagctgggactacaggcgcccgccaccacgcctggctaattttttgtatttttagtagagatggggtttcaccgtgttagccaggatgatctcgatctcctgacctcgtgatcccctcgccttagcctcccaaagtgctgggattacaggcgtgagccactgtgcctggcctttcataggtaatttttaacattcatatttgcagatgaactaaagagttaatttttcatgatccattaaaatatttttggcattttatttaaaactgcattgaaattataaattgagaagacttgtttttattactaataacagcaaacaatgacattatactttacataagttaactatttttatttttgacatatttttattagtgataatagcagaaaatgacattatactttatataagttaattcatttaatccatataacaacctaatgaaatatatactgttttccttttcatttcacagacaagggaaagaagacataggttaaataatttgccctacttatacaactggaaaaatagtatatccagaaacatactgtgcataatgtgatgttccacttaattaagtctttaaacattttttaataaagttttgattttttttctgataatttcttatgatgtttattccaaggcttgggaaaccccacttctctcatggatatttgcacccctaggatcaggagagatccccttgtgagcccacatcaccagggcctcaggtccgacatacagagctgtgtggagtcttggcaagcagctgctcaggcatgcacagagacccaggagctttacatactccagccccaggagccccaacaaatgcgtctgcaatgaagtcaaggtgggaggtccacacatagccccaggaagagggcggaatccagggaactgagtggcatcatcctataggccccactttcacaacacctcacaagataagacccactggtttggaatttcagccagccaccagcaacaggatggagcctgcttgaaaaaggacagagtccccaggcagagaggtgggcaccatctcgactgtttagtcagctcagccattctggcctgctggctttggagagtccggatggtctggacaaggaagggtcccccaagcagtgcagcacagcacagcagctttgttagattgtggccagactgcttctttaagcgggacccctatccattcctcctcactgggcaggacctcccagctgggccctccagccacacacacccacatgtattatagacagagctctgatctctccctgggatggagtgcctaggtgaggggagggccgccaactgggttggttgtatgattcagccattccagcctgcgggctttggagagtccaagccaagggggcagaagtggtaccccaccatgacacagttattttgttgaggcatggccagactacgtcttttaagcaggacgctgatccactcctccttgcagggtaggtcctcccagccatggcctctggccacccccacctgtgttctatgggactgacagagctctaagttctccctaggatggagtgcctgagggatggggcaggccaccaccttggctttttgggcttctcaactggttcagcctatgggcctcggaaagcccaaactgattgggggctgaagggatccccagcatagcatagttgctctaacaaaaatcagccagactgcttctttaagcaggtccctgagcctgttcctcctcactgggtgaaacctttcaactgcggtctccagctgcctcctatagacacgtttgggccagcaataggtcagaaccacccgggacaaagcttctagaagaaggggcaggctgccatctttgctgtttcactgtcttccctgctgatacctccaggtatgggaaaaacctaggcaactagggtctggagcggaccccagaaatccacagcagtcctatgaaagagtggccagactattaaaagaaaaacaaacaaacagaaaacagcatcataaactatataaaacccacaaaaaaaccaatctgaaggtcagcaacatcaaagatcaaagatagataagcccacaaagatgagaaagaatcaatacaaaaatgctgaaaactcaaaaagccagagtgcccttttacctccaaatgaccacaacacctctccagcaagggctcagaactgtgccaaggctgagatggctgaaatgacagaagtaagcttcagaatgtggataataacaaacatcactgagttaacgaagcatgttgtaacccaacacaaagaagctaagaattgcaataatacaggagctgacaggcaaaatagccagcttagaaaggaatgtaactgacccattggagctgagaaacacacaagaacatcacagtgcaatcacaagtattcacagcagaatagaccaagcagaggaaaacctctcagagcttgaagactgattttcagaattaagacaggcagacaaaaatagagaaaagagaatgaaaaggaatgaataaaacctccgagaaataggggattatgtaaagagac

SEQ ID NO: 1211 - DNA, 1100 bp, Homo sapiens
  misc_feature (1)..(1100): DMR7:114054301
gatcatatagttatcagtcaacgtggaggctgagatcaatcatgtgggaaatcaattaatcaatcctgcctacctagtgaagttgcagtgaatgccaaaccttgagtgagcttctttggttggcaatactccatgcatattatcacacatcaaggctgggatagtaacacatcctgatttcacagagaaaaggcaatggaagcttcatgtttgcagctccactggatgctgccctttgcacctcttcttttggttaattttaatctgttttcctttcgtgtaataaactctgtgagtataacagttttcattggttgggcatggtggctcacacctctaatcccaatgctttggaaggctgaagattgcttgagcccaggagcttaatgctgcagtgaactatgatgacaccactgaaccccagcctgggtgaaagaataataccccatcattataaaaaaataattttcagtcagttctgtgaatccttctagtggaatatcaaacctgagggtggttttgggaataccctcagcttgcaattgctgtcagaaatgaaggtaatcttggggactgtgccttctaagtatatagttggccttaactctttagaatctttataggtttttcttggagggggtggttccaatatggccgaataggaacagctccagtctacacctcccagcgtgagcaacgcagaagacagatgatttctgcatttccaactgaggtaccgggttcatctcactggggagtgtcagacagtgggtgcaggacagtgatgcagtgcaccaagcttgagccaaagcagggtgaggcatcgcctcacccgggaagcacaaggggtcagggaattcccttttctagccaaggaaaggggtgacagatggcacctggaaaatcgggtcattcccaccctaatactgcgcttttccgacggtcttagcaaatggcacatcaggagattatgtcccgcacctgtcggagggtcctatgcccacggagcctagctcattgctagcacagcagtctgagatcaaactgcaaggaggcagtgaggctgggggaggggtatccgccattgctgaggcttgagt

SEQ ID NO: 1212 - DNA, 500 bp, Homo sapiens
  misc_feature (1)..(500): DMR7:115605501
aaactataccattttgtagggagcaaaatagctggatcttgctttttagttcaatattgcaatttctgacatttgattctttatttagcttttgttttgaagttttcactaagtatatcattccagattgaccttttttattctttcagtactttcaaaaatgtcacttcattgttctttcagttagcaatttctgacgtgaagtctgatgtaattctgttctctttctctgtgttgtgtcacttttactttggcaggctttataattttctgtactttgctttgacagtttgaatattatgtgcctaaacaggtgtctttactgtatggtgtgtgtgtgtgatcacatttatcctgctatacatgctcaagtttttgcaagcaatttgatgtctttcattatttcggggagattcttagtcactgtcatttcaaggaattgttcttctctgacattctctttccctcttctctctccccacccacctctctggcttaaa

SEQ ID NO: 1213 - DNA, 300 bp, Homo sapiens
  misc_feature (1)..(300): DMR7:118922901
aaatctggagacatgttcttagtgcctagaccagcagttataagccagaatcgagccaaatttagccctttctttctctgcttttctgatttcacctcctagctattttgagaggggttgtatcctccagatatagtcttcacagcttctgttcttatagtcctgactttcatagtcctcctgggtgccacgtggttacttgaaacgtacaatgactggagaaagacattagggaggctacccgtgtcatagtatcaacattcttttcagtaatttaaaatcttagaattatgttatgtt

SEQ ID NO: 1214 - DNA, 200 bp, Homo sapiens
  misc_feature (1)..(200): DMR7:119141201
tctgtctaatcccttgagaccaacagaagttctgcttgttttttctgtattcttcaactgcatctctgtgaactagcaaattctgaattcaaacctacttaccctgtgcccagaatgttggttgttgactgacagctaacatctctgtattttcccctctctcaaatgttgtaactcctagtacagtttctttagcatct

SEQ ID NO: 1215 - DNA, 200 bp, Homo sapiens
  misc_feature (1)..(200): DMR7:119407701
tggcattgtaaactgatttaggcacacacaaaataataattaactttgactagataccaatcctagcaagttttattctccacattaattctgctattagagataccaccattatagggaagaagggtcatgctagaagcagagaaataataataataatagtaataatagagatgagataagctatattgattcatttt

SEQ ID NO: 1216 - DNA, 300 bp, Homo sapiens
  misc_feature (1)..(300): DMR7:120516201
aataagagcattagaaaattagttttattcttttattcggcactgcaaataattttcctgggattttattatgtttattacaatacacgtatccaaacaaatacacgccaagagagtgtcctttttaaaatgtatcttttattatctgtccatataattacatgtatccgtccatataattatacagatattgcttcaatttcttgaaagattgttgtttcttagtccagtcttacttttttctcccttttccaataaaagaaagtgacagcagaatcagaaagacaccctgatggcttt

SEQ ID NO: 1217 - DNA, 800 bp, Homo sapiens
  misc_feature (1)..(800): DMR7:121068901
atttggctctctgtttgtctgttgttagtggtttgcatttcaaaagaggaacccagagcttaggaagtttgaatctttaataatgtgcagtgagtatgcctaccatttgccccagagggagacattaaatttattatactggacaaaaatataaactttcctttgctctggagtgaggcactatctctttttcaaggctttccactatataaatatctttgaaaagctagttcagaacaaatgtggtcagtgcctctgtttgcaaaatgtgcagaaatattaaagatagatagagcagtgtctccaacaatttcagagaggaatacctaacaagtcctaactctgaggcttagttatcgtataattctgagcaagacttaaaacttacttgtacttcagttttcttctctctaaaaatacaaagtttggcaatgatcaataatgctgaaatcccataattctgctgtgccttttccccatatagacttgtcacagactttatcttcagtagtaggtagagacaggaatgctaagaaaggagagatgatcatgctggtaaatgtggctggaacccatgcaagtgaggcaggacagagtgttggctagatgcagtggagtgattggagatcgcacgtaaggctaacacagtctgttccattccatagccagagtgtacctgacattagacttgtgactcacattgaagggcacacatccacggaatttttactggctagcacaaagatttatttttatcttgccatttaatgctttgccttttgaaaaaaaagtgtcatact

SEQ ID NO: 1218 - DNA, 100 bp, Homo sapiens
  misc_feature (1)..(100): DMR7:121817201
actagatggaataaatgacaaaaggaaaattagtgtacttgaagacatggcaacagaaactctcaacaaaagctcttttctctttttacaaaggaaagag

SEQ ID NO: 1219 - DNA, 2200 bp, Homo sapiens
  misc_feature (1)..(2200): DMR7:125009401
gtacatgtgatattttgttacatgcatagaatatgtaatgatcaagtcagggtatttaggatattcatcactttgagtatttatcatttctatgtgttgggagcattttaagtctactcttcgaaccattttgaaatatataataccttgttgttaactatagttggttactatagacaccctactcttctatcaaatggtggaacttattccttctatctttctgtatgtttgtaccctttaaccaaccactcttcactccgctatccacacactctttcaaacctttgttaactatttttctattctttacgttcatgagactcatttttttaactcccgcatatgagtgagaacgtgccatgtttgtctttctgtgcctggcttatttcacttaacataatgacctccaggtccatccacgttgctgcaaatgacatgatttcattaatttttttttagggctgaatagttttccattacgtatatataccatattttctttctttttttttatgagacagagtcttgctctgttgcccaggctggagtgcagtggtgcgatctcggctcactgcaggctccacctcccgggttcacgccagtctcctgcctaagtctctggagtagctgggactacaggcgccggccaccatgcccaactaatttttttttttttttttttttttttttttttttttttttttttaccgtgttaaccaggatggtcttgatctcctgacctcatgatctgcccgccccaaagtgctgggattacaggcatgagccactgcttctggccgtgttttctttatctatttgtctgttgatggacacttaggctgattctgtctttggtattgtgaatagtattgcaataacagggggtgaaggtattttttatattctgattttccttcctttgggtaaataaccagtaatgggttagttccaggaccctcagcgataccaaaattcatggttgctcaagtccgttatgtaaaatggtaagtatttgcatataacctacatacgttgtctcatataatttaaatcatctctacattatctataatacctaatacaatgtaaattgtatgtaaacactgttgtattatttagggaataagaaaaaagtctgtacatattcagtacagatgcaaccatttatttttttctgaatgtgttcaatcaatccaaattcatgaatacttatggatatggaggactgactgtattaagcttcttttcactttcttacacattactctctcagaagagattctcttctctccttatctggccaacatctgctcagccttaacaacttaaaatttcagcttacgtcagcataaatacatctttatcattgcaaacaagaaaaaaaagctatccttttttttgactttacacactactcaatttccaccataattttttgcaacttttcacagcatcttattttaaaagctatttttactgtctccctattctcccttttcatttttactttaataaactccaaatgaactgttttttccaactttgcagcgaaatagctcttgcatgttaccaatctcttgataactcctttgtcttcatcttcatctttcagcagcagtagatggttaaccattattgatttcttgggtcaccttattgtcttaacttctctactactacacttcagtggcttctacttctcatcctacttttctggtttcttttgtgactgatttctgaacaatagatgtcccagggattgaactttggctcttttttctttctccatagataatttttttttcaatcctgtggctctgaatacctgaataccatctacttttgactgactgtcaaatttgtatctttagctccaaacatcccagaactctaggttatataatgtgccacttgtatctataaatttaaacatctaataggcatccaaaattttacatgtacaaaacaaaggaattggtttccactaccctctctcctgaactgcaaactttctcaagccaaagacacaatatttatctactaggtatgtcccttaaatcccatatgaaagtccacccgtaaaacttgttaacattactagcaaaactaatctaaaatttttagcagattgtgtgaattagcctctaagtatatctccaaagaagaacaataccacactctcttcctgtaagccatg

SEQ ID NO: 1220 - DNA, 600 bp, Homo sapiens
  misc_feature (1)..(600): DMR7:126289301
aagagagaagaacagaaagttagacaagaaagagtttatcaagttggaaatactctcccagtggaggattttacatcctgacaaagatcctcaaagatatccaaaacatgttttgaggatggctcctggaagtttgaagaaagcaatgtccacgtcaaatgaagaaaaaatgccacaaccaccatgacaaacgatgggaaaatcagaccagcctctgaatttccttcttttggttgcccagttccacaaagatacatgaatcctgccaagataatttagagataatctggtctaaactattttatacacatcacaaaaagtgttacttaacatccacttgacaataaaactagaaagtgttacctatactgaaatatatgtgctacagtgaaacaaaatcagcccgtcttaaaaataatatttctttttaagtagagtatattaagaattttttggtaaattagataatcaaccaacaaaccaatattctgttataattaggatttattgggatttattacacacacatacaaaggaggtatttctcaaaagcttaaatccgttattcttctggcgaaaaaaaaaaaaaaaaaaaaaaag

SEQ ID NO: 1221 - DNA, 900 bp, Homo sapiens
  misc_feature (1)..(900): DMR7:128947001
cttgctggtggtgtcccttcagctgcagaggatgttgccaagcctgagcctcacaggtggggccgggaggtggtggttgggggtctagtatacagagaagctataggtaccataggtacctggaagggggctgatgggaggctagggtggcccagggctgggaggaggtgtgcctgggaggcagttcgtggaggtggcactgacagccgtccacacgcactctctgtagatgcagtgcagtctggcccccacatgacaccctattctttactcaaagaggatgtcaagtggccgcccactctgcagccgcccactctgcggccgcctactctgcagccgcccactctgcagccgcccgtggtgctgggtccccctgctccagaccccagccccctggctcctccccctggcaaccctgctggcttcagggagcttctctctgaggtcctggagcctgggcccctgcctgccagcctgccccctgcaggcgaacagctcctgccagacctgctgatcagcccccacatgctgcctcgtaaggacccatggctgggcacggggaagcagtgctgggggattggggtaggattggcaaggagggtggagggtgctggactcccttgggtgggaaaagtgggagggcggatggggctgggcctggccactgggctgcagaatggggaggcgtggggctcaaggacgggatgggcctgccttctgccccacagtgaccgacctggagatcaagtttcagtaccgggggcggccaccccgggccctcaccatcagcaacccccatggctgccggctcttctacagccagctggaggccacccaggagcaggtggaactcttcggccccataagcctggagcaagtgcgcttccccagccctgagga

SEQ ID NO: 1222 - DNA, 600 bp, Homo sapiens
  misc_feature (1)..(600): DMR7:129266001
aacaactgtaagtataaaaacaatagggagaagttgtccaaaatgaggataattgtattgctacagtgaccttctgtaggtgtaatcagtgtcttcctgttttagtatattcctgtttcttgtctccttttcttttttctcagtgcacatttaactagttttcaatacattcgctattttgctcagccaacaaatgactgttaacaattacaaagttgtttcagcctttatcggttaggcttctttggttgcaaaacaaaccaaaattgactttgttcaattgacttaagcaaaaaaggtagtggatgagaaggagggaggggaaaggataatagaggtaagtcacagaataaggaaatgctaaagaattacaccttggggctgggcgtggtggctcacgcctgtaatcccagttactctggaggctgagtcaggagaatggcttgaacccaggaggcagagaggttgcagtgagccgagatctcacaattgcactccatcctgggcaacaagagtgaaactccgtcccccgccaaaaaaaaaaaattacaccttgggagaaccctgaactaaagtatctcactgagatctagatagcat

SEQ ID NO: 1223 - DNA, 2500 bp, Homo sapiens
  misc_feature (1)..(2500): DMR7:129302901
tttttggaattgtttgagtaagattggtgttagttcttctttaaatgtttggtaaaattcagcagtgaagccattgggtcccaagcttttctttgctgggatacttctttgttttttgagatggactttcactcttgttgcccaggctggagtgcaatgacgtgatcttggctcaccgcaacctctgcctccggggttcaagtaattcccctgcttcagcctcccaagtagctgcgattataggcatccgccaccacacccggttaattttgtatttttagtagagactggtttctccatgttggtcaggctggtctcgaactcccaacctcaggtgatctgcccgccttggcctccgaaagtgctgggattacaggcataagccaccatgcctggccgactgagagatttttaactttgactttgatcttgctacttgttattgatctgtttaggttttaggtttcttcatgattcaattttgggaggttgtatgtgtcaagaaatttatccatttcttctaggttttccaatttattggcatataattgctcatagtagcctcaaatggtcctttgagtttctacagtatcagctgtaatgtcttctttttcatctctgattttattttggtcttctcatgttttttcttagtctggctaaaggtttgtcaatttcatttatcttttcaaagaaacaattttttattttgttgatattttgtattgttttcttcatttcaacttcatttatttctcctctgatctttatttattttctactaactttgggtttggttgggtcttgcttttctacttatttaagatgcattgttaggctatttatttgatgcgtttctacttttttgatataggaacttatagctataaacttccctctttggctgggtgtggtggctcacacctgtaatcatagcactttgggaggctgaggcgggtgaattgcctgagctcaggagttccagaccagcctaggcaacatggtgaaaccctgtctctactaaaaatacaaaaaattagtcgggcattggtggtgcatgcctgtaatcccagctactcaggaggctgaggcgcaagactcacttgaacctgggagctggaggttgcattgagctgacacaagactgtctcaaaaaataaaaaataaaataaaaataaataaataaacaaacaaacttccctcttagtactgctttagctgtatcccataggtttgggtatgttatgtttccattatcatttgtttcaagaaattccttcatgtttgtaccatttccaaaattcttgttattgatttctagttttattccattgtggtcagaaaatgcttgatattacttcagttttttgagtgttttaagacttgtcttgtgacctaacatataatctgtccttgagaatgatccatgtactgaggagaagaatgtgtattttgcagccattggatgaaatgttctgtaaatatctattaggtccatttggtttgtagtgcagattaagtccagtgtttctttgttgattttctgtctggatgatctgtccgatgctgaaaatgggatgttgaagtctctagctagctattgttttggagtcttatctatttagctctaataatacttcctttatatatctgggtgctccagtgttgggtacatatatatttaaaatggctacatcttcttgctgaattaacccctttatcattatataatgacctttttctgtctctttttgtagtttttgtcttgaaatctattttgtctgatacaaatacagttagtcttgctcttttttggtttccattgatatggaatattttttttcatcctttcattttcactctatatgtttctttaaaggtgaagtgtgtttcttgtaggcaacagatcattgaatcttgcttttttatccattcagccactctatgtcttttgattggggagtttagtccatttacattcaatgttattattaataagtagggacttactcctgccattttatttgttttctggttttttttttggtcttctctttcttcttttcttccttcctattttccttttagtggatgtgattttctctggtggtatgttttaatttctccctttttattttttgcatatccactatatgtttttagatttgtggttaccatgaagtttgcaaataatatcttataacccattattttaaactgatgacaacaccgattgtataaacagacaagcaaaaaaactaataaaaactttatacttaggccgggcatggtggctcatgcctgtaatcccagcactttgggaggccgaggcgggcagatcacgaggtcaagagattgagaccatcttggtcaacaaggtgaaaccccgtctctactaaaaatacaaaaattagctgagcatggtggcacgtgcctgtagtcccagctacttgggaggctgaggcagcagaatcgcttgaatccgggaggcagaggttgc

SEQ ID NO: 1224 - DNA, 1400 bp, Homo sapiens
  misc_feature (1)..(1400): DMR7:131020301
cctgaagggcagtgctgtgtcattctcataatctttccatccccaaatgcccagctcgggaacataaatcaatgaattatgcctactaaatgttcagattttgacgtgaaagtcaactgaagagataagacaagaggaaagaaaacgagaggagtaacaagatgagtagaggtaggctttgaaggagcaggagggaagtgggcagcaacccttccacagtgaagaagagaatcagtgatgcagaggcattaaatagaacagatctgaggcttggcagagggagaggccaacaggagctccagacaagcctgggcaacttagcgagaccctgtctctacaaaaaaatttcaaaaataggcaggtgtggtgtcatgcacctgtagtcccagctactcaggaggctgaggcaggaagatcatttgagcccaggaggtcaaggcttcaggggactatgatctgcaccactgcactctagcctgggtgaccgagcaagaccttatctcaaaaaaaaaaaaaaaaaaaaaagagggggccaaaactgccacttcagtgcaccttgataattctcataggcactgctgagccttgcagaggaccacactttcagaatactgtaatggtgaaaccagtctatcagggaaattcctgcccatttctaatctgaaagatgccagtcaaacatccccccatccatgtgtgcagaataaactctagggtactatttctgcagcgtgtagaactgctcagcagctaagagacgcggttactgtatatggcctggcacagcattcagctaagatgatagtgagaagtcctagggcccatgcaagtgcccgaattcatgcagcacaaaagagccaggtgccgctcactctgcaacagactccgatcctccagcagaaggaagagaacagaagcccaaaattgttttgctatagttaaaagagaaaacagacatctgtgcgtgcctgttgacagaagtcaatttgacagagatgaaatcaacaaagacaactaaaagaaagggcagggagagagacataaaaaccagggggttgtcaggtttggaggccaaggaccaggcagggacccagtggcaggtgggatggagggacctactgcaggagtgcagtgcatgggaaggcaaggaagaagatgacctgcagaaacccttcaccaagtctgcatgcaaaggagagaagaaacaggctgctgagtgaggatgagggcagagggggatattttaagttttgaagtgcggtggcaaggaggtgcggtatctcctgtgtgacagcctcgctaggctctatgaagtggaaaattggatcatctgtgaagaggaagcggggaagagaagcaggaacaagtctgaagagagtgggcttggcttgtaacagtca

SEQ ID NO: 1225 - DNA, 200 bp, Homo sapiens
  misc_feature (1)..(200): DMR7:131156001
aaattaggtaaaagagcacctttgttatttgggaagctagaaataaattatgggttttccaatacttagcagggatttgtagcaatcaaaatgcagacaatcagtgacttgttagggatgcaaaagtcattgcgggttttgctattattttaatagcaaaaaatgcaattatttttgcatcaacctaatacaatagttta

SEQ ID NO: 1226 - DNA, 300 bp, Homo sapiens
  misc_feature (1)..(300): DMR7:131338701
gtacgacttgatccccagagttctttggtctcttgctaagtgttttccttcattaactgcttattcttgctatctgatgggaaagaattgtggaacttaaatacagttgacccttgaacaacatggatttgaatttgcagatctacttacacgtgattttcttctgcttctgccaccttgagacagaaaggtcgatcccttctctttctccttctcagcctactcaacgtgaagatgacaacaatgaagacctttgtgatgatccacttccatttaatgaatagtaaatattttttctct

SEQ ID NO: 1227 - DNA, 400 bp, Homo sapiens
  misc_feature (1)..(400): DMR7:132201401
gcatcacacaaatatatggcctatgactgtgcctgccactgttaagtgatcatatactgtgtgcatttgtgaaactgtgcacaaagcccggtaccagttcgtcctcactgttcactgaggcagagactgagtctctgtcttctctccttctccctcttcctgctgcttcataatcctgaccagcatccgcagtggtaaagaggtattgagcacctactgtgtgctcagccctgagctggaggcacagatgccatggtgccacagatgacatggtgccatgggggaggagcatgtggagagagagatgcagccctcttttttattttaagagggagcaagggactccagccttgctggaagagtgcaggagtgggaggagaagagacaggactacttaaat

SEQ ID NO: 1228 - DNA, 300 bp, Homo sapiens
  misc_feature (1)..(300): DMR7:136104701
aaacctccacctcccaggttcaagtgattctcctgcctcagcctcccgagtcgctgggattacaggcacctaccatcacgcccagctaatttttgtagcgacagggtttctccatgttggccaggctggtctagaacccttgacctcaaatgattcgcccgcttcggcctcccaaagtgctgggattacaggcgtgagccaccgtggagggctgtttttaatttccaccctttggttactggattggactggttttcttgtgatgagcgactaaaatgtattggacttttggtttaattc

SEQ ID NO: 1229 - DNA, 900 bp, Homo sapiens
  misc_feature (1)..(900): DMR7:138138401
agatctcatggcaagagaggaagccagaggcggaggtgcaaggctctgtttaacaattacctctcatgggaactaacagagtgagaacacagtcacccccaatggagggcattaacttactcatgagagatctgcccccacaatccaaacatctcacattacgccccacctccaacatagaaaatcaaatttcaacatgagtccaaaataccacatgttctcatttataagtgggagctaagctatgggcacacaaaggcatacagaatggtataatgggcattagagactcagaagggaagagggtgagagggggctgagggatgaaaaactacctattgggtacaatgtacactactcaggtgacagatgcactaaaatcctagacttcaccactatccaattcatccatgtaaccaaaaaacactagtgcctctgaagctactgaaatttaaaagttttttaaaaattcaacatgaggtttaaagtagacaaaccatatttaaactataactagatacgctttcattcatttctctttatcttttacgtatctttgataggtcttttctttgtgattaccatgaggcttacatataacaccttatagttataacatgctattttaagcttatagtaatttaaatttgatcccctccccaacattctctatatatattttaattatgacatttgaagaaacttgaaaaaaataaatattttatacaccacacacacacacacacacacacacacacacacacacacacaaagtcttactctgttacccaggctggagtgcaatggcatgatcttgactcactacaacgtccacctcctgggttcaagcagttctccaacctcagcctcttgagtagctgggattacgggtgcatgcaa

SEQ ID NO: 1230 - DNA, 1100 bp, Homo sapiens
  misc_feature (1)..(1100): DMR7:138259001
ttgacaaatcagctctgtctaggaagcagacaagatgaacccgttgggcagttacaattcacttcagtttgttctgttggttggtttgtttaagtatgaaaaacattgctttgttttttcgtttcagaatctttgagtccacgtggaggaaggaaggagaagaggagaagactgttttccaggatggaaagggagcctcgctttctctttaggtggattacagaaattggttgaattctccctgccctggagaaaagtcaatttattttttatgttaaagatttaggctcttcctgagggctactatgaaagaaaagtagggaagcgagcttttattttgagaacaaagagtgagccaagagtgtaaagttgataagagggtagaagggagtagatgaagggggaggggaaaagaaatggccaaaggggaactggccaagagaaagaacactacaggaccttgaaatgagtgaagaaaatgtgttataccttttcatccctacagtgtctacatactaatccccagaaactctgagtgtcaccttatagtgcaaagggatgttgcagatgccattgagttaaagatcttgagttaggaagattatcctgaattattggtgtgggccaaatggaatcacaactttccttataggagggaggcagaactttgatgtaaacagaaaagaagaatgctttaccttaccaattttctacatggtagcctgtaacttgacaacattataaaacaactggctctaaatcaacttgagttatattttcagagcttgaggaccctttgaaactgcccttccaaaattacaacagtgagagaaatcggacatggctgactccatcttgcttctagcctcacaggctggctgtctttgctcattcctgggcgtgggtcaagctaacttccagagaaatttagtttacagtttaaataacattagcccttaccaaaaactaaactgttcttgtaaaactaatgaaaggctaccaagttaatgagaggggcttgaattctaaataattaccagtcattattccggaggtcataagatttgcaacttccccaattactcttgcagataacatca

SEQ ID NO: 1231 - DNA, 300 bp, Homo sapiens
  misc_feature (1)..(300): DMR7:140446401
aatgacttcagtgtccatcaagtcatgaatcaataaacaaaatgtggtatatccatacaataaaacagcagtccccaaactttttggcaccagggactggttccctggaagacaattttttccatggacagggggtggcagggatggtttcaggaagaaaccatctcagatcattaggcatgagattctcataagcagcatgcaaccgagatcccttgtacgcacagttcacaacagcggcggaaccctggtctgactgaaggtggagctctgggagtaatgcttgcttgccgctcacat

SEQ ID NO: 1232 - DNA, 1200 bp, Homo sapiens
  misc_feature (1)..(1200): DMR7:141028701
gttgttcttcctttattcttaaaatttcaagtgtccctcttgaatataatttcttgttgccctgaagaactttcaacatttcttttagagcaggtctgctggttacatactctcttttttttcttcatgtaaaaatgtttttatctcacggtcattcctgaaggataatttcagcaaatgttgaattctggtttgacaattcttttctttcagttctttaaagatgttgttccactgttttctggtctccatgatttcggatgtaaaatcagcagtcatttgaatagttcttcccctttatataatgtgccacgtttctttctggctgttttcaagatcaacaacaagaataataaaacttggtgttcagaagtttgattttgatgtgtctggccacagttgattttctttggaggtgtcctgtttgggattctaagctgctttaatctataatttaagtccttcatcaaattagggaagttctggcctttattttttcaaatattctttctgaaccaatttacttttcctatccttcttggattccagtgaaatgaatgttagataatttgatgatgttctgttcatttcttccccctacctctttgttcttcagattaatgtctattaacccatcttcacattcattgactctttcctttgtcattatctccattcagctattgagcccaatcaatgactttttcatgtattatattttttagtcctaaaatttgcatttgattatttgttattctatttttttctgttcgcattctaaaattaaattttttaatgtttttcttctttttagagacagggtctcactctgttgcccaggctgagtacagtggcacaatcatagctcactgcagcctcaaacttctgggcttaagtgatcctccccacttggcctcccaaaatgctgggattacatgcatgaaacactgcacccagcatctgatgacttttgtatttctattcacttaaggagtgtttacctttacctcatgaaacatagatgtgataggctttaatgtctttgtctgatatttctaacatctgggtaatcttgaggtagtgatctcttgatttcctttttccttgagatttttcacagtttgttggttctatgttgagtaatcatggactgtatcctggaaaatctgaatattatattgtgaggtctctcaggcctgt

SEQ ID NO: 1233 - DNA, 500 bp, Homo sapiens
  misc_feature (1)..(500): DMR7:141387901
ccccctttcccgcaggcagcccactccctcactctctccccacctgcactgaaacctgccttcgtccacttacctgctgtcacctgctctggctgccaagccgcacaccctttgagctttcatcagcagattctggggtgtgtgtgtcttcctgggtgtgaggttgtgaccgcagatgacattatacgacatgtctgtcagtgaagcagctttctttactcaaatagtattatttcagcttgagcatggtatcaggtggctgtaaagttcctggaggttaggaggaggaagcccaggtgtgtctttggctcctccagacttgccagaatgccaggctcatcgtagggtctccgtaagaactcgccctggaccaccccactcatgtcactaatagtcaggcttcgaatggagacatctgcctgagataaagcatgtgcacgctttctactcaaagaagacggtctctaataataccgcctgttttgctgtgcatatcactg

SEQ ID NO: 1234 - DNA, 3000 bp, Homo sapiens
  misc_feature (1)..(3000): DMR7:142326501
ttttgtaatgatattttggcgaaaattaatcatctttaagggaaatattttgagtttcatcagacacacatgcagctgagctttgtgttcacacactgagtgccctggggccaaacaaaatacggtaatagtgaccttgttgagagatgacgtcacattgggagaaaggttctctttgtgttgacactaagtgtccaattcataaaacctaagccttgagctaggaaatgcccttttctgccctgggaagcaggctcctacattgtgtgtttctctgtctcctggtctagcctggacacagacagtgtacccactcacgaacttgttatatcctggctgtgaatttcagcaccaggtggccctttgctctgacttcaatttctgtgtccttctctcctaaacaccatggatgctgagtgactcagactccagtcatgtgcttttgccaaaaggaaactagcacaagaggaggtgagcagaatatgaaacaaaaccatgtactcaggaccggcaatgtgacttactggcagctctttgctcaaatattgtaaggaagttgaagatcatgacaatgttacagtaacagggatctctttaagtgtggggctctgtgcactaaaatacgggtttttttttttcttttctttttttttttttttttttttgagacggagtcttgctctgttgcccaggctggagtgcagtggtgcaatcttggctcactgcaaccttgcctcctgggttcacgtgattctcctgcctcagcctcctgaagtagctgggattacaggtgcgcaccaccatgaccagctatttttttttttttttttgtatttttagtagagacggggtttcaccatgtttgtcagactggtcttgaactcctgacctcatgatccgcccacctcagccttccaatgtgttgggattacaggcgtgatccactgcgcctggccttttttttttttttttttaattgttactgaattagtggtgagaatcctgaccaagggaatattccctatgaaatatgacacttcaaataaaatgagagcgctttttcttatcctggagcctgcctcttctctcctctccccacatccctcacatgtcaagacacctttgtgcccacagatcatgggcagcgttgggctgccactatcatccacacagagagggcagtcagcagcgtgaggtggttctgcctgctgcggtctcaccccaggcacagaaagcaagagccctgggtggagctgaaggtgctcagctgggcttgtcaggagtcccatctgtcggtgaattgaaaagaaacagagcaaaatgactcctccaatggtgatgagcctgcccctgggatttggaaacttggtaacagagaaaaccaatatagacaaaggattttaaacaggattatggtcaattaagcaaattagaaaaggatacttgaagggggatttgggacacaggagtcaaaaacaccgggaagacatgagaagtttccctaagagtctaaattagagaaatatttagataactgacaccagtgtatgaatgaggaattatatcatcacagggataagagttccattgagttacaaactgcttccaaaaaggttaagaaaaactcgtaaggctgtgtcaattcagacaaaggcattcttcccattcaaacggttcaccggtgcatgaatcttgaatttgaccatctggggaaggggcgtggcctctcctgacaggaaggctctggggcccaggcagggagaatgaagtctcagaatgacccccttgagagtactgttcccctatcaccgatgcacagacccagaagacccctccatcctgtagcacctgccatgagcatcgggctcctgtgctgtgtggccttttctctcctgtgggcaagtaagtcctgggcagggccccatgtgtggatttcaaggcccagcctgtttccattgtggctgcagcatcagctttgttcttctctgcaggtccagtgaatgctggtgtcactcagaccccaaaattccaggtcctgaagacaggacagagcatgacactgcagtgtgcccaggatatgaaccataactccatgtactggtatcgacaagacccaggcatgggactgaggctgatttattactcagcttctgagggtaccactgacaaaggagaagtccccaatggctacaatgtctccagattaaacaaacgggagttctcgctcaggctggagtcggctgctccctcccagacatctgtgtacttctgtgccagcagtgaagccacagcgctgcatggccgtctcctctctgcacataaaggcagggaggctctgccctcctccctcaccccagactcagtgatgccctgggcagagttctctgcaccaggaaacttgaaaccccatcatcatgggtctgaggcccccaggatgaaacaggatttgtatttcagatccatctagactctcgtctctccctggggaccatgttgcttcttctctctagggttccccccagcccccaccctcatgttgtctctccctggggaccatgttgcttcttctctctagggtttcccccagcccccaccctcatgttgtctctcctgtggcccacctttcccatctgggcagtcaccctccaaggccttgctgggtctctcctcccctcacttccccacacctctccacagcagccatgaggggagcccctcttctgtgcctccttccttcccatcacagagacttcaaagtccattttctctgccctgggctggaggcttcctttctgcagtggccaactcctacctgtgcttcacatctcagcatgatcagccctcctgtgggaagcatgcccttgcctcccagctgagatcaatttttctgttataagcactgatggtaacatgtgcttgttagtcaacagagttgagcacagttggagttttccagttacttgtctggatatttttctgctcatgtcgattttaaactcc

SEQ ID NO: 1235 - DNA, 5200 bp, Homo sapiens
  misc_feature (1)..(5200): DMR7:142685101
gtaaacttactcttaaaatccattatattagtcaatgggtttggcctgagcactgggaaagggatgggtaggaaatactgtctcagaaaggcattgagagagaacacatcctaatcctatctggaaatttacactccccttcagccattcacgtctcttaacaatagtctccagctttactgaactctttgcaaactccaaaaataccatattctcttagatattgcataggctggtcccccagcctaggtctaccaggaaattatttgttttcctacaaatcttacttaaacccacactacctctgtgaagtcctttcttcccacggagatatggaggtttctttccctatgtgcttacaacaatttaaagtctgttactatattatggctttttggtcatgtctgactccttctaggcaagtatggtctttgaaagatgggactgtaaatctgtttacctctgtaactgcagtagtaggactaggaatgatatatagaatacagaatcataagcccccatggaagaagagaccttctttttgttgttcatgcttgtatcccagagtctagtactatggtgcacatagatgtatatttgttcaataatatgaaagactcaaatatgcctttgtggaattgaccctgcacttatgcctcaccatctcctacttaccccggaattatttattaactatctcatgtcttaggtctcatctcccttccctagttaagagtgggccctgttgctaagcaggtcaaaataggaggctgatgaagaaaatctctgtggaaaatgctgaagaggaacacaggaataaaaatacctttactctgatgatgccttatataaggacagatgcagttggtttaaacttctacattggctcatttctatgaatgccacacctctcaatttcagggacttcccgtgaggggcttcacaacaatctctgggctcagtggggagctactcccttggtgaatctcctcactgccactcaatgagccatcagggtgggccgtcacctctgctaagccacagaggtacaccacatcctgctcctgagaggaagggaaagacagaggatcataggaagtaaaccccttgaggaaatttcaatgtggaatttattctgtttcttgagtagcatatatattttccccacctcagaccctaacctcaagtgaacttactcccagactcacacacataaatatatgcaccagcaccatcccagcaaggaggcagctgcaacaaaaagaagcaggtgggagagtattatattacatatttaactacaggatcactccaagaattacatcccctaaaattattccctccattggaagcagactagtagccaataggaagagaaattgctaaaacaaaaatgtgttcagttggatgaagtatttattcaaaacagaaatgtatttatgaagacataattcttcagaattatattataagctaaaaataaaatcctatacccaccaactgactgaaaggaccatctctgggacaagggcaccccagagtaaccttgaatgttgagttcttggccaggacaggatggagggatcagacacaccttattatacctctcccttagagccatgatgaggtttgcttccctaaaggctaaacacaaaccagccctttgaaaagactctagcactaaaagcaacagaaagtctgatgctgtccctcctttttgcctggtaaaaggccaccaaccaaacagtgtttctggccagtctatggaggacgtgtagtgaggcttttggtgtcctttgcttcaccttttgatgtcagagagctgaaaactccacccccagatcatgctaacatggccagtttttttttacaggaatcccatgaaggggcaggaaactcaattgtggatgtatatgtttttccctttattaatattcatgactcctcctatagcttattgaatatctgtatttggccattccactcagcatgtatttcttttccctttgcctctccctagatgtgtgtttctggcttctggccagaggctgtgcttcccagcctgtcagaatggccacactgcaggctgcaaccctttatgagaaataaagctctcccttccaaatttgaacctcctcattcttccattgacagtatcaaagatcagatagttgtagatgtgtggtattatttctgagggctctgttctgttccattggtctatatctctgttttggtaccagtaccatgctgttttggttactgtagccttgtggtatagtttgaagtcaggtagtgtgatgcctccagctttgttcttttggcttaggattaacttggcaatgcgggctcttttttggttccatatgaaccttaaagtagttttttcaaattctgtgaagaaagtcattggtagcttgatagggatggcattgaatctataaattaccttgggcagtatggccattttcacgatattgattcttcctatccatgagcatggaatgttcttccatttgtttgtgtcctcctttatttcattgagcagtgtttggtagttctccttgaagaggtccttcaacgtcccttgtaagttggattcctaggtattttattctctttgaagcaattgtgaatgggagttcactcatgatttggctctctgtccattattggtgtataagaatgcttgtgatttttgcacattgattatatcatcattcttctaagaagataccaatgaagtttcaaggatgattcagcatgataatgaactgtttgtaatcattcaagatatactaaatgctgaaggaagtcagttagaaataagaagtaggacaaccaaaggatagaacctagaagaagacaaagaaaggattttacagaagctgctcatgaaaagagatccaccaattctgagataaaagaactgggtttgagtaagccacttgttataagcatgctcaaggttttcagaaaaaaataaacagagctagtcaatgatacctggtaataaaagatattttgaatttcaggccattgagggtagcatgctaagtgtggttttagttttgggaattagagtaaaatgaaaataatttctgaagaagtctccagccaaactttaaaaagaaaaaaatgcaaggtatagaatatttgaaaaatttattattaatagttgaaagtacatattttagaactggactgatctggtcaccgtctagttttgccatgttacttaacctctctaaaggtagtttcctagcctataaaatggaaatagtcatacctggctctgagaggttttatttagttgagaaaatgtatgtaaattgcctgacacaatccctagccaagaataagactcaataataactaatggcggtagcagtaagagtgctactactagctgaccattctgaaagttgagcctgagtgagtgataactatacactgtgcagttgtaacttcttaacacattaattcatgtaatcttcacagcaaatccacaaggttcatacttttattagtacaacttacagagagtaaaactgaagcattcacagttaacttacttgcgtaaaatgagcttaagtagcagaacccatatttaaacttaggcactctctctccagagctttctttgttagccactaaccttgtggtagtgcaatcaagtaaatgggtttgttgtctgatatgctcagaagccaataagcatggcaccagcttttgagaaaagaaaaggttttactgcaaaactggtcagcaaggagaaataagccggctcaaatctgtcttcctgattcggggtcttggacaagttttaagggactgagagcaaggatttagtgatactgggttgatagggtctgattggagggtttcagatttaaccatttatggtaaagtaggttgaggcagatttgagcccagatctttccagccaatgaaccccttgcttctgaaagagtttcagcctccagattccaagcatcttcctgtcttcttggttccgaagggaggaatcgttcgttccaggtgttatttgaggtcaaagcttttggctctgtcgtacctacaagctaactcatattttgttatccacataacagacccagtttgggctgatcctgcagttacaaatccctccctttttgtttactttagttctcaatcttgaaaaaatagagtgtctaccactctagctactttttgttgacaagggacataggtctgggtttgaggaatgaaattgtttcataaataattgcaaatattcataggtcctgagttgaggtcaaacaggtgggtcagggaattcgatatttaataactatttcatgagcagggggaattgatttaacaatcaatttaaaaaatagacagcaggtagagaccttgagagaaggaagagaaatcttaacacatacagaaatataattttgagtttaagtagaccctcaaaaaatagatcttattcctaatgaaaacacgctgtttacatattatatccaggttttttagagaacactagatggcgtcgagtggcttttggtctattatttgggtgggtctcaacttttttagaagtattaatgtaaacacagcatgacatattaaagcataaacacctctttgtttagccagtatataatctagagtaattttattatctattattactttagccaaagcacctggctctctctattgagccaccatggccattgtggtctccttggcaagctttttcagggcaatggaaaggtttttaatcatatgtttataagaagcaactccccaccatggcaacagagtttgtctaaagaaatatcctacaccatctggtgggccacctggtaaatatttaactgggaggaggtttagcatagatcttttggccaaggtgaacagttttatggtgttagtctaatgcccagcatcactaatgccacagacagagaaaggagtgactaagtaccctagtaaacagatgtctttggggcatcagctgtcaaggcattcatagtccgagggctggtcgtttgtttcatagacaaagacatatcctgaggaggcgcatagaataccagatatgttgccgggcgcggtggctcatgcctgtaatcccagcattttgggaggccgaggcgggcagattatgaggtcaggggattgggaccatcctggccaacac

SEQ ID NO: 1236 - DNA, 200 bp, Homo sapiens
  misc_feature (1)..(200): DMR7:144022501
atagcaggatttccttctaattctccccatgcttattctgttggctgaatctatccagaaaccaggcagcaaaaaaaaagttgggagatgtaaatgataggacccagtctcttggggaaagaaaaagtcagagagcagatttggggtagtggggcagggcaggtcagggtaagcatagactgctttaggaacaatgatca

SEQ ID NO: 1237 - DNA, 1000 bp, Homo sapiens
  misc_feature (1)..(1000): DMR7:144222301
cttcaaaaaaaggcagatagcttctgaggtcatagtattccatcagtggcattgctacagcctgctaactgactttcattgcccacacgctaacattttgttctgctgtatctgatggggaagggttgagccacgcaggcatggagtgctagatgtcttctgcatgccagaagagttcattacttagtattttaacccttcatttacctgattttatttatttatttatttttgagacggaatctccctctgccacccaggctggagtgcaatggtgcaatctcggctcactgcaacctctgcctcccgggttcaagtgataattctgcctcagcctcccgagtagctggttttacaggcatgcgccatgacgcccggctaatttttgtatttttagtagagatggggtttcaccatgttggcaaggctggtctcgaagtcctgccctcaagtgatccacccgccttggcctcccgaagtgctgggattgcaggcatgagccactgcacctggcctttcatccaccttagtcatcacttcctttcttctcttccagttcaatgcaaacaccatgggaaacacatttgggatagctggaaattcagcctgtttattctctctacccccttaaagcatggaatggctgatctcctatcacaacccactttttgagaagaaaggatcatacacctgtctgatttggttacctcaaatccagtcctattgcccagtattaccttttgttcatatgtccttgtttggctctttcctagaactgccttccctgggactaaattgtagtgggttttagtttaagataccacattaaattttttaaaacacttttaatatttgtgggtacatagtaggtgtatatcctttacctcttttataagggatcaggtaaataatacatagagaaagtaaggaaggagaaaacaaaggtgagagaagagaatagatggatctcaatgcttcatgattaagaataacttttagt

SEQ ID NO: 1238 - DNA, 8100 bp, Homo sapiens
  misc_feature (1)..(8100): DMR7:144346001
cccgggaggtggagcttgcagtgagcctagatcatgccactgcactccagcctgggccacagagcgagactccatttcaaaagaataggaattggctgagtgcagtggctcacgcctgtaatctcgccagcactttgggaggttgaggcaggtggatcatttgagcccaggagtttgagaccagcctgggcaacaaagtgggacccccatctctacaaaacaatacaaaaattagccaggcatggtggtgtgcacctgtagtcccagctactcgggaggctgaggtgggaggattgcttgagcctgggaggtggagactgcagtaagccatgatagcaccactgcactccagtctaggcaacaaagcgagaccctgtatcaaaaaaataaaaataaaaaataaggaacagggatcattcccatccccatccctatcttccaaaaattttggatggggaaatttccaaaacatcccaaatccaaacatttcaaaagacaaaaagcaagacaacctgaataacagcgcttctagggattgctcactgtagggcaggcaggcaaggacccactccctcttcatgactgcaacacctcaccatagctataaccagcctccaggaggacctgggcattctcagacattatgtaccagacgttttggaaatgttcaactgaatgagatttggaagtatacatatttttctatgatatatgcactcaagttaaaaatgtctttgtacaggagattcgaaaaatatgagcctctagtctagagacttaggaagagtgatggtgtaactgctgacctacaagcatcacacagaggcatcatcactttggcattggtttataaactcaccgacaagataatcttttcctcctccaaactcccatggcacctctagcataaagtgcactgcacttcaacactgttgttcatctgtcacatccattacactgtgagctccttgacatcagggtaggcaacctattcatcttttagaacccagcagagctggtaagaggctattctttttttttttttttttttttttgagatggagtcttgctttgttgcccaggctggagtgcagtggtgcaatctcggctcattgcaatctccacctcctgggttcaagcgattctcctgtctcagtctcccgagtagctgggattacaggtgcaagccactgagcctggctaatttttgtattttttttagtagagacagggtttcgccatgttggccaggctggtcttgaactcctgacctcaggtgatctgcccacctcgacctcccgaagtgctgggattacaggcgtgagccaccacacccggccagggctgttctttttttttaaggcaatggcactctttccatctcttcctcctgaccattccaccaaacatctcccacagatacaaaccatagagaatatcaggtattttcaactttgctaatcaactctttaaaatgatagtccattttagaacttgaacaaatatttactataccatttatcgaccccaagttgggctttcctcctcttaaagaagttcagtgaactacaagaatttgtggattaaaaaaaaaaaaatttaacccaaagactcctagtgacctttgctggagctaacacagcatctcttaatccagctctaaaggatgtgaagagctccaggcctgaggcaccatgctgtgcagcaatttacttcttcattgcaccaggctcatccctcattgcccacagcatccaggggtaaactcggaacaaaagattgcttacactttcataacttcaaaaattacatcacacatgcatgtccagtgttaaactacaactgattacatgtactgtctaacgaaattgttgaatacttgctctgcttttctccctgttggccttacaatccctgtttctaatttccttccatcctcgggtcataaaactttatacccagtggcctggcacaaaagtttcttttcttgtttccctaatatccttaaagcaggcattgcagtccactgtacttcttccttctatacaagctggaacaccctgagtcctaagctttactgtgcttaagaatgacccgtgggaggctgaggtgtgtggttcacgaggtcaggagttcaagaccagcctggccagtatggtgaaaccccatctctactaaaaatacaaaaacattagccaggcgtagtggcgggcgcctgcaaccccagctacttaggaggctgaggcagagaactgcctgaacctgggaggcggaggttgtagtgagccaagatcatgccactgcactccagcctgggcaacagagtaagactccatctcaaaaaaaaagaatgactcacaaagcgaattggagactccaatgcaggtgtaccacaaactacactttgatctatggtgtggcagatgtcacagccggatcacccgcacatccacaaactatacgttgagaccctccgcacacttagttgttatatacattattaataattcacaagtgaacacaactgtgaattattaaaaattcacaattcattcattcattcaggtcgaggtggtctctttcacttcttaaactcccatccttttcctacacccatgacttaatatctctgagaataagtgagtttctaaatgtctgagttaatagaaacattctttttacaagcaaaacagaccatttcctcagtaacccttcccagaaccacccatcttaccactcttaccactactgattaaaaaaaagaaaaacaggtagtgccgatcaaaccaggcaagctgaagcccatggctcctggacacaaatgatgacagctgtgactaaactcctaggcaaggctctttgatgtgtctatctggccaataggcctctacatcttgaaagcaaagtagcaacattgagaaaaaaaagggccaggctgtgaaatgcaagttcaaagcaagcagcaaagtattaatagttgagcttctttctgcaaataaaacacagagctctagaggcagcccctgcaaaatcaagagcagaactcctcaaggagtcctctcacaaacagagaagtactcagagaggacatcattttattcacctccaacagtcaattcttcaaatctgacttgatcattttatcttcaaaaaacagtcagcacggccgggcgcggtggctcacgcctgtaatcccagcactttgggaggccgaggcgggcggatcacgaggtcaggagatcgagaccatcccggctaaaacggtgaaaccccgtctctactaaaaatacaaaaaaattagccgggcgtagtggtgggcgcctgtagtcccagctacttgggaggctgaggcaggagaatggcgtgaacccgggaggcggagcttgcagtgagccgagatcccgccactgcactccagcctgggtgacagagtgagactccgtctaaaaaaaaaaaataaaaaaaataaataaataaataaataaaaaaacagtcagcacaatactaaaatccattccctgtcttattttcccattgcccctgcattcgttcaaggtgtcttcttttcttacctccatgactacaatatccatctaattgctacaacagctgattgccttccttgcccctccacttcactatccacaccagtccattctctcaactgcccccagagcttttttttctaaatctaaccttagaatctgatctcatcatgaccttgcttgaaacccttccaaggaggcctatccccagaaggatgaagtccaaactcagtagcaggaatggcctacaaggcctttcatgatttggctgcccgactacccttccaacttcattctctgccatttcttcaccacatctcatgttaaacccacactatttgcacatccctgaacagagggtgctcaggcttgtatttttgcatatttcacttctgctattggtatgcttttcctatatcctcctctataccaggttaacagaatttttttttttttttttttttgagacagattctcgctctgtcgcccaggctggagtgcagtggtgcgatctcggctcactgcaagctctgcctcccaggttcacgccattctcctgcctcagtctcccaagcccggctaattttttttgtatttttagtagagacggggtttcaccatgttagccaggatggtctcaatctcctggcctcgtgatcccccgcctcggcctcccaaaatgctgggattaaaggcatgagccaccatgccggccagtaacagaatatttttaaaagacaagtcaactcaaatctcaccttcgccgggcacgttggctcacacctgtaatcccagcactttgggaggccaaggtgagtgaattgcttgagtcaaggagttcgagaccagcctgggtaacatgacaaaactctgtctttacaaaaatataccaaaaattagccaggtgtgcatggtggtacacatctctagttccagccccaggaggctgaggtgggaggatcacctaaacccaggagtttgaggctacagtgagccatgattgcgccactacactccagcctaggtgacacagtgagaccctatctcaaaaagaaaaaaatatatataatccaccttatccattcaggcttctctgattccccaaggagtgccacctactctctcctttatgcttccattgtactttgtgtccatctcaacataacacttaccatgctctgctgccattatttgctacctgtttctctcctcaatcagattgagagcttcttgaaagcagagatcttgtctttgtatatctggtttctaagaatgcatactgagtaaatgaatagaagaaaaaatgaatgaggcaattagtatgtatgccttgaatggcattaaatttaggcctatgccaatcaatgtgtaaaggttgagaaaataaataaggggaagccaaggatagaaaataaaaccatgctcatcagaatagaagaggataggctgggcgcagtggctcacgcctgtaatcccaatcacttggggtcaatagtttgagatgagcctggccaacatagtgaaaccccatctctactaaaaacacaaaattagccaggcttggtggtgcgcacctgtaatcccagctactggggaggctgaggcaagagaatcacttgaacctaggaggcagaggttgcagtgagcctagatcgtgccactgcactccagcctgggctggacagagcaagactccatctctgaaaaataaaataaaataaaataaaacaaaaaaacagaatagaagaagatagctaagaaccacagtggtcaagccagcctggcttcaacagagatgaatggagagaccacggtcagccccattaacagaagaactggggccaggaacggtggctcatgcctataatcccagcactttgggaggccgaggcaggcagatcatgaggtcaggagttcgagaccagcctgaccaatatggtgaaaccccatctctactaaacatacaaaaattagccgggtgtggcagcacatgcctgtcatcccagctactcaggaggctgaggcaggagaaacgcttgaacccaggaggcagaggtagccatgagccgagatcacgccattgcactccagcctggcgacagagcgagactccatctcaaaaaaaagaagaactgagttcaaaatcagttcgaaaggttcaatgttgggtcacaggatcaggcaaaaagcagaggcagaaaggccttaggagtgttccaagaactagcactggaccagctgagagtcagagagagttcaccacgtgggaacaatgcagccagtcatgtgggatggtggcaccatgacagtatctagtcaggacaatgacagccctagggataatgctgatgagttcctgcttcaaaaaaggtcattgtcattcctttagtcctgatacctagaactatacaagattgttccctgcctctccccaagccccataacttgatcttaaaggcattattgtcaattaaagtagtcccaagttctagaagctatttttattcagcctcgtctaatagggctttcattttaaaatagctttattttgaatctatttactgttcccagcccctatcactttgttcttataaacatattcattccacatgcatcactgacaggcactgctaggaaaggaaactaacccatcttggccacctttacacatcaggtacttatactaaggtgatttctatatattacagtattgaatcaccacaacaatccagtgacgtaggtatcattacatattattatccccaattaagacattagggaaatgaaacgtaggaagattcagagaaagcacaggaaggtgaatatgcccaagatttcacattaagtaaatggaatgcaggattcaaatttacccctgtctgaatctaaatctcattctctttccatggcatcattctctctcctctctaggcctttatagaggaaatataggcccaaataaaatatcaaaatctcaggatgggatgacaggcttgattaagaaacccagtcaccaagaccacgcagtaagaaatgaaaaagaaaaaaaataataaaatgctgagaaccatagtctgcaaagtgaaaggaagaatacctgggagagctagagtgacctccacatgcaaatacaccctgcagacaggaacagtcttgatgggaagagcaaactccctaaatggtcggttgtaactttcctactagttgaaaagtcaggaaaagccttgtgtgctaactctctggacaagcgcacaagaatccagggttgtgacttcaaaaaaaaatatgctgacaagtcagagctggcagaacaagaggaggtcgagttgatgagaaaagagagagagagagagagagagagagagagagcgctgtaatcaaggagaaccaactgaagctggagggaagcagaaagaatagccaggctggttcaggaggcagttctggtacctctgaccccattgcccacccccagtaggcagcatgaaatatgccagaggtcaacaattttttttttttttgtattttttagacagagtctcactctgtcacccaggctggagtgcagtggtgcaatctcagctcactgcagcctctgcctcctgggttcaagcaattctcctgcctcagcctcccaagtagctgggaatacgtgcccaccaccaagcccagctaatttttgtattttcagtagagaaggggtttcgccatgtttggccaggctggcctcaaattcctgaactcaggtgatccaccggccaaggcctcccaatgtgctgggattacagttgtgagtcaccgcacccgacccagaggtcaacagcttctgccctagatcagaagtttactcactttgctcactcggtataaatcaaggaccctctcatacctgggaatgagttttgtattccagcctagaagtagagccagtcccagtttgaactttttgcctttctgtactcccagttcttacccttttgctgagcctaggacacatgcaaggcctgcccttcttaatccagatttttgagtcttaatcccaatttttcctatagtttcccatacactccatggcagcttagagtaggctgaaaactgctgaactgtttaagacttaatccttcagagtaacatggcagaagtagcacacttttttaacataaagctgttcaggactctattacagaagaggctatacttccttaattacattctattctacagccacctcaaaataactagtgaacacgttcaaccaggatcattggcaacagccaatgggcacagtgatctggaaatggtctagccaagctgtttgggctgtagaccatggcattcctaagagcaaaataggcaaggagtccattaatatttcacttgacttatgtcaccatggaaacccctggagtagtgaatggctttggggagtggtcagattcaaccaaaaataacagaaatctctgtcccccaggtaaaggattcctactttgtgtgtgtctgtgtgtgcacacaggcacactcgagagacttttggcattctttgaagtcactggag

SEQ ID NO: 1239 - DNA, 2100 bp, Homo sapiens
  misc_feature (1)..(2100): DMR7:144924601
gtgtagaacacagggcagtgaaagaaatgagatggtgtttggttcaacgtccctgaaaggaaaatcactggtaggttggttccttgtgaccctgaaatattgttcacttaaaactgattctttcatttcaataagcccaaggatgattcttttagactagagaaagaaaagtgttcatttttcttttatgaatcagtaactcactgaaactaaatcaattttgcatcacaaacaagcaaaagtaacttatttgatatttaagatacaatacaaatatatgtactatctgatcagttaaaatgacatactgtggaaagttacaaaagtgatagagaagggagaaaggaaaggaaaaagttaaagatacgaagaaagggaggaaaaatgtaaaggggaaggaaaagaggatacacaaggaaaaggagagagagacaaaaaagagggcttcagaaaattgtaataaacatgcgtgtgcaagtatccttttcaaataatgacttcttttcctctgggtagatacccagtaatgggattgctggatcaaatggtggctctacttttagttccttaaggaatctccacactgtgtaccctaatagcttatggaaaaaaaaatcttaaaactcatcacacacacagaaaagaaaattgtaataataattacaagcataatttctaagttacttcctttggaagaattttcaccttgatcatttgttttccatgctagaacaggagttttttttttttttaacaattaaaaatttttattttattttaaattgtcaatttatatattttttttactttaagttctgggataatgtgctgaacgtgcaggtttgttacatagattatacgtgtgtgatggtggtttgctgtgcctatcaagctgtcatctaggttttaagccccgcctgtattaggtatttgtcctaatgctcttcctcccctttccctctatcccccaacaggccccggtgtgtgacgttccccttcctgtgtccatgtgttcttattgttcagctctcacttatgagtgagaacatgcagagtttggttttctagaacaggggttcttattcgcattttacagaggagaaaattcatcaagtcagtagcacaactggagttgagatccttgtctctttatttccagtcctctctgctgatatggtgtttaatggatgtaaatgacacttgttctgcagttcccttggtttgaatgtctccgagtaagttgtcacctgttatttctactctttgaaattctgattacagtgcctctggtggcatagagccacatcttacatgagaaaacagcttgtcagtttttatttccaaacctttaagtttatttttgaaataaatgtttacttccccatgggcttctgaatcttttgcaggtgtgtgaaggaatgattcgggctttagcaaattgctttggaacattaaagatatctctcaatttactagctatcacctgtagtcccattggcatagaaaactgtcagattgttttattttattctttcagtggtcagattgttttcattatagaaaagtaaaaagtttacatttataattggagtctatttgctttgagatgaaatatttttttccctttacgtatttaaaaaatctaagccagaggtcatattcaaaaatttaataagaagtgtggagggggaaacaccgattggaataaatgcccatccctaccggcatatgggctaaaaatatccactcttttctaattcctattgggaataatacagaaatctcaaatcctaggtactctccattaagaaaatccttcaggctgggcacggtggctcacgcctgtaatctcagcactttgggaggctgaggtgggcggatcacgaggtcaggagatggagaccatcctggctaacacagtgaaaccccgtctctactaaaaaatacaaaaaattagccgggcgtggtggcgggcgcctatagtcccagctacttgggaggctgaggcaggagaatggcgtgaacctgggaggcggagcttgcagtgagccgaggttgtaccacttcactccagcctgggggagagccaggctctgtctc

SEQ ID NO: 1240 - DNA, 2400 bp, Homo sapiens
  misc_feature (1)..(2400): DMR7:147552101
aaggagttctgattcttgatctaaaagtcttcccactgtgtccttctatggccttcagttttgggcggtgtattttgtttgttttttatttgagttatatgcgagtttaaacacaattctttctgctatgggaaacggcctgtttcattttcaaattttgaagctcacattttttaatggtttattttttcattaaatttaaaaggctttatttaacaattaaaaatcagtcctattgcctcattcattgaattccataaattacagtaaaacattttaaagctgtaaattagtatacaaacgtagctatctttttattatttgaatcatagaatgactttaaatgactaaagtttgcatttagaattaacactttttaatttaaaaatctgatttttcatttaactgtgatttgtttagctaaaaacaaatggagaatttgaatttctttactccattttactttcctcaacacacacacacacacacacacacacacacacacacagagatataaataagaaaaatctacacttccaagagtcatttccttagtgaatcacatccctcacttttctccacactgtccttcaacaatgagaataaaatacgccttcttcctccataatatcagtagaaacaattcagcacaatgtttaaacaagtgttaggaccctgtagccagaattcctgtgttcaaatcctggctctgcctttttctaggtgagcaatcctagacaagttaactattaaataattgctttgagcagatggcagtgacagagcccttgaagaatagctctctctccaggccagcagaagaaaaatgacagtgcaagacacaggataggacagtcaagaggcaaaaagaaatacaagctaagggcacagaaatgaagagaagaatgtttccatgaggagtcagccaacaatgacaatgtctactaaactcctagagaatgagaacgtagtgaaagcccagggtaggtatcagtgacattcttgaaggtgagacagcagtgataacattctgacttgaggggctaaggtgtaagtggtgaagaagcaggagttcccctagattggacagggaaacgggactagcatgtagcacgtgtctacctgcccttgaatctaagatcgcagagaccagtgcagatgaatagagaagatgcagccaatggaaaaaagagaggaggtaaatggagaaaaccattaaatgatctcaggacaagcatggaatcacatggttctggggaggaagtgtaaggaaagtccttctcttgtcttccttgcaacctcctattcatcctataagacttagcataaaaccacttcacaaataaagtatttccaaactgtcctaaatcaacttatccagtttatttttctaaagtctctgagtactttgttttataatcttttataacatctaacaaattatatatattatttagttaacatgcctgccccatgtattacatagcaaattccccagagctaggatttatgacttttttacttttttcttcctagggcaaggtatagtgttagatactactaccacattagtaggtgttcctaaaataattagcaataagaaaggggctgaggtggtggtttgcgcctgtaatcccagcactttgggagggccaaggtcaggtgtaagagaccagtctggccaacatggtgaaaccctgtctctactaaaagcacaaaaattagccaggcatgctggcgcgtgcctgtaatcccagctaccaaggcaggagaatcgcttgaacccgggaggtggaggtttcagtgagccgagatcgcgtcattgcactccagcctaggcgacgagcaaaactctatctcaaaagaaaagaaaaaaaaggaaatgagagagagaaggttagagatgggaatggagactcaggagatgcagcaacataagcaacctctataggatctgagcaagatgaactggatgctaagcttcttcgtccagacccattaaattgaggaagcgtgtttgtagcatgcctgttggattttgtaggctttctctccttcttagagttttctataacctaatagtaaccctgaataaaatacaagtagagttgtttaggtttagtcatgtaatacaggaaaatttgatatattgtggagtgcaggtcaaagaataccaagaatggatattgaagtctccaggaaatatggcaatcacagtgatacaggggcaaagagtcctggttttgtgactggcattgcaatagtatggattatttttttttttctttgaaacagtgccttgaagccaatttatagagggatttgggaaggatcaaacaaaagaaaaaatgggctgggtatggggaagggagagagtagaaatgaaataataaatgtaga

SEQ ID NO: 1241 - DNA, 100 bp, Homo sapiens
  misc_feature (1)..(100): DMR7:147747801
tacaatattatgacccttttctaatcagtctgggacaacttaaagtctgcagtggctttaaggagatttccttgagagcaattaattactgtgttgagcc

SEQ ID NO: 1242 - DNA, 1100 bp, Homo sapiens
  misc_feature (1)..(1100): DMR7:148527001
tctgtcaatcaactgtcgatcagggaatctttgaaccacccatgacctggaagtccctgcatcaagacgtcccatctctccaggccaaaccaatgtaaactttacatgtatttgatgtgggcaggcaggcgagcctggaaattggggcttagcccagcagcgttcttggcttcacccaggaaagaattcaaggggaagctggtagtgttaggcagcaatctttttttttttttttttttgagacagttttgctttgtcacccaggctggagtgcagtggcgtgatctcagctcactgcaagctccacctcccagcttcacgccattctcctgcctcagcctcccgagtagctgggactacaggtgcctgccaccatgcccagctaattttttgtatttttagtagagatggggtttcaccgtgttagccaggatggtctcgatctcctgatctcatgatccacccgcctcagcctcccaaagtgctgggattacaggcgtgagccaccgcgcccagccgacagcaatcttttattgaaccagagctgctctttgtggatgaggtctaactcctatacagcgtgctcagagtagcagatcatgggatgttggcagctgtacttatgcccacttttaattacatgcaaattaaagggtggattattcagaaatctctagaaaaggggcggtaacttctgggtcattgccctggcatttgcaaacagtcatgatgctagtgggagtgtcttatgctaatgagcagcaagggcaatgagtggttgccttcagtgccgcctgctggttcctacttcacttcagttgggcgccatctgctggttgttgccagtttctttacttcatcctgtcagacccgctagtctcctacctcatattgattgatgtctgcctgtaacctctgtccccttaaaatgcataaaatcgaactgtaacccaaacaccttgggcatatgttctcgggacctcctggggctgtgtcatgggtcatggtcctcacatttggctaggaatcaattttttcaaatattttacaaagtttggcttttttcatcaacaatttttattttaatcccttttgaatca

SEQ ID NO: 1243 - DNA, 3200 bp, Homo sapiens
  misc_feature (1)..(3200): DMR7:148615901
tttctggggttttttctagatggagtttcactcttgtcgcccaggctggagtgcaatggtgcgatctcggctccctgcaacctctgcctcccgggttcaagcgattctcctgcctcagcctcccgagtagctgagattacaggtgcctgccaccacgtccagctaatttttgtatttttagtggagatggggtttcactatgttggccaggctggtctcgaactcctgacctcaaatcatttggaaaccaccatattgagtgtgcaggaggggaaatcctaccagtttgaaatgcagtttggccgcttctttactctgtgataatattgtgtttgtcagcaagggttccctagcaaggtaccacagagcggggttgggggacgggcttaaccaacagaggcacatatcctcacagttctgaaggatagaaatcagagaccagggcatgggcagagccttctgaggctctttgacttgtataaggccattctccctgcgtcctcacatggtcgtccctctgtgcatgtctgtgtcctaatctcttcttcatatgaagacaccagtcacactggattagggtctactcaaatgacctcatgttaacttaattacctttttaaaggccctatctccaaatacagttgcattctgaggttctaggggtcaggacttcagtatatgaattttggggagacaattcaactgataacaattgtattagtctgttctcacactgctacaaagaaatccccaagactgggtaatttataaaggaaagaggtttaattgactctcacagttccgcatggctggggaggcctcaggaagcttacagtcgtggcggaaggggaagcagggaccttcttcacaaggcgacaggagagagagggcatgcaaaaacgaggaagtgccacactttaaaactgtcagcggtcatgagaactcactatcatgagaacagcatgggggaatcgcccccatgatccaatctccaccctccctcaacacacgggaattacagatccctccctcaacacacgggaattacagatccctccctcaacacacgggaattacagatccctccctcaacacacgggaattacagatccctccctcagcacacgggaattacagatccctcccgcagcacacgggaattacagatccctccctcagcacacgggaattacagatccctccctcagcacacgggaattacagatccctccctcagcacatgggaattacagatccctccctcagcacatgggaattacagatccctccctcaacatgtggggattacaattagaggtgagatttgggtggggacagagagccaaaccattatcaactgtgaaaacattatgtaataataataacaacaacttccagagatagctgtgttgcaggcactgtcttaagttcttacatgtatcatttcattaatcttctaggacaacagtcctaaaagagaggtcctattttacagatgaggagcccaaaaacgagcttagggtcacacacagctagaatgtgggacttgaacccaggcaagctcaaggctcttggtcaatccatggaaggagagaaaggaaaaagaagggaggagggaggaagaagggaaggataccagggaccacagtagtgaaaggctgggtttcctgctactacagtgggtagggctcaaacaaccaaatagaaaaattttttaaaaattctaaccacactcaccaaccctaaattagtaaactattttttatgcatgtccttatgtcctagaaaatggagtcaaactggtttttgttgtgatagtagtttttgagacagagtctcgctctgtcgccctgctggagtgcaatggctctatctcagctcactacaacctccgcctcccaggctcaagtgattcttctgcctcagcctccagggtagctgggattacaggcgcacaccagcacgcccagctaagttttgtgtttttagtagagacagggtttcgccatgttggccaggctggtctcaaactcccaacctcagatgatccgcccgccttggcctcccaaagtgctgggattacagatgtgagccacaatgcctgacctactgcaaactgttttataactagcttttcacttaacaagatgtcagtttacttccatgccattcctttgaaacatattatttagtggctgcattgtattctgctgtatgggtgcaccattatgtagccaatccacattcactggacatttgtgttctttccaattgtgttagtccattctcacactgcttataaagacatactcaagactgagtaatttataaaggaaagaggtttaattgactcacagctcagcagggctgggaaggcgtcaggaaacttacaatcacggtggaaggggaaacaaacacgtccttcttcacatggtggcaggaaggagaagtgccgagcaaaaggggggaaaaccccttataaaacctcagatatcgtcagaactcactatcaggagagcaggatcggggaagccgatctcatgattcagttgtctccacctagtccctcccacaacacgtggggattatgggaactacaattcaagatgagattttggtggggacagagccaaaccatatcaccaaagaacatcattgtatttcagatctttaaagtatctacaatgctgatttccttacaataagttcctagatgtagacttttgggatctctgagaatgcagatgtctaaggtttttgctgttgttgaaacctctacctgcagtgggtacgatgggaaaaagatttttaggatggaagaaattagcatatttaatcgctcaagtcaataaggtgaagaggtagagatgaaagatacagaaggaagcagggcacactggctcacacctgtaatcccagcactttggtaggccaaggcgggcagatcacttgagctcaggagtttgagaacaacctgggcaacacggtgaaaccctctctagtaaaaatgcaaaaattagccgggcatggttgtgggcacctgtagcccagctactcaggaagctgagatgggaggatctcttgagcccagaagatccaggctgcagtaagccaagagtgcaccaatgcgctcccgtctgggtgttaggagtgagaccctgtctcaaaaagaagaaagaaagaaagaaagaaagatacag

SEQ ID NO: 1244 - DNA, 1100 bp, Homo sapiens
  misc_feature (1)..(1100): DMR7:148810901
aaaaaaaaaaaaaaaaaaaaaatttgggtgagctggttccaaactgaagctaggcctatgatttttcggtaacactgtcgacaatttaaaaggtgaataactaatgacgttgttgtttctaggtccttatcaactaggttgtggattaagcaggccactctatggtaaagctcttgttctccctgttgtccctagacgagaaaaactaaatgtggctagaaccaagcaatcctgttttgttttgctttttttcccctctgagacagggtctcactttgtcgcccaggccggagtgcagtggcacaaacatggctcactgcagcctcaacctcccaggctcttccaggctcaagcgatcttcctgcctcagctcccaagtagctgggactacaagtatgcaccaccacgcccggctaatttttgcattttttgtagcaatggggtcttgccatgttgcccatgctggtctccaactcctgagctcaagcaatccacctgcctcggcctcccaaagtgctgggattgcaggagtcggccaccgcgcccagcacaatccagttactaagcatgcaaatccacaaacatgcagaagtccaggctgaaaaggcagtttatggcaattcatttccaatcaaacccacagacttacctaataaaatcaatctaaaataaagtaaagttagtatatacaatgccacctgaatacaggttatcagtgccttacctctccacagtattctgagatgaattcatttttctgcacaggatctttgataaaaatcccccagcctgccacgtcagatggtgccagcaatagatgctagagaataaaacacaatcacatcatcaaaaaaggagggtgaaaatggactggggacaaagtagactacagaatgaaaacaaaagctatcactgtaaatcctcagacctgtttgttctaaggcagtaattgggcacacagcttcagtcaacgtgaaagctgctgagaatggctatgaacattatgttttccttatacagcagataagaatctctgtcttacagaaaaccttttggtggtgttggtcctctgcaatgaccatcgttcagcaaggtgctct

SEQ ID NO: 1245 - DNA, 1800 bp, Homo sapiens
  misc_feature (1)..(1800): DMR7:150450501
gaagcagcgttggtctgtcaggcttggagttccccgggttgtgggttttagggaagggaagggaagcgaggaaggacttgtgagaggaagtcctaaaggccacttaagggcacacagaggcccggagctggctttgctcagagcttgtagcggcgccacaatctctgtcctctcaggaacaggaactggcttgacgtccttttcctgccctatccaagcccctgttcttgcagcccttctgaagctcagcctggcaccggccccggcgccccagcccctggccaagcctctgctgtcatttctcctccctcctctcagtctgcagctgcgggacgggccgggctcctcagtttctgctgtgttgtgaccccacgaggcgctcagcacccagggaaggcgcgtgtgtccccgatgctggctcctccctgagccccgacggctctcgaggttctgagcctgtggcctgcacagggaacttcctctccgactgcatttatgcctctgtggatgtgaaggctatttctagaaatctcttcctttgcagaaacacccgaaaccctcctgccaggaagaccagggcctgggaagagggtcgctctccggccattctcccctcaccctcctcaccttcctcacatcctgtgccctgggggaccagcagctgcttccacccaggtgagagatggagggatagagccaggtggattgcggagcctcggagactgtgggacgccgtgggaccccatgggacacgaccgcagtgcatgtgtgacatgtgcactcgtgtgtagatgtgtgtgcactggtgcatggctgtgggggaggatgggcttggcaccgggaaggcagcctgctcagccatgggagaggaggctgggttgaatggcagggttgaatggcagagttgaatggcaggggccctgggaagctttcctcctggtccaaagcgtgtctccccagcctgctggggagtagattcggcaggatggggacagaggcatattcccagacatctatgagagtggctgtcctaaaagaaggcgtgtcggggagtgggtgtgagccctgaagaggaggagggctgagactggcagaagggaggaagaagcaggcggaagcagccggtcagatgccccatgaagctagatggtgccgcagagcagcccccaggaggaagccagcggagctcctcccgcaaagcagggggtgggggatgctgatttttccacgtctgcttttctgatctttcctgccccttgcacagttaggattctgtgaactgggcattggagggattggaggggtcaagaccttaccaaaagcaatatttctgatttcacctacatttcagccaacctggtcctcagcagttaacctcttcccttcctcttgatggttgccctgctgggctgggtctaaggtcttccccacgctgggctctggaggcatctccaaccaccctgctctgtaagtgggaactgcgattagatgtgggatgaatccccgcatggctggatgctgtgctcagatgcctgagtccacgtttgccttgggctgtttcctgagaaggaggcagaggctgcctttacagtcttcagtgaattataggaagaacgctctctttttctctcagttgctctgctggggtctccagagtggcctgggaaattgagcagagggaaatgtgggctggcagagcgtgagtgagggtgagtttgggtacctttttgtccttaagtgcactttctacatgttggggtgaagtgctactggctgggaagctgtatgtgtggtaggagt

SEQ ID NO: 1246 - DNA, 1300 bp, Homo sapiens
  misc_feature (1)..(1300): DMR7:151385901
tctgtaaattcccctagactaaacaccacccagccaagagcactcccagccagcacctctggtcagcagtcacggacgagaaggccagggcgggcaggcgggctccacagctgcagtgacctggcgcgatggcacaggagacaggcgcaggcttcatgccccagagaggcctcctgccactactgctagggcccaggaaccaggagtcagaagcgggtcaggcacacagggcatttctcctgtggtcggcaggcagtgggcccaccggcaggcagtcagttcacgctggccactggcatcccgaacacgtccctcctaaccttcccctcacgaccacgctctgggccactttccactgccggttccccatattatctccctgttcaaatcccagaggacagagcttccacgacccgggccacagcccaggtcaaaggagttaactggccttgggccaatcactgtgcccagagaaggcagtggaaccacgaggagcacaatgtggcctctgggaggcagaggctgcaggtgcttcctgtggacagtcacctgccctctctcaggccctgccctgaagtcctgctggggttacggtgggccccagcccaggcagcctccctaactggatggtcccctccccaaggacagggatactgcctacctgcccgtgtcagctttggcagggttccagaacattcctgcactcagacctcagccatctgcaccacccaggagcacagttcctgccagtaatgcgggcaccagcaggaaggacaaatggaccttcctgagcctgccgggcacacagtcagctgcttacagtcttcaacagcccctctgcttcctgagaaagaccacccctcctgcctcaggctcggaggccctgcagggcccagcttccctggccctatatcctggtttccactccacacacctgtgtccacactgctgccccaggacctctgggcacgtgccttcctcccaggtttcctacaagtcctccctgcccagaaagcccttgtactgtgatcctcccttttccttcatcggcaagtggaagcccaggatccttcttcgcaccgcccccagggcactgtgtctgtgtcccggaggctgggctgaccaccaccagcgcagcgtttcctggccatctccccaacacatggtcagctccagagccagccaggctccctgtgcttgcgtcccagacagtcacagagcctctcaggctctaataagaggagtgggcaagggtggaatgtttgagactgagacctccaaggactggccagctttgcag

SEQ ID NO: 1247 - DNA, 2300 bp, Homo sapiens
  misc_feature (1)..(2300): DMR7:153320901
acgagtgaatcaatcttgttttgctgtttcatacgctagtgtttggctctcctgctgacatattagggcagggcttagtggaaatgggcaatgaatgcatgcgctctctctcttcctctctctctctctctcttcctttctctctctctctctcttcctctctctctctctctctctttaaggtcaagtgtggaaaagaaaactaggagtctttcaatgaactttagaggctagactaaaggcaacttgccctttagctagatggttttggcccgcctgatatcttagcttctgggcagaggaagtctctgatcctgctctgcacgttgcagagatggccaccaggaatctggtcatgtcacgccggccaagtctcgaggccctgcaagcaagcattggccaggaagcgaacgtgaatcgaccccattcccgttaatgtgtaatctagattgggggattagaccaacacacatatgaaattgcaaataacactaaaggtcacacgagaccagaggcaaagccgggcaggaggtgtctgagaagctcagacctgcagagtgaactcgagttgggtcctagaagggcatgcccaaatggagatctttatctgcctcttctgcttgacaaggacagtccctaacaacttcatggccccccacccaaatgctgggttatcttccactcttgacacaaagtactccacttcaggactcagtgaccttcctgagggttcttcacctgctgatcctccattcatccgatggtgtctcaggatgcttcgtctttcctcttctccctcaaaaacacctctattttgttctgttgtatagccttctgtctgctaggtgataatgggataaaaataatccatatgcaatagttaaagttacttcttccagggggtgtaacgcctcaacccagcgagaatgctctgaagcaggtgcctccagccattgggaagtggggaaatgactgctttggaacccttcaagccctcgcatgtgggtgtgagccccccacccaggaatgccatgccttcccgagacttcaagatctctgtcctgaaggctattctgagcccatgctctctcctcacatccagacttggctgtgtctgccagggcagtggtataggaaccccctttaatcacacttcggaaagtacatacctatctgaatattttacatttgatccccaaaatttcaaaggaagaatttttttcattgacagttgggggaaatgaggctgtgaggaggagtgacttgcccaaggtcaacggtaacagaacagagcctaggactcgggcgccccgacactcagcacagcgtttttcttgctccgtgctgtgttccaaaggtatggctcaagtgtgtttgatttttccagatatctaggtatgaagctctgaaacacagacaggagagggtcaagctctggtgaatgggccaagtgtggtagttattccagtgtcatttactggaagagccagaagtccacttcttggggtagtaatgagtgacagccaatgtttggtgctttattaaaatttagtaaacccattctccatatatttgtttaattacttccactttacaaatgaaattgtggtttaaaggcaccaagtcacgtgttcagattgagtctactggtcttatgcggccaggttttctgacccgtttctgattctgacatgcaatgctccctgtctggcttggatgacaaaggaaaaaaggaattcaaatgataacagcacgtccatgtaatatgtaattactacatcttttagaaatttaaaatcatatataggaaaagccattatacatgtttgtcaggtgagtctggtattaataccacagtgcatctccatacttaagcatagttggttgctttgaaaatgtggcaaatacaccaagaattactttctgggtcagtgagggtggcctcctcacctgagaaggatcgatgcatttagaggcagtgcataagaaaacctgggcagtgtatacagaggcccttgtcttggtgtagatatttagacatttcagggacttttgttttgtttcgttttcccactcattcagcaaacttgattgagcgtttcatccgggcagacgctgagctaaaggacacaagatgagcagcagcctcttgctctcccagactgcgtgtcatttggagaacatattagactactcccacgctgccacagagccctgcacagtgttggggaggccacttctcaggggactcactgaggagggaaaggaatgaagcgcaaatccaaatagcctcaggcatc

SEQ ID NO: 1248 - DNA, 2500 bp, Homo sapiens
  misc_feature (1)..(2500): DMR7:155340901
ggctgagcactcctctgccgtatagcgtgggtcgggtcccgtggctgagcactcctctgctgcacagcgtgggttgggtcccgtggctgagcacccctctgccatgcagatggaccacatggggttcatctcaccagtattttaggctacccttgtctgctggcttcttcctcacagcctaaaagtatgtttaggtctcttccatgtattagcacacataaaaatccacaaaacagcaaaataggggcctgagacccacccactttgacatggtgaaaaccaagagcctgcgaaccacctgctttgacacagtgaaaaccaagagcctgagacccacctgctttgacacagtgaaaaccaagagcctgagacccacctgctgtgacacagtgaaaaccaagagcctgagacccacctgctgtgacacagtgaaaaccaagagcctgagacccacctgctgtgacacagtgaaaaccaagagcctgagacccacctgctgtgacacagtgaaaaccaagagcctgagacccacctgctgtgacacagtgaaaaccaagagcctgagacccacctgctgtgacacagtgaaaaccaagagcctgagatccacctgctgtgacacagtgaaaaccaagagcctgagacccacctgctgtgacacagtgaaaaccaagagcctgagacccacctgctgtgacacagtgaaaaccaagagcctgagacccacctgctgtgacgtggtgaaagagctttcaaacactccctagcaacgcaccacatgcagggggctcagacatcacaaacgtatctcctctcagttctggaggctggaagtccaagatcaaggttgggcagggctgttttctcccgaggcctctctctgtggcttgcagtcagatgccatctccctgggtcctcacatggtcatgcctctgtgtgtctgtgtccttatctcctcttcttctaaggacaccagtcctatgggattagggtccaccccagtgaacccatttgaccttaatttcctcttgaatggctctagctccaaatacagccacattctgtggcctccccccggggcttgcagacagctatttttaccttcccgcagggctctccctgtgggtgtctgtgtccaatgtcccccatgtttaaggacaccagtcatactggactagggctcaccctaacaacttcatcttaacttgatgacctctgtaaagaccctatctccctataaggtcaccttctgaggtcttaggggttaggacttcatcctttggatttatggagacacaattcagcccctaacatcttggaaattctaacccacttaacccattctcttccctggaagttcaatattgttttgatgtttatgtgtaacattgctttaaaaactctgtctcttgatcacaacaagaaacaccaatggtctgcgtggctgtggtttccccggctcccttgtgtggctgtgggtccccagctcccttgctccgagatgtctctgttttgctttatgcagtttccttcaagcccagcatttcgtcctaggggcctcccatggactgaatgttggcgaggccccaaaattcccatgctggagcctcaaaccccggtatggctgtacgtgaagtaaggcagccattaaggttacacgaggccataagggtgggccctgatcccacgagattagtgctctcataacaagggacaccagagagctcgctcattctctcctccgatgctggcaccaagaaaggccactgaggagggcagggcaagaaggtggccttctgtgagcctggaagaggggcctcgcgagagcccagccatgctggcacccacccctcaggcctccaacctccagagcctgaggaataagtgtctgtggttcaagccacccagtctgcggtattttgtgaggcagcgggagaaagctatggagggctgttattttgttcgtatcatctttcgtgatgtgaaagctctctgtacttttaaagtagtaaccttgacatttttctaaaccattctttaccatctgcctctttaatatttgttagcaagagctccccaacccccactgcccaatatagttcaaatatcttcactttcctctacttctttctcactccccacttccaaattcctggtatgttgatagatttttgaatcatgcatcacctctttccacaaactttgtgattctgcattcagtttacaagcttggttttctgttgttctgttttaactatttctactttagtaaccctactgatttcttttgtttaactcatctttgaacaccaataactctgtacgatctgtcttgcttaacccactcagaacatgcacttcacgcagccagatcacagcaactactggggtttcacctggcataatccaagcctgaggggccactgtagctctccccactgcggtcctaacagatggaaggggacctggtctccctcgtgcgatctgaacttgtagtgta

SEQ ID NO: 1249 - DNA, 2700 bp, Homo sapiens
  misc_feature (1)..(2700): DMR7:155677001
cagcctctcgaatgaaatttgtctctcattgaattattaatttttaaagctttcctgaagttttatttactgagttggacagccaaactgaggtttgtctgtggtaggcctggctcatagctctcactttcataatggcatttcctttcagtctcagaactggccctgtgtggatgacagattatatggtcacctaacggaaacttcattttctttttttctttttttttttttttgagatggagtttcgttcttgtttcccaggctggagtgcattggctcactgcaacctccactttccgatttcaagcaattctcctgcctcagcctcccgagtagctgggactacaggcgcccctcaccacgcctggctaattttttgtacttttagtagagtcagggtttcaccatgttggccaggttggtcttgaactcctgacctcaagtgatccatctgccttggcctcccaaagtgttgggattacaggcatgagccactgcgcccagccagaaacttcattttctgtcagttaagcagtccgttttgttatcacacatatctgttctcccttctgcaaataaactgagtatgtatcctgtgttattttatttttatcttattgtggtgtcagtgattaggttgagtcctgtgcgactaagaagtgctaataagattatttttggctatcagaaatactgtaataaagtatacaggtaagtttttataaggtgtaactaccagaaaaagactgcttgtttgttcacctttaagaagaaaagcaagttgatttttctgtctttactttttaagaatgaatatgtgtgaatgacagtgtgtgtgtggctttgactggctttcgtgaagggagtagtaatttacatataccatttatacatataagtaattttaaaaagggaggaacgtgtgaagtagtgtgaataagtagtgagacagtgtgaataacacccccccaacctaatctaagatgctcaaatatatataacctaagaaaacctggaactcttgacagaatagctaggctctctctccttataggtaggagtaccatcaagaacaggagtggggaactgagctgctaacatttattttcatacgtgatctgtactggaaaaaccaaagttttatagtctcatttcaatttaatgattcagttatttaaatcttatttctaaaattacactttttgtgttgtttaaaaaatctttaggttttggatattagcatgttaaatttagtagtaccttaaggatatctttctttttttgtgtattataaggaaatattatttgttcgtaagcttccaccaatggacttcttaccttttctcttttgtgtgagaataaatgtgatcgttacacttggtgtttttacatttaacttgcctgggcacctgaagctgagcccaggagggatccacatgccttgtgtgggatttcttgattatccactggtgaccagaaagccttccgggtggcaaacgttttaatataaggctaggaacaattcagtcagtgtaattttgtgctttttaacaagtctttttatggaagtgacacacattaattatatttcttattttaattagaatcagtcggatttgtcagatgaagagctaaatgatgatcttttgcagagtgataatgaagatgaagaaaatttcaggtactcaatattacctcattataaatgttctttatttaactaaattgataggaactgttatttataattataatggaatgtaattgaataatgtagccttatatctttaacacatgattacattctaaatggaatactagtaataactgtagaagccatatggatgttctgtaaacagagcagctgtttaaaataagcagttcttggccaggcgttgtagctcgtgcctataaacccagcactttgggaggctgaggcaggtggatcacttgaggtcaggagtttgagaccagcctggttaacatggtgaaaccctgtctctactaaaaatacaaaaattagccaggcgtagtggcccgcgcctatagtcccagctacttggagggctgaagcaggagaattgcttgatccacagaggtggaggttgcagtgagccgagattgtgccactgcactccagcctgggagacagagtgaaacgccgtcttaaaaaaaaaaaaacaaaaaacaaaaaatcagtaggtctttcatttaatgatccctgtgagttctgttcagtgcaggttatgaagatttagtatggatatatgctgcttttctaaagaattcctctactcggatggagggcagtggcttgggactctcaacaccattgcagttcgatactgctgcatttgtcttcattttagccagttgatttagatcatttactgaattaccattttgggcactttgggaggtgctactttagactctagttgactgatacgatgaatgtctttctgttgacatatagtaagctatattaaaagaggagagacacactggtaggtggaataatagtttttattttatgaggaaacatcgggaaaatgtagacaagctcttgttataaatgtaattaacaaatatatgccatttattattgagccatggatttgtaacagattttctaacataaagtaatttttacaggtaaaaataagttttaaattattctaccagtcagataaattt

SEQ ID NO: 1250 - DNA, 1000 bp, Homo sapiens
  misc_feature (1)..(1000): DMR7:155761401
atatttggtaaaacttactggtgaagctatttgggtctttgtttttctttgtgaatggtttttaattcattgtctttacttcttagagttctattcgtattttctctttcggtcagttttggtacttgtgtctcgttgaatttgctcatttcatgtaaattgtctagtgtgttgatgtaaagttgcttgtaatgttttttaaatttcttagggtccattgcggtgatccctctttgtttccttattttggtaattcatcttctttccttttttcttggtcagtatccttaaaggagcatcaattttttgctgatctcaaaataccaacttttggtttcacagattgtcttttttctgtttaccatgccgttgcttttcgctgtcatctttatcattttccttccttctacttgggtttgatttccttttttgaggacgggggactagcttcttgaggtagaaactcaaatgactgattttagatgtttttcctttttgatgtcattgcttaagttgcagcccctgaattttgatgtgttgtatttttgtttccattcagtttaaatattttttgttcagtgtttgtattatttttatttctcagcctagcttcctaggggttgacccgactgctgcgtagcttagtggccagccagcgcctgggatgagcttgtgctcaggtctctggaccctgcatggccccccatggccagttatctgtgtgtgggttggggcttcccaggcagccatgtggggagagcccatctaggccttctctagcactttccgttctggaatttcctcattaggtttctcagatttctggctggtgtgctgcctgttccaaactgaaccatgaccagaggcccacagacccatgggcttccctgtgcctttccctctgagggtgctgtatggccagtgctgctggggaacttcaggccttactgagtttcggctctgtgctgatggagctgccacacactgcactgtcctcaca

SEQ ID NO: 1251 - DNA, 1100 bp, Homo sapiens
  misc_feature (1)..(1100): DMR7:156451401
tgctttctttgtattatataatcgagttgctttctgttgatgaagaaaaacattactgaaaactgtaagttaattttgaatccagtttcttttctagactttcttatgagtttaataatttatctgttgattctgttaggttttccatatagacaatcatatcatatgaaaaatgatagttgtgtctatctcctattatctttacatctatatctttgtgggttttttttatctttgtgtcttatttcttgggtcggcacgtctgttgaacattaacagggatagcagtcatccatgtcttgattctaatcataaagaaataatcttatatttctctatgaactatgttgcttactgttcatttttgtttatacagacctcacaaggttaaggaaatttctttctattcctagtttctgagaaggttcatcataagtaaatgttgaacttcatcaaatgctttttctgtgtctactgaagtaattatcaattggtacattaatatggtgaattgcttagagaaatttctgatgataaaacagtcttgttttcctgaaatgaaccatgctaaaccatgatgcatttataatgcactgttggattaaggaaactaatattcctttaggatactgcatgcatgtacattagtaaagtaggcttaaagttttcatttcttctaagctcccacacaggatccttggccttgttccctctgcctggaatgttctttcctggtcttcaccgacatggttcctctggacatagaaacctcagcccacatgttctgtccacacagaggcccttcctgaccatccagacccctccttgtcactctcatcacattgtgctggtattttgagtgagaggggaagcgtggtacttatcccagtgcttccttattccttgctgagcttgcccaatacaatataagcaccttgggaacacagacctcctctgtctggtgccatgttgtgtcctcactgcccagaacactttctggaatacaacagactgtcaacaaatattcagttattgaacagatgcagcagcagggacgcaatgcacagacatcgtgcaaagcaaagttacgcagggacagg

SEQ ID NO: 1252 - DNA, 800 bp, Homo sapiens
  misc_feature (1)..(800): DMR7:156976401
ctgcaacctccacctcccaggttcaagcgattctcctgcctcagcctccccagtagctgggactacaggcacgtgccaccacacctggctaatttttgtatttttagtagagtcaaggtttcaccatgttggccaggctggtcttgatctcttgacctcgtgatccacccgccttggcctcccaaagttctgggattacaggcgtgagccactgcgcccggcctgttttttctgttttttctatacacgtgaaaaatgccattggaattttgataggggttgcattgaatctctagatcactgagtagtatggatattttaacaatgttaattattccaatccatgaacatatgatatcttttcatttatttgtgtctactttagtttctttaatcaatgttttatatagttgttagtacacagatcttccacctccgttaaattttttttttttttttgagacagagtcttgctctgttgcccaggctggagtgcagtggcgcaatctcggctcactgcaagctctgcctcccgggttcacgccattctcctgcctcagcttcctgagtagctgggactacaggcgcccgccaccacacctggctaatttttttgtatttctagtagagacagggtttcaccatgttagccaggatggtcttgatatcctgacctcgtgatccgcctgcctcagcctcccaaagtgctgggattacatgtgtgagccaccatgcctggcctcaccccagttaaatttatacttaagtattttgttctttttgatgctattgtaaattta

SEQ ID NO: 1253 - DNA, 1100 bp, Homo sapiens
  misc_feature (1)..(1100): DMR7:158556901
cgtgcaggtcgctcccacgcaggtcaggcggctcccgcgcaggtcactcccacgcaggtcaggtggctcccgcacaggtcaggcggctcccacgcaggtcgctcccacgcaggtcgctcccacgcaggtcagagggctcccgcgcaggtcactcccaggcaggtggctcccgcgcaggtcaggcggctcctgtgcaggtcgctcctgggcaggtcgctcccgcgcagggcaggcggctcccgggcagggcaggcggctcccacgcaggtcaggcggctcccgcgcaggtcaggcggctcccacgcaggtcgctcccacgcaggtcagagggctcccgtgcaggtcactcccaggcaggtggctcccgcgcaggtcaggcggctcctgtgcaggtcgctcctgggcaggtcgctcccgcgcagggcaggcggctcccgcgcaggtcagacggctcccacgcaggtcaggcggctcccacgcagtttaggcagctcccgcgcaggtcaggcagctcccgtgcaggttagacatcttttctgccatcatgggctctgattccccaacctggtgccatggtccactcagtcgcttcttggccctgcaggtacaagccagccagtccacaaaggtcacggccgccgctccgctcaacccgtggctggctgtgctcgggtgtgtttcctcacctctctctctgaagagctgagaacaggcccctcctggcctacgctttctcatcatgtagctgtatttctgggctcacacctttagaacccactgagatttctaaagctcctcctctagtgagcaacctgggatgtttgtgctcaaagaaaacagcgtttccagagcaccatggcgcctagaagtgggctggccaatgtggtcaggaaggaagggtgacttgggaccctcacactgactgtgcatggaaacccccgtggtccactctcctagtgaggcacctcgccctcttcccagcattcccagcagcactattgataaagctctcctggtaaggcacctcgccatcttcccagcagtagctattggttaacttcatagacccccttttaaataattctttgtatttttgtttt

SEQ ID NO: 1254 - DNA, 100 bp, Homo sapiens
  misc_feature (1)..(100): DMR7:158866901
gtttaatatatttatgaggtattacagctttttttgtttgccctaattttcacattccaggaagagttttagtggcttgtccatgaaaagtttccatttt

SEQ ID NO: 1255 - DNA, 300 bp, Homo sapiens
  misc_feature (1)..(300): DMR8:182001
catgtcttttgctggaatgtggatggaccttctattatccttagcaaactaatgcaggaacagaaaaccaaatacagcatactctcagttataagtgggagctaaatgatgagaactaatgaacacaaagaataaaacagaccctggggtctacttgagggtggagggtgagaaaaggaagagaagcagaaaagataactattgggtactaggtttaatacctgggtgatgaaataatctgtacaataaccccctgtgacaccagtttacctatgtaacaaatgcccctaaacttaaaat

SEQ ID NO: 1256 - DNA, 3300 bp, Homo sapiens
  misc_feature (1)..(3300): DMR8:326501
ttaatgaaattgtcatgataggtgggacgtaactttggatttgagttcataatatctcttaaaatcaattagaataataaagtcatatatgtttctggcaagttagtgtgtaaatatctggctctagaacctactgtcagctgaggccaggtgcagtggctcatacctgtaatcccggcactttgggaggctgaggcggatggatcacctgaggtcaggagttggagaccagcctggccaacatggtgaaactgtgtctctactaaaaatacaaaaattagccaggcctgtggcgtgcacatgtagtcccaactacccgggaggatgaggcaagaggattgctctaaggtggaggctgcagtgagccaagatcacgccactgcactacagcctgggcgacaaagcaagactccatctaaaacaaaacaaaacaaaacaaaacaaaacttactgtgagctgaaagaactctggccatcgaacctgcctatgcccatgtccatgtggaccccaccccagggccagcctctccggagccccagacactgcaggacagaaacaggagagcaggaaacagcaggaaaggaaaaggaggagtgagagaagaaaaaaataagggaggaagggagagaaaagaatcagcccaagtctccatgccctgtcccggtgccgtgacggaccagcacttgggcaaggttggagagtggagggtgtgtgctgagcggggcggtgcgggtttagcaggtgagggagctgaccattctcagcccttcctgagtcaccctggagaccaggccgtttaaggacacctcacagctcctctccatggcgacttggcgggaggagccctgccgcagctctgtcttctctgcactcaccagccttttttccctcatagccaaagtcaagcagcttaatgttgacacagctcttccgactttacaagatgcttgtagttttggaaccactttgcctaccccgagggagaaaagcagctaaaaccaacaatggaagcattttattcttgaagacactgagaaaggtggcgaaggcctggctgtggagagaagaaacaaggggcaccctctcctccctcttctgtttctctccacactgtggctcccactaaaacacatttaaagccagttcttgaagggttttctccataactgatgtgtcagttttgtctaacaattcatttttcaaataatcatccatttgggaagtccttttttgtaaaattcacattctaagagaaattttaaaaaacgaaatcctctaaaacacggatatatctacaagaacacagcaccacaagacactatcaggtcccatgactcagccctagataagctcttcgaaataggagggagctcatctgtccaacatctcatcagtttcagtaacaactcccaatccaagcctgtcaattaacgataaaccgctgtttatgtaatgaaacacacagatctttctgacttaccgcttctacatagattcattgtgtttatttatgacttcttcaagaaagacagagattgagtgaggtattgcagtcactgctaaagaaataatcagtatttagcatttggacggcacttcccttgacaaacacctcactacccgtcacttaatttacatttctcactaaagtgccagcgcctttcagaagctagccattgccctgcccccaagtctgtcatcacacttcactgtcagagagaagactctgaaaatggaaagatcccggcatggccccctgtaggatggagctcaggtgctctggtttctgggccccatcaccattgctgaagcagggagttacaacgtaaaatctaatttagaattacattcactatgaagaactgaattattttaattactgagctgatagcctgcttgtgacctgcaatgactgaaggacatttttaaacataagacaaagcagaaaagtcataggcatgtccacgtgtaccctaggaaagagaaactcctcctccaatgaataaatgtaagtgaatagaaataaagttgctttctaattacatcccacagacccagcctgcaagagagaggtccaaaaccagttgccactcaccatataaagagccaacccagggagggagcacatgtgtccctgacctctgtcccaggctggagaacggactgtcccctctgggaaaacctgaccagaccaagagaaaatgctgacggatacagagagctgagagctgccaagggaggctgcgtggcccggtcaccccacagcagccccatgtgaacagatggtcaggagtcaacaggaggatgcaccatgaaggacagagatcaaaacgggaaaaggaaaacagaccaaagacaggtggagagcaggaaggaattccagtaactgtaaatactgtcttcagagagaaaagatacgtcaccactaaagaactggaagtcatgaaaaatgaacagttaaaaaaagaggatctgggaacttaaactctgaaacaatttttaaattccataaaacttgtactagataaagttggtaaacctcacagaaagtaaatcaacaacaaaaagagatctaaaaggtgaaaaataagagaaaaaagtgtaagaaaattggagaagtggtctggaacgttcaacaccagaaataatgggttcaaggaagagacaagataaaagactgagaaaaaaaattatcaatcaaagaattccagaaaatgtcttagtgttttactccatttgtactgctccaacaaaatacaggagactgagtactttataaaaaacagaaatttatctctcacagttctggaggctgggagtccaagataaagcaccagtgggctcagtgtctggcaagggttgggactctgcttcccagatggtagcttgtggctgggccctcacgcggcaggaggtgaaaaggtaaaaaggcaaacccaggccctcagcccttccttaagggcactgatcccactgtgaaggctctgcccttgtgacttaaccacgtccttcaggccccacctctcaatactatcacattggccattaagtgtgaacatatgaatttgaaggtacactttcagaccatagcattcagaatgcaacacgtttccaaatgaaaagagctagcacagagataaaaatgaacctacatcatattgtcctgcaatttcagaaagccaaaaatgaagaaaagaccctgaatgcttcaagataataaagaaaaaagaagtgtatcgcttgaggatgggggacgagattgcgattgagcttctctagaacaacataggaggcaagcg

SEQ ID NO: 1257 - DNA, 1200 bp, Homo sapiens
  misc_feature (1)..(1200): DMR8:1891301
atggggggtattgatgctctttaattcttgttctcctctagaattgaattaagggaaacataactctaaaatgctgtatattaaacattctttgcatgcctaatttgggggtggaaaaaggcaaatgttctttttgaaataaagaagggtcgttctttacttggaaagtacccttgatgctggaggacagaggatcctgtcccgtccccattcccggtgaggacatgaggaaggtcaggctgggccaggcccaggcaccatccgcagctctcccagctcaggcctaggagcctctctgattgtcctccagccctggctttgtccagttgccccatgaccttcatgccagggaccctccctgtgggggctgcattcaggatggatttctcctctatgactttaggtcaggcttctcaggaagagagtgacactcttcctgagcactggaggctccctgtcccaccccttagtgggcatataatttgacgtgtcagattgagctgccagaaagactgacatcacgtgcagtagccatgaaacccagaatattggttttgtttttgtattttaatattatacctattccagatcttttgacctgatactatattagtatcatctcaggactttaaaaaatatacatacataatatatatacacatataaataatacatatacataatataggtacacatatcaataatatatatagtataatatataacatattatatatattacatgtatatatacacaaatacatttttatgtttgacccccacaactgtgactcaggagccttgggagagtgtttgggaatctgaatttcagaagaaagactggcctgggtttgatgatgggaggggttgcttggcctttgggttctaagctctcgtttgaaagggaagcctctgtgctctgacgtttcctgtgaatcagtcagtagcagcagctgcagcttcccagcttctggctctgtgtgtgtgtgtgtgtgtgtgtgtgtgtgtgtgtgtgtgtgtgtgtgtgtttaatcccagcgatacctgtattttttaaatacattagtatttttttaatacatcagtttcttctttgggtattttagaagggttgatttttgtcttttgcgaatagaataatcctttctctaaaaggagtaatctctccattgttaatcaggttttgtaaatcttggttgc

SEQ ID NO: 1258 - DNA, 1300 bp, Homo sapiens
  misc_feature (1)..(1300): DMR8:2089201
gtgaaaaaataagataaaacatgtaatcaaggtttttaaagtaattacaaaagataaaaattaaacaagcagtatataaaatttgggaaagacagagaagttacatggaatgcaattaaaatgagcaataattccaccatataaaatagccacattaacgtgtggtacatatatttatagtctttttctccatagattttaatgctcttgttgtatcatacaatttgcattctgtattagatttcacaaaataacataattcctcttattagactaaagatctttatacaataatttaaatggccatgaggtttttaatctatgaacatatcatcatgtgtctgaccgtattgacagccatttagattgctgtcatttaatcactactgcaagtagctgcaatatggtaataactttaaattgaaatgcgaaccactgagttatgacagaattttatgaatatacttctaaattatctttcattatttgcaggttagttctattttgctaaaactactacctatgtattgattcccttatgttttctatggtttaattatttactttaatggaaaaaaatttattagtaaacatgatcaactttgggtatttgtgacttccttctccaaattggcatcatgtttcataaaactcaaaaaagatgcatgaccatcctttgtgtgcgagacgcagcgggcgcgcctggtggtcctgggatagcgagaacagagcatttcttcctcctccacacgcctctggggacctcgcggttttcactgccagtctcgtttctgtttctctttgtagtccgtggtggggagcggcagctggcagagagtcaacgcccagacggctgtgagatccccgagatatgccgtgtttgacctcatggaagggaagtcttatgtgttccgagtgctgtcagcaaaccggcatggcctgagcgaaccttcggagataacgtcccccattcaggcccaggatgtgaccggtgagctgtcacactgggtggccccaagtcaggatggactaagagtggggtgacaccaaatagccttaaattgtgtgaataaagacattaatgttataaacgagttgaagttcaagtggacttaaaacttcactttacgagagattaagagctctctgccatgttttgtttggttcttgacatttctccaaagctccatcttcttttcatgaaaccagtaagtgagttgaaaaatatgtttaggaaacggtcacttttattgttttatttaaacttttaaaaaaacttttattttaggttcaggggtcc

SEQ ID NO: 1259 - DNA, 1400 bp, Homo sapiens
  misc_feature (1)..(1400): DMR8:2314001
tttttctacctttgtgttctctggctcattatagtttggtatacaaaggcttttgacttttatatgttaattttatgtgtattctcatgatttgtgggaaatatattctacagactcactacaaaccctggattagcaaacaccaaaccattgctcctgagggaaatactaggttagattcctctgagcttttatctcaacgtattcttctactgatcaatacacaagcttgtttaatgtgtttctgttttacttcctgtttattggcaaccagcactctatttattataattattattttattatttttactgtagtcagaacagataacagaagatgtatctttttaacaaatttttaagtgtgcagtacggtatcattaagtgaaagccaaatattgtgcagaagatgtctagaactttttcatcttgcgtaagtgagactttgaagagaacctggaggacatgatggtaagtgaaacggccagtcatagaagaaaaatactgtgtgagttttcctaattgagatatctgaactactcagatttgtggatgcagagaatagaatggtggcttccaaaggctggaggaggaaatggaagttgctgttgaatgtgtatttctgtttaaagacaactgatttaatatctattgttgactccttctctttgaactcatggccaccatcactataactcctgcctgctcgagcaaaagtcttttccataaagcacgtaacagccttcatgtacttagaagcagccgtcagcacttcagtattgattgggggccacttaaacagtgaaatcaccaacatacacactcacacatgcaaaagcagggcactacatccactgtgaaaaggacacgcgtctcaccgtgtggagccttgttcaacctcagctgggcggcttgaggctttctgccctgttcacctgtgtgagtgaccaccagagagccgtggtgtacaatgttattattttatatgtatatagattgtatagtgattaccacaaacaagttaatggggcagcggttgcagaaaacagtctggtggttcctcaaaaaaactgaagatagaactaccatataacctgccagtctcacttctgagtatgtacctaaaagaattcaatcagtgtcttaaagagatattttatatccacgttcatagcaacaccattcgtaacagccagagggtggaagcaacccaggtgtccatcaatggatgaatagatccacatactgtggcatctatgtgcaacagaacaggattcagccttaaaaaggcatctatgtggctgggcgtggtggctcatgcctgtaatcccaggactttgggaggctgaggcggatggatcacctgaggtcaggggcttgagacaagcctggccaacatgg

SEQ ID NO: 1260 - DNA, 500 bp, Homo sapiens
  misc_feature (1)..(500): DMR8:2903401
gtatagaataaatagaatagaaaatataaaatatagaagatcaataaagccaaaactttaagatgatctcgtatataaacgcaattttaacaagcttaaagaaaaggagaaataatattaggaataaaatagaatatacaaaattctacctaaaagtctacaaaaacataatttgctaatatggactgaagaatgagaacatataaatcattttaaaaccctaaaagaaatgagacgttataaactttcccagaaagaaaataccagctcaaagcttttatatgttactaatacctcattgtcgaggagctgatcatatgagtattaataaaatctaacagataataaaaagaggaaacggaagtctaatcatttaatgaggctaccaaaagcttcatatcaaattagagttgtacctaaaaatagagatgatagactgttttcattgtgaacattagtacaaaaatgttaaataatgtattagtaagattaacctagca

SEQ ID NO: 1261 - DNA, 200 bp, Homo sapiens
  misc_feature (1)..(200): DMR8:3442801
ctatatttatgagagatattagtacatagattttttttttgttatgtctgtacctggttttggcctcagaatattataacttcacacattacttgtgaagtattcccccatctattttctgagtatgtgtagaattgctgtcaatttttctttaaacatggttttattaatttaaatcattaaaattgtcctctttctat

SEQ ID NO: 1262 - DNA, 3700 bp, Homo sapiens
  misc_feature (1)..(3700): DMR8:5080301
tagcttcattaacagtgattaaaactaaacctcaatctggcagagttggatggattctcacgtccttctaatgactatagtctaaagcaccccactgggaaagtgagtgcttcctggagcccgtggacacagagggaagagacagcataagatgactcacagtgcatgttgatgtgaaatggagaaaaggtttcaattctagtacggcaggcgggtgcggtttccaaatttgtttgtttaaaaaatgcaacgcctagcctacgtttatttacagagcctaaattcaggtgtaaaaatatcagctgatatagtctggtacattagaacacaccatatagtagataaaaatgtcaataattgctcatgtctttgactggaataatatcttgtatgtagctgcaaaattaattaccactttattcgataaatcattggcaaatcttgattatagtgacaatagtggcttctaaaacttttaaataaattatggggaaatatcctcctgtcctgtaatgtaatatcacctatagtttaaggaaggtagatacagagagattactttcagaaactacattactaataacagaacatgggaattattttctcacgaaaataactgcaaatcaactttcaacctttaaagttttataaacatcataaaagacatgatggaaaaatttgcttccttagtaagtatttctttaaatagataaatgagctgctccgaatgacctctttatttgagaaaagtgatttaatgtggctgttatccaatagtcatcagtgaatttacaactagggatgataactgggattaagagaagtcttaaaaataaacacctccaaggcgcagaaaaaaaaagaaaaacaagaagaaacaggaataaggtaactaaaagaaatttaagaaaatttttataattgcatatgtgtttatcttcaaatatctcagtagttataaaggattcaaaataacatgactattaggaaaaaacatgcggcatgatatttaagatagaagtttttttttcttcttgtccttcgtatcttgcccctaaaaactaatttctagaagtaatatgtcagtaagagtgagcaacttccctgagctgttatcatacaatgtccctcatcatagtcctggtctgctgaatgatcaggttgggaaaacagatgggaaagaaaatcctagcatgtgtgttcgcttttaaatgaaatgctgatttggaaatattactgcttgacccaactgatgccatagctgtagggattaaacagaagtttgtcaaaggaggtagaacttatgactgtctgctcatttgccaattccattatactaatttaaagaagagaaaaaatctgtgtctccctgggatttgtgttcaaacaaactgcaaataaaatagttgctttcgttcaccatagttagaacacttgcttagcttttaaattgtagtcctgtagaccaaaaaaaaaaaaaaaaaaaaacaaacaaaaaaggtaaagtgaaaagagatagacaagaaacaggagtagagaagagagagaaaaaataagagaagttactggtgattaaccttgatctttaatcaaactagagaaaggatagcttaagagaagaagggggcatgcacagcttccaagactgcggggagggcagttagggggccatttttaagcaatagctcttgcaatcatctggtagtcaaaaggtggtaacagttgtagagcagatgatttgtggaggaaggaagtgggacgaggggtggatggtgaatttcaaatggtgcgagacacataggggctggggtgaggcgtgacagaaaggagagaacttccaataaagaaaggagaggggagaaccatgaggtccatgcatggaaaatgaaccagtgaggagacagagacagagcttaatgatgttaggaaatacttagagaaaataactattccaaaatggcgggatccttattctaggcataagtagatgttgagaagtcatgtcctttgaagggaaagattagatttaagggataaatatttgctgcctagaagaaaaacacctaagtccaaatccatagtgtttttctgatagaataagtgtttcttagaagactttattctttctctcggcagtggggagggaattttggtttaagttagagagatgatgacccatgaagcctattctaggaattataaagtcctggattttggagatgttatttgatttaaaaagcaggatggacttatttcatgtgaaagaaagaaaaaatgataaccactgtgtggtcagaaaagcagttcatagctaagaacactctcttaaaatgaaataattttttaaaatctaggaaaccaacattagtttaaagataaaatttaaaatacatgaggagtgactgaggaagatgaaggtataatggtaagctgccaggggaaatacatatactttaacaattttatagtaactctcaagaaacttacgacagctcacgttggttgcctgtaggtcacggaatcggtaatgaagacgatcttttcatcataaactctatgattgtgtggagtgttttggtttaataaaatggccatgggaaacaaccctgaaaggatggaataaatctcccaattttaaagagcaaaatatctatgaccacctacagaatcaagtcacgaaggacgtagaatggatgaaagtgaataggggttaaaaatcaaaaccttgagaaaagctcctaaagagaatgtaaagtaagtcataataaggacagaatgacaggtgcgaatgtgggctatgcctccccatccagtgctcaccttgcaagaaatgagcaatgcatgggagggtaaagaggggagcctctgcgaggaccgtttcaggattaagagagaaagagtgtgaaaacaggcactaacggtgaagaccaagcgaaaaataaagaagcattgtttcctgccagatgtcactgctaaaggagagtgaatagcatgataaatagctgagaaagggaagatctctgaacattaacagtgaggctttgaggacagttctgctcctgacacaattcaaagagccgagatttttcagacagaaagatgcaggctcacattctaaatctgtgcttcttagtggctgaaaatttagcaatgcccctcacttttctcaattttaattttgttactggtaaaatggagatccttgtggctacgcaaaaagattcctgctaaatacccgccttccaggagtttgcaaagattcatttcatgaacatacgtgtaataatcatgcactgtgtttcagtcactgtcttatgtgctgaggttataaaaatgaatatgaccaatgtgtgcttttgtagaatttaatatctggaactggagacaagcagacagtgtttaagatggaagtacactttgggaggccgaggcgggtggatcacgaggtcaggagatcgagaccatcccggctaaaacggtgaaaccccgtctctactaaaaatacaaaaaattagccgggcgtagtggcgggcgcctgtagtcccagctacttgggaggctgaggcaggagaatggcgtgaacccgggaggcggagcttgcagtgagccgagatcgcgccactgcactccagcctgggcgacagagcgagactccgtctcaaaaaaaaaaaaaaaaaaaaaaaaaaaaaaaaaaaaaaaa

SEQ ID NO: 1263 - DNA, 1000 bp, Homo sapiens
  misc_feature (1)..(1000): DMR8:5933101
ttgtcatcataggaggtgacagctccatgtgctattgcccctgaagaccttccagtgggacaagatgtggaggtggaagacagtgacattagtaatcctcaccctgtgtaggctgaggtcaatatgtgtgtttgtgtcttgatatttaacaaaatatttaaaaagttttaaaaaaaattaaacagtagaaacttacagaatatatacaaaaaatatttctgtgcagctatagtgtttgttttagactgttataacaaaaagttttaaaaaaaagtctgtaaagagttacagtaagctggccgggctcagtggctcacacctgtaatcccagcaccttgggaggctgaggtgggtggatcacctgaggtcaggagtttgagaccgccctggccaacacggtgaaaccccttctctaccaaaaatacaaaaattagccagacgtggtggcaggtgcctgtaaccccagctactcaggagactgaggcaggagaatcacttaaacccgggaggtggagtttgcagtgagctgagtgccacagcactccagcctgggtgacagagtgagactctgtcccccaccccaaaaagagagttacagtaagctgtttattattgaagaaagaaaagtgtttttataaatttagggtggcctaagtagatagtgttaatgaagtctgtagtagtgtacggtcacgtcctagaaattaacatccactgacacacagggcaatttacagtcccgcaagctccattcatggtaagtcctatgcaggtgtaccctttttaatcttgtataccatatttttactgtactttttctatatttagatatgcttagatacacaaatagcattgtgttacaactccctacagcattcagtatagtaacatactgtgcatcttttaacctaggagaaataggccagatctatctccctatccctgtatccctctaaccaactaaccacttacccacccaatcattcatccattcctcaat

SEQ ID NO: 1264 - DNA, 2000 bp, Homo sapiens
  misc_feature (1)..(2000): DMR8:6432601
agattctctgttagagggaggatttgatgactttctccaaactgaactacatttcctgtagactagaggagaaataactgtgaatttcacatttcctgaaaatagtaaatgatatttcttcgttacatttcatctcagacaagccatagtttgcccatgcagtgatagatgaacttcttcagtcttacctgattataggtgaacaagtgttcagcagtctctggactccctgtgacatgctaaaatcaagtgtttattgtaaaaacacatcagtagtacatacatattttctttgtaaaacatttagtaaacacagacatctctttgattgccctccctcaatgtaagcagctttcaatttgatgagtatcctaggtggcatttcttcagtacattacacacatgtacacactcacacatgcatgcttgacgtgaaggggctctgctatcttatgtgtatcatttggtgagttgccttctcttccccaattaacaatatggttttgaccatttcatgtcggtagctttgactctactcagttttctgtattgcattatacattgtgactgtttttccggtattcatgtacttttagtcactgtcagtttttgctaagtatattacttaagccacatatttgagtttatttctccaagtcagatatctagagataaaattactgggtaagaatacatacacattttgattttaccagctccaccaatcatatacaagatgacctatttcttggccagatacagtggctcacacctgtaatcccagcacttcagaaggccaaggcgggcaaatcagttgaggccaggagtttgagagcagcctggccaacatggcgaaaccccatctctactaaaaatacaaaaattagcccaacctggtggtgcacacctgtaatcccagctactcaggaggctgaggcaggagaattgcttgaacccaggaggtggaggttgcagtgagcccagatcatgccactgcactccagcctgggcgacagcaaggctctgtctcaaaaaaaaaaaaaaaaaaaaaaaaacctatttcgtgatactctgaccaatattggatgttactaatctttttaatttttcctaatctgaagcattaatgattgcttgtacactttaccactttaattttcatgtctaaaaaccttccctttccttctcttttccaaatgtaattgcaaattaaacccgactcaaggccttattcttttgggtccttgagatggttctgtgcctctgtctcccccctcaccctgtctgctgcctgcctgcccagcttgctgttcctcaagcatgccaatcgtatttctatttcagagccattgcgttatctgttccctctgtctggaacattcttcccccaaaatccttacacatgacccgttttccagcctccctatggctttgtgcagatgttactttctctgtgagacctatcctgccacccgtttataccagcagttccttcccacttgtgccaactatgcaagtctcttttcatctgcagtgctgactggctcctcctaacacactgtagtaatgtgggcagtttgatggaatacagttgctagagaagattcacaggaccccaaaataacaatgtgtccaacctgcaccgtacctgagaaccaggaagcgcaagatggagtgtcttcttgtatactgctgaccctgagtctatatgaaccagccccactggcagagcctccaggcaaatccttcatctcactactcataaacaatgttgacaggccagcacaatctgtccccaaacttcccggacctgtggctataaagcaccactgtctaattagtacattttgtgtcatgcaggtactttagtgaaagcagtgcaggccggttccaagcctgttgaaatgaacctcccaagacacatacaatttacttatttattatgtttatttgctgtcattccttaccagcatacaagctccatgatgacaaggatcttt

SEQ ID NO: 1265 - DNA, 3500 bp, Homo sapiens
  misc_feature (1)..(3500): DMR8:6463301
tcatctccagtatcattagaaccttcctgaaagaactgagatctttgtgagctgcgatagggtactcacagctgtcatttattgagcattgtgacctctttttagattgagttttctatttctcagtcatatggaaagctgaaaagaaagtatatttcagagagctctaatcatgtctttattgcggaggcagtagattgggaattacagctcatttgggtgtagcatccccagagaaggagccttgcagtggaaagaagataaaagggtcccagtggtgggaataaaaagagtactagatgcccagagggtgggaaaggcctagcccagatgcagtgtggccaggccagctaggggcaggaggaaagagagctgcagggacacagatgccttcctgagcagagaaaatagaatacttgagccaattttcatgtaaaatggattattttcctggcgtttcctgtccttcaagtaaaaggttctggaatgagtacttcactgctgtaatggagacactaatattttatgaatgcagttttacagtttgcagtaatgccaggcctttggctgttttccattagatggtgcacttggctggaagcatatactcttgtagctttgattttaaatttaactttcaagttgaaagagcagtgactcatccaaaggacaggtgatatttatttattttttcttgaaaatgcagcacgggtatgttgttatcacacgtttaggggaattgccacacttcctcgaggatgacaccctttgtaaatatccatgtaaatcatttccattgttcagacccgctgtacgcagaaagataggccctttagtgccgaccagccggccagtgagctctgtaagatcgaaggtgcccttggtttccaacacagctgtttcagtgatctgtaattgctttgataaatcacttttggcagagtgtacccagagctggcagtggcggggatgtgctcgttgtaacaggtgtggggtccatcagcagatgttgcttgatgaagccatttaaaaaacagctgcctcttgatagcctaacagttgctttcagcccccattagcacgttgtttttttcttgttatgtatgagagaaaatatttctacagaaaacattaaataggatcttcaaagaactccatctttttaaaaatgtgttttatttgttcactaactgattttgcatgcattgtaaatgtgtggttcagaaattgtcaaatgtgttttggactggacgtggtagaaatgaggaccagccagggtggatctcctgtgcctcagtggtcgtctttggccacgtaaaggtagaggccaccgacggaggacatttcccactgggagacccacaggcgctaagagaggagctagccgaagaagtctatttaagatctgctgctttggccaggtgtggtggctcacgcctataatcccagcactttgggaggccaaggcaggtggatcacctgaggtcaggagtttgagaccagcctggccaacatgggaaaaccctgtgtctactaaaaatacaaaaaattacctgggtgtggtggtacacacctgtagtcccagctactcgggagactaaggcaggacaatcacttgaacccaggaggtagaggttgcagtgagccaagatcatgccacggcattctggcctgggcaacagagaagattccatctcagaaaaaaaaaaaaagaaaaattctgctggtaggcattctatgcactgagcaaaggagagatgtggaggcccaatttaaatagttacagctgctagctcctaaggtctatcttactatctgcaccgtttgcggggagtcagcttaatgatagtaaactgtgctaaatgggtctagaaatatccaattaatctgtttgagatattcggaaactcaatagcttgctgaagtagcaaacttgaatccttatttttattttaaaagggagtaaagggactgtagataagtaaaagatgctctgcactgcgcctctctggtaccagtccctctcgtttaggcagcggccacttcccgcggagctgttcacgccaagtgaccctgccactgcgctgctcccaccaccccatgtccaccccgtcctcggacgcctggtctcagcacatcaccggtattctcttcctcttaccagtaattagtttgagactgtgactcacttctgtccaacaagatgtgaagggaagtcttcctgggaggtttctggaaagcgttctctcacttgtgatagccctgggaagaaatgctccccgggtcctcagagctttgttgtggctggacgcatcttctggaactgcgacagcggaggaggaagccaagagagtgaaccaaaacaaggaagggcggagggcgggggaggcctgcaaaccttacggcttatttccactgacatcagagactcatgttaataagtaacaagcggctttgtttgttatgctcctcagacacgcggtaaggtagacacacagaaatgcacagctgtacgtatttgtcttgaaggctagaatttactttaaatgtgagtggttttcccaggaaaaatttatgtctgttctcttgaggaataattatttcctactcaattttatctatcgatccatccatccatccatccatgcatccatccatccatccatccatccgatacagagcctcgctctgtcgcccaggctggagtgcagtggcgctatcttggctcactgcaacctctgcctccccagttcaagtgattcttgtgcctcagcctcccgagtagctgggactacaggcccgtgccactacacctggctaatttttggatttttttttttttttttttttttcctgagacagagtcttgctctatcgccaggctggagtgcagttgcgcgatctttgctcattgcaacctccgcttcccaggttcaagtgattctcctgcctcagcctcctgagtagctggtactagaggcacgttccatcacgcctggctaattttttttttttttgagatggagtcttggagtctcgctctgttgctgaggctggagtgcagtggtgccatctcggctcactgcaacctccacctcctgggttcaagtgattctcctgcctcaacctcctgggtagctgggagtacaggcgcgtgccaccacacctggctaagtttttgtattttcggtagcaacgaggtttcgccgtattagccaggatggtctcactctcctgacctcgtgatccgcccgccttggtctcccaaagtgctgggattacaggcatgagccaccacgcgcagccctttttttgtgttttagtagagacagggtttcaccgtgttggccaggatggtccgatctcctgacctcgtgattctctcacctcggcctgtcaaagtgctgggattacaggcggcagccaccgcgcctggcctaatttttgtacttttaagtacagacggggtttcaccatgttgtccaggttggtctcaaact

SEQ ID NO: 1266 - DNA, 4900 bp, Homo sapiens
  misc_feature (1)..(4900): DMR8:7540401
tcctgtgatcgccatgtcttatcacacacatgcaccgataggaaaagcctctagaaaaggagagggtgggatatgagtgttaggactttctggatgcaggtaggatttggagctgaacacaagtgcatgtgattttgggccacagcagcaatgtgtgccggatgactaatgaagtttggggcttgtgagaattggactttgtgtcactatgtggaagattgatgggtccctttctgtcctgcagtttggctaccacacaaatgaatccacccaaacgtcgccaagtggagcagggtcccagtacaggtaaggcactttccctaatattttttaagattcccatgcctggaagtcagtgtcatgtctcatgataccataaatggagagggtgctttctgcagggtgagtggaaagtcgtgcttgactgttgggggctggtgtcctgaggctggccagtgctgggtggtggatttctgaaggtcacattctgaaatgcaagagactcttgctggaagagagccttaacctccctcactgtggtctctctgcaggtgcaaaaaaaccctcaatttcaggagctccacacctgaattcataccagtccctggaacttccccaggtaagttcctgtgtccttgcatagcaaagattggatagtgctgcacaatcttcaggttcaagggacatccagtggatgtatatttaggtggattggcatgagcaccaattctgggagggagtttgtattttaaagttgtaaagggtgaagctcctggcatctccctccccatgagcatcatttgcagcctttttggagggcagaatactgaggactgtctttccacagaatcagcaggattctggcactgaggagctcatgatagtcctggaacaagggacagaagtgaggttgagcctggaagaggtcatcctcatcttggccccagagacagtgctgcagctgaccctggagaacacagtccttgtgattgtccctgagcatgtcctgaggtcagaagatggcctgcagtcccctgtgcagatccagtacatcataccttccgttgatgacttcagcttggagttccatgctcaagatggagacatctcagacatgagaagagagaatgtgcctttttcacctgcagaagaagggaaggcagcacccctgtatcagcagcccttgatgataccccaagcaaaccacatggctgggatcagcccttctttcctagtaaccccattgtgcattccacgctgtcgggcagccttcccccaatgctaccctctaccacccacacctagtcctgtgggacgccctagaccagccgactccagtttcagcctgcatggtatggagctcttgtgcacctcctccctcagacctatgcccccttcaccaagtcctggtccccaggtctatcacagggttcaccataggcctcccagcagggcacggagatgtctctttaggaagtgatttaacccaagagccaccccctgcattgataggtcagagattgtccagatccttagtcagtgcattctctgaaatgtggagagaaagtaatttgaccacttgcttgccctttgctgttccccatcatcaaccactgtcttcaacagcggagggtcccagatgctgcagggagggggagaactgcagggagttcaaataaaacattcacatttcacttcacacacactgtcccttagactttctcttcctatttaagcacatacatccaaccacactcaatcaaatccctgactgctccatgtgagagttctgcttccagcatgacgtggtctgaaagttcatctgaagacagctgctcactcccgggggctaacaccgccccttgcatgctgatgtccttgtagtcattggtctgatgccacaataaataattcctaaggctgatgctctatttctgccctgagactctcccctttttctccaagctgtgccccattccttgtcttagtccaggttccctacactccccaggccaatgcttttgaataaatcttgacgtcattgaatgaagtagtggtgactgctgtgcttgcttccaactgagacactctcctgctctcactcatcacgtttccattcacatttgcctttgtttagttttgttttccattgtttgggtttattattcatgtacttatgaaataactgccacatttctgacagtttttttggccaatttggggcttttcctgtgctcctccttccaagtcctgagtggggtcactgtttgcacctctgggccctgggatgggtctggcttagcaaatggttgaacagagcttagctctgtgtgttgggacgggcacctgcacttgctcacagctgcttccaggctctccctgtcctgcctggacgtctctgtgtctctggagtgtctaggaagtctagaagttctcttgagggcccagcacctctttgttggcctgcatgtcccagcctgtatgtccatggccagctagagctaccactagcttttcctggccaacctgggagctcaggcctgagtcctggaggcaggggagatgcagggataatgtcctggccttctggagcccaactccagtaggtggggagtgctcatgaccctgcggggagtacagggcgtttgcccttgacttgcctgagcctctaaaacctcacatgtcccctggaggtgggtgcagcttcctcctactctggccttgctggcctgggaagggcgtccttggtcccttgaaccctcacagcattttctcttctactgaggtttcaggaactgcctttcccctctgggaaggaggacagggactctttcaggtttgattctcctcggggttttagacgttggctgaggtgggaactgccttcatccacatgaaaggcccagccagggcatcctcaccagcctgggcctctgggtaggttctgagtctggtcgctggagaggccgcttctgtgagccccaagacagcagcccctgtgaaggccattctcctctgttccctcagggtgtcaggacccgcctgtgtccaggaagtcccctctgagactagattgtccttggtgcagccctcccagagccgtgcagaggcagatgtggtgcactgggcctgggctctgaggaagcagtggtagcgggggccagggaggacccaggctctagggcaagggagtgtctaacctgggtagagctgggccgcattcagggagtggcactccagggttctgtttcaggtggagcaggggccaactcaggatcaagtacctctccttccacctccaggactcacccaggggcaggcgggagctccaggttcttctcctcctcctcctcctcctcctccatgtgttttctcttgctttatttctctgagtcaagaaattggggctgtccttcatatcggtgaattttgaccctaatcatcatgaccttgttgaggaaaagagtcatactctgcaaaatatttggagatatttattctgagccaaatatgattgaccatgtcgtgtgacccagccctcaggaggttctgagaacgtgtgtccaaggtgatcagggtgcagcttggttttatgcattttagggagacatgacttcaactaagtgcatttaagaaatacgttgatttgatccagaaaagtgggacaacttgaaggaggggggcttccagcttatagatagatttaaaaattatctggttgataattggatgagtttatctaagaccagggatctattgaaaggaaatgtttaggttaagataaagaggtggggaggccaagttttactgtgcagaggaaccttcagatagtagacttgagagggagtaggttgtaaaatgtttcttattggatttaaaagggagcctggtctttgttgattatctcctgtgtctggaaagaaagaaagaagaaaaaaaggtggggagccttaacctccctcactgtggtctcaccacagatgcagaaacacccttacttcaaagaattcctcacatgaattcattccaggcctggaatcaccccaggtaactccctatgttcatggatagcaaagattggactatgttgcataatctccaggccacaagacacatccagtggtggtgcattcagcagggtcagcatgactgccacttctaggaggaaatttgtattttaaagttgtagagggtgaagctgctccagctccctccccaggagcatcatttgcagtcttttttgaaggcagtggactgagggctgtcgttccacagcagcagcagaattccagcacagagacgttcatcatcgtggtcccggaacaagggacagaactcacactgagactggaagagtatgtcctcatcctgtccccacagacagccctgccctgaccctgggtaacagcgtatttgtggttgtgcctgagcatgtcctgaggtcactggatggcctgcagttccctctgcagatcgattacatctagcactctgtggatgacttcaccttggagttccatgttcaagacagagacacctcagacatgaaagagacaatgtgccgcgctcacctacagaagagggggaggcagaacccgtatgtcaccagcccttgatgagatccgaagaaaaccatgttgcttggctcagcgcttctctttcaataatcctactgcgcattgcatactttctcctctgtgccctaccctttaccaaccacacctagtccagtgggattccctagaccagccaatctcagcttcagcctgtataggatggagactttgcccaactcctccctcagacctatgcacccttcaccaagtccagcactcaggtctgccacagggttcaccatagttctccaaccagagcacgaagatgtgttttcaagaaggga

SEQ ID NO: 1267 - DNA, 500 bp, Homo sapiens
  misc_feature (1)..(500): DMR8:7556101
acacacaaacacggaatgagagtcaaaagacaatatgtcatctttttgagaattttattcacttcaaaacacattaaacacacatatgtacaaaggcattccagagcccagttttcgaggctgaggaaagaccccgagagcgcttcgcacagcacgcttcccagcgtccgaaacactgctctcagggcggggcacagcggaagggctgcacctctcagggttccctaacttttcccttattcagtcatctagacagcaaatacacagtaattccccagtttcctattgacgtcccagcggaagtctgactcctgcgcgtcacgcagtttctgaggcaacgaatctctggcacggaagcttttcctggcgcgtttcgggagaaccacgccaactacaacgtccctcaccagaattcaatgaggcagagtccctgcatctgctccctgcctggcctgggctcccacatccacagaagcgccacagccggggagcttcggagt

SEQ ID NO: 1268 - DNA, 12000 bp, Homo sapiens
  misc_feature (1)..(12000): DMR8:7570901
cccgatcgtacatttgttcaactctgagctcggagaaaagctgccctgtggcgggaggtgagacatgttggcagtaatgctgccttgctttctttactccgctgagatatttgtgtggagagaaacataaatctggcctacgtgcacgtccaggcatagtaccttcccttgaacttaataatgatatggattcttttgctcacgtgtttgttttttgttgttgttgttgaccttccccttattatcaccctgctcccctactgcattcctttgtgctgaaataatgaaaatcataatcaataaaaacagagggaactcagaggccggtgccggtgcaggtcctaggtgtgctgagtgcctgtcccctggacccactgttgtctccctatactttgtctctgtgtcttatttcttttctccgtctctcatcccacccgactagaaacacccacaggtgtggaggggcaggccaccccttcacttggaaaatcagttacacacaaacacggaatgagagtcaaaagacaatatgtcatctttttgagaattttattcacttcaaaacacattaaacacacatatgtacaaaggcattccagagcccagtttccgaggctgaggaaagaccccgagagcgcttcgcacagcacgcttcccagcgtccgaaacactgctctcagggcggggcacagcggaagggctgcacctctcagggttccctaacttttcccttattcagtcatctagacagcaaatacacagtaattccccagtttcctattgacgtcccagcggaagtctgactcctgcgcgtcacgcagtttctgaggcaacgaatctctgtcacggaagcttttcctggcgcgtttcgggagaaccacgccaactacaacgtccctcaccagaattcaatgaggcagagtccctgcatctgctccctgcctggcctgggctcccacatccacagaagcgccacagccggggagcttcggagtcaccgcacagagtgtgctctctgctctgcgctcctcagtcccacagtcccctccaagtcacgggaactggaggccaaggagcccctgccacctgcagtctcactccaggtcagaatcgctgtcctctgaggaggaggaaacctgaaggtcctcatagaggacgctcggtgggacacgaacacagggagcctcagacttctctgacacatgagggctctgagcgaggaaggctcccggcttctcaggagagtgaaatgagggggccgccaggaggctggagctccagcgtccgttttccagtctccggaagagcactctgagaggctgggccccatcatggccggccgctgagtgatgggacatggtgcaggcctgggcagtgggcaggcaaggtctgctgtgcggaggctgcctgtcgacgctgggcacctgggccggtgtcctcctgcccatctggggcgacgtacttggtccaagttcggttgcggctggcggaggttggagattctccggggcccccagctcacctccctggatggcgctttcggggatctggaagggacccagtctcggtttcttggggaagttcaggcaagcctgaatcggagcctgggcaggtttcttggctcctggcccgaagctgagattggagcctaggcccaagctgtgtgtggcggctggcgggcagggctgtggggtcaccgcaggacgtttgtcttgtgcctggggtctggaggcctggagcaggccgtgggttttggaggcagcctggggaacttcttggcagccaccctcggggcggctgtgtgtcggcttcacctcgagaagaggctcggggccctggtgcctgactgcaggctgaggcatgtcggccgcagccccagtctgtctttcctttggtccaagacttgaggaggagctcaggctggtttttctgaggggagacagtgaagccaagacggagcccctgccagacatttcagttgcggagcgatcagcgaggacagggtccaagcgcggcctcttactggttgtgtggaccggcattggcccgcttgcaacctgaaagagaggaaacaacacaggttagaagttcctcagcatggagccaacgtgaaaatcaagcacatccaaagacaaggtgcacacgccatgaaattcttagtacagtatcgacaggcggtccttggaagtagggacagaccctccacctgagtgctgatcaggacaagacacatgaaagatgcgctctcgagctatgtgtagctgatctaagcacaccattgttcaaaagatcgcgtcttgggcattaactggatcaaagcgcctccactcagccttccatgaagtggaacggactaatgcccttcccaaggcaggttgctggctcaagggtactcgggacgtcttctctgaacacatgcctgttcctgggtttcgccttctccacgtttggggcctctgagggactaatttcctcatgccgctaggaacgtgttgttggcaggcttgccataattggacagaaagaaagcaacaggaaatacggcatgttcagatgccttcgcctggaatccaattgacctggaaggatcgtggagtccctgaccccaagaaggcaagaaagaggggttccccgatttcctcccgcagacgggaagctgaaaggaaatcaaccagggtgacctagaggagaaaaagaccaggggcccggggtgacactcgccctcagataatcagaagattccgtggatccttttccatttggcagcggcttctctggaggtttcccggaaaacatgtggaggagagccttcctctgcgggtcttgttgcctgcagaacagaagaaggtcaggccgtgccccctggttttccccaggagacagggagaaccccgtctggggcccagccccattccgtgttttgtgatacagaaatggacatctggtgccctttccgcctctgcaccttccctcacgtgccaaccttcccatcctccaggtggccctctaggcttcccaactaaggactgtgatttggattccatcgcttttcccgctgtcgtggggaacctgcacgaagcgcccccgcctctccccgtccctgaatctcccagagcccaaggagctcctgggtgtggaaccccggaggacacggagctccggcctatttctctgcagcgttccttccctggcccggagacggaaaggcacacggtgtgcaggtgcagagacaccatgtccttaggaggccgtaccctaagagtggtgaaaacccctcccactgctcaccttggtctctcttccttctctcccttatccttgttcaagggccccgggttggcttcagcccggggcttccatggtttcaggttttccttcccttcctttttccccaaggtcgctggaaccagggctgccttccagcacttcatggggcacctggtacttctggccgtgtggccaaaggccccgcagtttttgcacttgagctgtgggtggaaaggaagtgatgtcagtgagtgagctgaagccacaggcagcgatcccacgtcaacattgggacggattgtgaattcagagctgaataaggattccaaagaggggacaccggcatgggggccgttaagtgctgggagacttcggatacgatgttccctcgcaaagcccatgtgacggaggaactctgaaaggaaggactcaaggttccaaggggcacgatggtgaagccgatgtcaacaacgcagccaaacgtggctacacaggactctaagtagaaagggaggttgcccccaagagtctctcaagggacctatcgggccggggagaaggtcccaagccacgcccaccttggatgggaaaagcaacctggctggtggtgacagaactctttggaatccaacccagtctctgaggaccgtgggacacccccttccccccgtccccacccccaccccgatacccaagagatccagggctagacttaccctgggatcttcttcatcgggcgggggagcccttggcccaactcgggccctccgctgcttctggagggtctgggctctcaccagtctcttggcccaagatttggggtcccgacgtgccatcatcttcgtctcctgggggttttatgaccgcctttttcaggggtggactgttgggccacctgaaacacacacaaacacacacatgtcgatggttaagcacgttggatattcacacacccacaggaagccacctgctaactccctgcctgtgtggtcacgaggagacctcaccaccagtcggtcaaatctgtagaacacaatgtgctgtgcgcatcctcggatattgtgtgttcctctgccatgactacctagtccaagagtaaaccccacctgccacagggcccgtggcctaggtatggggggttgagctttcaaccccaaacaaacaactgattctggagactggacttaggtctctcacgattcactccggtagaagacacggtgattctatctcccttgacggacagaatgatcgaagacacagggcatggcgtgtgccaccctttggcaggtctgcttgaagtcacggataagggatgcttcctgtgacaacttgaatcgctactcttgccatttcattaggcaacttccaaacacaaattcatacagagaagttaccttcctctctaccgcactagcaggtgatggtctttcctgttctatcttttggctttagctccagcccctctttatttattttcctggtattttacgcacaccacacgaattcatctgaacaaacggggaagaagtgccgtatcgtatcgacgtcttacacggctgaagggcaaaacccccttttttccaaagtcctttttccatttacccaccaattcagcatgctgcagtacatttcttttcgcattcccatcttggtcttctcccacacgtggagacggatatgttttctcgttttctgttccaagaattactagtaacgagaacacatcctaccccaccagcaagccccagtgtgatcggtttctttcggcctcctttgtctcttcctccccccgccccccccccgccaaaaccactcagggattgcgtgaaacaaacaattgttcagcgaaactaacctgaaattacacgtctactttctttcccaggctggcgctgagatgggcaggtgctgcagcagcccggctggaagcgatgcagcatccaggacgacggaggaaggggcagagagggacctccgctttccaggctgccttttatactgcctctggtcacctgacatggaacgtaccctaacctaatcagttacctgtaccttaattgcaattaacttaatccaattacatgacctggaaaggtctatctgcacagcccactctaagatcatgtccactgctgacagacattctaaaacctacttgtacagctgcaagctttgaacaatagatgttccccgtcagacatgtaacactggtgcctgtacccctgtcttcttttccatcttttttgttgttttgttttgttttgttttaaaaaatgtggtaaaatagacaccttttaattggaccacattttgtctatctcgacgtaggcctcagtgtcatcaaggagactctccttgacatgcagtcacggccatgatccatcttcagagcttctctttcttccccaaggtaagtctgtcagcagagaaccctgaccgcaccctcatgtgttttctcccccaggaggcgcttggaaaccaccgtaaattggaccacactgggaaacacagatgaggaaagtcaacaacgctttgtccttcagtgcctggctcctttttcagctcgtcttgcgactccaggcattatgcctgaaaagtctcccggacgcctgtgaggctctaattccctgggtcccattgccatgtctctggatttgcgaagatccaccgcaccttctgtggaactcccgtgtcggtgaacttttgtgccacggcccctaattctgcccatggtcatccacacctgcacgacttaggttccatgttccttggacgggaagagacaggcaggagtcggaatgatgaaccagcacactggggcgttttctcatgtagcccaagtgaccccatggtcttctcgagctttggaaccagtcgcgtcccctttgacactgcacccggctcccagtcactcaatcttgttggccctcaggcgatctcccgttggatgaaatgctcctgctgaaactcgagtcccctttgatttgccttcattaattattcatgattcaggttggaaggcctgctgacgaccccctgtggccgttctctgagctttcctgtcacatcgtttccttccacgctctttggttccttacggtcctgctccttctgctgtcagaggagcagagagttgatcttattcattctggatacggatactttctagttgatctggataatcaagataacgaccctcaacagcggcggagagggagcagccagttggtgtgtctcagaaaatcccgctgagttccgaggcctcctagatgtggaatcttactgagagttgttcccaggtcagagaatggagagagcctgtgcatgatgggatatccccgcctagatcttttagtgagtctctgcctcagctactcttaggatcagggggagaaccatggtgtcagacatccggaaagaagacgggatgaatgttttacctctgaagtacatcccaaatgtgggagttaacttcagctttgctggggtctatttggccagtgaaactctgcctggttccttcgcacatccggaagccacttcacggggggccgtcgcaactggaaccacacacttggcatcggcggttgagccaaatggggactcgtggtgcaagcaacgctccccacgtgttagcgtgcgtgagattcggttggcggaattttactaggtgtgtgttggtagagtggggctgaggttttcttgctcctgtggatgtataggaagtcaaaggtcctgcccagccctgcggtcccctcagtcaactctgttttggagacgtaacgatttggattgccaacaaatcaagaaatgttcaagcccttggatgtagggtaaagaaagagagatcagactgtcactgtgtctatgtagaaggggaagacataagagactccattttgaaaaagacctgtactttaaacaattgctttactgagatgttgatcatttgtagctttgccgcagccccttcctttgacccaacttggagctcacaaaaacctgtgttgtataaaatcgaggtttaagggatctagggctgtgcaggacgcgccttgttaaccaaatgtttacgagcagtatacttggtagaagtcattgccattctctagtctcaataaaccaggggcgcaatgtaccgtggaaagccacagggacctctgcccttgaaagcagggtattgtccaaggtttctccccatgtgacagtctgaaatatgacctcgtgggatgggaaagtcctgaatgtcccccagcctgacacccgcaatgggtctgtgctgaggtggattagtcaaagaggaacgcctcttgcagttcaaatggaggaaggccactgtctcctgcttgcccctgggaactgaatgtctcggtgtaaagcccgatcgtacatttgttcaactctgagctcggagaaaagctgccctgtggcgggaggtgagacatgttggcagtaatgctgccttgctttctttactccgctgagatatttgtgtggagagaaacataaatctggcctacatgcacgtccaggcatagtaccttcccttgaacttaataatgatatggattcttttgctcacgtgtttgttttttgttgttgttgttgaccttccccttattatcaccctgctcccctactgcattcctttgtgctgaaataatgaaaatcataatcaataaaaacagagggaactcagaggccggtgccggtgcaggtcctaggtgtgctgagtgcctgtcccctggacccactgttgtctccctatactttgtctctgtgtcttatttcttttctccgtctctcatcccacccgactagaaacacccacaggtgtggaggggcaggccaccccttcacttggaaaatcagttacacacaaacacggaatgagagtcaaaagacaatatgtcatctttttgagaattttattcacttcaaaacacattaaacacacatatgtacaaaggcattccagagcccagttttcgaggctgaggaaagaccccgagagcgcttcgcacagcacgcttaccagcgtccgaaacactgctctcagggcggggcacagcggaagggctgcacctctcagggttccctaacttttcccttattcagtcatctagacagcaaatacacagtaattccccagtttcctattgacgtcccagcggaagtctgactcctgcgcgtcacgcagtttctgaggcaacgaatctctgtcacggaagcttttcctggcgcgtttcgggagaaccacgccaactacaacgtccctcaccagaattcaatgaggcagagtccctgcatctgctccctgcctggcctgggctcccacatccacagaagcgccacagccggggagcttcggagtcaccgcacagagtgtgctctctgctctgcgctcctcagtcccacagtcccctccaagtcacgggaactggaggccaaggagcccctgccacctgcagtctcactccaggtcagaatcgctgtcctctgaggaggaggaaacctgaaggtcctcatagaggacgctcggtgggacacgaacacagggagcctcagacttctctgacacatgagggctctgagcgaggaaggctcccggcttctcaggagagtgaaatgagggggccgccaggaggctggagctccagcgtccgttttccagtctccggaagagcactctgagaggctgggccccatcatggctggccgctgggtgatgggacatggtgcaggcctgggcagtaggcaggcaaggtctgctgtgcggaggctgccggtcgacgctgggcacctgggccggtgtcctcctgcccatctggggcgacgtacttggtccaagttcggttgcggctggcggaggttggagattctccggggcccccagctcacctccctggatggcgctttcggggatctggaagggacccagtctcggtttcttggggaagttcaggcaagcctgaatcggagcctgggcaggtctcttggctcctggcccgaagctgagattggagcctaggcccaagctgtgtgtggcggctggcgggcagggctgtggggtcaccgcaggacgtttgtcttgtgcctggggtctggcggcctggagcaggccgtgggttttggaggcagcctggggaacttctcggcagccaccctcggggcggctgtgtgtcggcttcaccacgaggagaggctcgcggccctggtgcctgactgcaggctgaggcatgtcggccgcagccccagtctgtctttcctttggtccaagacttgaggaggagctcaggctggcttttctgaggggagacagtgaagccaagacggagcccctgccagacatttcggttgcggagcgatcagcgaggacagggtccaagcgcggcctcttactggttgtgtggaccggcattggcccgcttgcaacctgaaagagaggaaacaacacaggttagaagttcctcagcatggagccaacgtgaaaatcaagcacatccaaagacaaggtgcacacgccatgaaattcttagtacagtatcgacaggcggtccttggaagtagggacagaccctccacctgagtgctgatcaggacaagacacatgaaagatgcgctctcgagctatgtgtagctgatctaagcacaccattgttcaaaagatcgcgtcttgggcattaactggatcaaagcgcctccactcagccttccatgaagtggaacggactaatgcccttcccaaggcaggttgctggctcaagggtactcgggacgtcttctctgaacacatgcatgttcctgggtttcgccttctccacgtttggggcctctgagggactaatttcctcatgccgctaggaacgtgttgttggcaggcttgccataattggacagaaagaaagcaacaggaaatacggcatgttcagatgccttcgcctggaatccaattgacctggaaggatcgtggagtccctgaccccaagaaggcaagaaagaggggttccccgatttcctcccgcagacgggaagctgaaaggaaatcaaccagggtgacctagaggagaaaaagaccaggggcccggggtgacactcgccctcagataatcagaagattccgtggatccttttccattcggcagcggcttctctggaggtttcccggaaaacatgtggaggagagccttcctctgcgggtcttgttgcctgcagaacagaagaaggtcaggccgtgccccctggttttccccaggagacagggagaaccccgtctggggcccagccccattccgtgttttgtgatacagaaatggacatctggtgccctttccgcctctgcaccttccctcacgtgccaaccttcccatcctccaggtggccctctaggcttcccaactaaggactgtgatttggattccatcgcttttcccgctgtcgtggggaacctgcacgaagcgcccccgcctctccccgtccctgaatctcccagagcccaaggagctcctgggtatggaaccccggaggacacggagctccggcctatttctctgcagcgttccttccctggcccggagacggaaaggcacacggtgtgcaggtgcagagacaccatgtccttaggaggccgtaccctaagagtggtgaaaacccctcccactgctcaccttggtctctcttccttctctcccttatccttgttcaagggccccgggttggcttcagcccggggcttccatggtttcaggttttccttcccttcctttttccccaaggtcgctggaaccagggctgccttccagcacttcatggggcacctggtacttctggccgtgtggccaaaggccccgcagtttttgcacttgagctgtgggtggaaaggaagtgatgtcagtgagtgagctgaagccacaggcagcgatcccacgtcaacattgggacggattgtgaattcagagctgaataaggattccaaagaggggacaccggcatgggggccgttaagtgctgggagacttcggatacgatgttccctcgcaaagcccatgtgacggaggaactctgaaaggaaggactcaaggttccaaggggcacgatggtgaagccgatgtcaacaacgcagccaaacgtggctacacaggaacctaagtagaaagggaggttgcccccaagagtctctcaagggacctatcgggccggggagaaggtcccaagccacgcccaccttggatgggaaaagcaacctggctggtggtgacagaactctttggaatccaacccagtctctgaggaccgtgggacacgcctccccccgtccccacccccaccccgatacccaagagatccagggctagacttaccctgggatcttcttcatcgggcgggggagaccttggcccaactggggccctccgctgcttctggagggtctgggctctcaccagtctcttggcccaagatttggggtcccgacgtgccatcatcttcgtctcctgggggttttatgaccgcctttttcaggggtggactgttgggccacctgaaacacacacaaacacacacatgtcgatggttaagcacgttggatattcacacacccacaggaagccacctgctaactccctgcctgtgtggtcatgaggagacctcaccaccagtcggtcaaatctgtagaacacaatgtgctgtgcgcatcctcggatattgtgtgttcctctgccatgactacct

SEQ ID NO: 1269 - DNA, 1300 bp, Homo sapiens
  misc_feature (1)..(1300): DMR8:7748301
cagggccgcgagcctctcctcgtggtgaagccgacacacagccgccccgagggtggctgccgagaagttccccaggctgcctccaaaacccacggcctgctccaggccgccagaccccaggcacaagacaaacgtcctgcggtgacctcgcagccctgcccgccagccgccacacacagcttgggcctaggctccaatctcagcttcgggccaggagccaagagacctgcccaggctccgattcaggcttgcctgaacttccccaagaaaccgagactgggtcccttccagatccccgaaagcgccatccagggaggtgagctgggggccccggagaatctccaacctccgccagccgcaaccgaacttggaccaagtacgtcgccccagatgggcaggaggacaccggcccaggtgcccagcgtcgaccggcagcctccgcacagcacaccttgcctgcctactgcccaggcctgcaccatgtcccatcactcagcggccagccatgatggggcccagcctctcagagtgctcttccggagactggaaaacggacgctggagctccagcctcctggcggccccctcatttcactctcctgagaagccgggagccttcctcgctcagagccctcatgtgtcagagaagtctgaggctccctgtgttcgtgtcccaccgagcgtcctctatgaggaccttcaggtttcctcctcctcagaggacagcgattctgacctggagtgagactgcaggtggcaggggctccttggcctccagctcccgtgacttggaggggactgtgggactgaggagcgcagagcagagagcacactctgtgcggtgactccgaagctccccggctgtggcgcttctgtggatgtgggagcccaggccaggcagggagcagatgcagggactctgcctcattgaattctggtgagggacgttgtagttggcgtggttctccggaaacgcgccaggaaaagcttccgtgccagagattcgttgcctcagaaactgcgtgacgcgcaggagtcagacttccgctgggacgtcaataggaaactggggaattactgtgtatttgctctctagatgactgaataagggaaaagttagggaaccctgagaggtgcagcccttccgctgtgccccgccctgagagcagtgtttcggacgctgggaagcgtgctgtgcgaagcgctctcggggtctttcctcagcctcgaaaactgggctctggaatgcctttgtacatatgtgtgtttaatgggttttgaagtgaataaaattctcaaaa

SEQ ID NO: 1270 - DNA, 2800 bp, Homo sapiens
  misc_feature (1)..(2800): DMR8:7762401
aatcacagtccttagttcggaagcctagagggccacctggaggatgggaaggttggcacgtgagggaaggtgcagaggcggaaagggcaccagatgtccatttctgtatcacaaaacacggaatggggctgggccccagacggggctctccctgtctcctggggaaaaccagggggcacggcctgacctttttctgttctgcaggcaacaagacccgcagaggaaggctctcctccacatgttttccgggaaacctccagagaagccgctgccgaatggaaaaggatccacggagtcttctgatcatctgagggtgagtgtcaccccgggcccctggtccttttctcctctaggtcaccctggttgatttcctttcagcttcccgtctgcgggaggaaatcggggaacccctctttcttgccttcttggggtcagggactccacgatccttccaggtcaattggattccaggcgaaggcatctgaagatgccgtatttcctgtggctttctttctgtccaattatggcaagcctgccaacaacacgttcctagcggcatgaggaaattagtccctcagaggccccaaacgtggagaaggcgaaacccaggaacatgcatgtgttcagagaagacgtcccgagtacccttgagccagcaacctgcctcgggaagggcattagtccgttccacttcatggaaggctgagtggaggcgctttgatccagttaatgcccaagacgcgatcttttgaacaatggtgtgcttagatcagctacacatagctcgagagcgcatctttcatgtgtcttgtcctgatcagcactcaggtggagggtctgtccctacttccaaggaccgcctgtcgatactgtactaagaatttcatggcgtgtgcaccttgtctttggatgtgcttgattttcacgttggctccatgctgaggaacttctaacctgtgttgtttcctctctttcaggttgcaagcgggccaatgccggtccacacaaccagtaagaggccgcgcgtggaccctgtcctcgctgatcgctcagctgccgaaatgtctggcaggggctccgtcttggcttcactgtctcccctcagaaaagccagcctgagctcctcctcaagtcttggaccaaaggaaagacagacaggggctgcggccgacatgcctcagcctgcagtcaggcaccagggccgcgagcctctcctcgtggtgaagccgacacacagcagccccgagggtggctgccgagaagttccccaggctgcctccaaaacccacggcctgctccaggccgccagaccccaggcacaagacaaacgtcctgcggtgacctcgcagccctgcccgccagccgccacacacagcttgggcctaggctccaatctcagcttcgggccaggagccaagagacctgcccaggctccgattcaggcttgcctgaacttccccaagaaaccgagactgggtcccttccagatccccgaaagcgccatccagggaggtgagctgggggccccggagaatctccaacctccgccagccgcaaccgaacttggaccaagtacgtcgccccagatgggcaggaggacaccggcccaggtgcccagcgtcgaccggcagcctccgcacagcacaccttgcctgcctactgcccaggcctgcaccatgtcccatcactcagcggccagccatgatggggcccagcctctcagagtgctcttccggagactggaaaacggacgctggagctccagcctcctggcggccccctcatttcactctcctgagaagccgggaaccttcctcgctcagagccctcatgtgtcagagaagtctgaggctccctgtgttcgtgtcccaccgagcgtcctctatgaggaccttcaggtttcctcctcctcagaggacagcgattctgacctggagtgagactgcaggtggcaggggctccttggcctccagttcccgtgacttggaggggactgtgggactgaggagcgcagagcagagagcacactctgtgcggtgactccgaagctccccggctgtggcgcttctgtggatgtgggagcccaggccaggcagggagcagatgcagggactctgcctcattgaattctggtgagggacgttgtagttggcgtggttctccggaaacgcgccaggaaaagcttccgtgccagagattcgttgcctcagaaactgcgtgacgcgcaggagtcagacttccgctgggacgtcaataggaaactggggaattactgtgtatttgctctctagatgactgaataagggaaaagttagggaaccctgagaggtgcagcccttccgctgtgccccgccctgagagcagtgtttcggacgctgggaagcgtgctgtgcgaagcgctctcggggtctttcctcagcctcgaaaactgggctctggaatgcctttgtacatatgtgtgtttaatgtgttttgaagtgaataaaattctcaagaagatgacatattgtcttttgactctcattccgtgtttgtgtgtaactgattttccaagtgaaggggtggcctgcccctccacacctgtgggtgtttctagtcgggtgggatgagagacggagaaaagaaataagacacagagacaaagtatagggagacaacagtgggtccaggggaccggcactcagcacacctaggacctgcaccggcaccggcctctgagttcccgcagtttttattgattgtgattttcattatttcagcacaaaggaatgcagtaggggagcagggtgataataagggg

SEQ ID NO: 1271 - DNA, 1700 bp, Homo sapiens
  misc_feature (1)..(1700): DMR8:7799601
tttgctttgatggaagataactgaaataaagaagcaacgtccaaggaccatatacaaaaggcgattgattccctgtatgtggacggaagaggagcttgaataagagaagggttctgtgatactttaatgctggaaaactgctgctatgcatttgtcaaatcccatacaattttactgcataaatagtacatcttaatgtggctcaggactacagcttatgtcatgtaagatttgggggaaaattactatttaattaaataggttaaactgtgaacaataatgtgagccctgcctggaccagatggcttgccaagcagatggccatcctcatcctcacacagtacttgacaaaaaccctggcttcagtgtagaatcacttgtggagaatttttaggatgtaccacttccacccatgaattagcccatttaattggcctcagtaagtccatggtttcaggattttgcagtttgctaaaagttcaatgtcatcccaatttatttcctggaaccatttctccttgaagtttacattcagtactgagatttgctaaaagccaatgcatttccaagttctagagtcaaatcagacgacgcctccttggtcagaacttttattttgcttgcggaaaagtatattgaatcaaatataagaagggtttgcatggtggctgagtggttaaggtgctttatctgctagtccatagtaaggggagcacaactgtgtcctctgtgtcataactcaggactcatgaataaaacgtggagtgtcaggagatgaacttctactcccacctaggggagcttcaaggagaacgtctcaagggctttctgagggaaagaagagcagggatgcctaattctctggccccaggcagttgttcatgggcagagacaagggctggggtaattcaatggtttatactgggtgtttttgatactgcccccatttccctgttaaatctgtgtaatggatcactgagaaacctggcacctggggctgaagatccctgttgtgtcaactccagggatggatccagagaagtggttttggtggaagttggaatgaagggagtttggctgtgggaagaaaaaaaagctgttgatgatggggaaacgggaagagaaggatgaaatctctactcacatgctaaggatagcttatgcaaatctatgtgtcagacctgcataaataaaactagaactttaacaacatattagatttttcagcaacaggttttattgtttcaatatttgcaagtatttttctattaaaaaataataaagttgcttacataattttgtattcaaaattcccaggtcacataactgttatacatttacacttcacatttttaatgagtagatacattctctaaattatgaattatttgctcaattgtgtgttagttttttctttttattctccatgactccgttttctgacctgaaatctgcagtatttggtaatccacaagatgatcagttgcccttgtaaagactttcctttcctatttccttcttaagaaagcattttttactgagtttttttggtaacataccaacggtggtacctggctgaatgttggttcacagtgagtagagaccaaggcttctctcaaatggagtcccaaattctttacagagctaggaattctctactctgaaagtcctgtgtgttttaagttagagcttttgcaaac

SEQ ID NO: 1272 - DNA, 2400 bp, Homo sapiens
  misc_feature (1)..(2400): DMR8:8064501
ctaagggtgcatcctgggctcattcatcagggcatgcctccaaaatatttctccacgtctcctccctttgcccacctgcattgtctctgtgcctgagccccggctgggggcctgcaaggatcccctatctcctctgcccctgcacagctgggtcccagtcaatctgtctgcccaccacaccttcctccccttgcccaccatgctccaaccccacagtcctctttctgcttctttcccagcctctgggcttttgcacacgctgttccctctgcctgaacaccctccactgggctgagaacaactctccgagacctctctcagctgttgcttcctttggaacagccgctgctgctgtcactttcccagctccaagacctgctgagcctcctgtctttttcagttcccatgcccccagcacttctccttggcctcctttggcccaattgacaatgtccattctcaatgccttcccacccagcgctgagccccactgggtgaaggcaatgcctgtcatgttctccacaatatcccctcccccatcaccacacctggtccacagtgatgctcaaaaaaggtctgttggtaggcaatgggaaggtgcattcatgtcatcctgcaggcggaattctccacgagttttgagcagcctcgggtttcccaccacctccaaatcatggaagatacacggtaagagcaaagacaaggtggctgtggccgatgtccaccctctcggggcttcccttctcttctctcctccttgggcagggagaccatcggggtgcaacctggctggggtggggaggaggtgcagggcctggccagagcgggtctggccacaggcaggggacagcgactgcctgggcgggggcaggtgagtgcagcgcaggccagggcccggcttgtccgcggtgcgcgcgagcggccagcagagggcgcgagagccaggagcggcccgcgtaggagcccgcgccggccgctatgcccagccccgcgcccggcggacccaccgagcccgcgctcagacgccccagctccgccgagaggccgctcgcgccgtatccttcctcttctccaggtgcaggcagagccccccagccgtggccagcccttccggcagctccgaagccactggcaagccccgaggcagggatggccggcccaggagggaggaggacgacgtccctcccgaagagaagaggctgcggctgtagctggaggggggaagcgcagaacccgaggactgcgaggacggggaggacgcgccgcggccaggcagggaggagaccggcacccagacaggtggcgaaggcagaggagtaagtgacgcgggcgccggggtccgggggtgccgggggcgccggtaggggcggcgggaggctcagtggccggcctcgggttgaagttggtattttagcggcaactccgaagggcgcggagtgacagcgcgtgacggcctccgagacgccagctgccgcttctcggctgtgtggctttgacttcctgattctcccacgacgtccctggctgggagacccgctggactctgcggctggccaaaaagagaggggcagccccgcgtcctgggggcccctagcaggggaagtggcggttgttgcgctgggcatcctgtctggggcatctgtctgggaccctgtcggtgcctctcacctggcgaggggcctgtggtggggtaggggggaagtccctggcgccaggcttggccaagccctgctctgctggactgcgggctggcggcactcacccagctcctcacccgtcccgcatcttcctgtttttcttccctttctggttgggcagcaagagttgagaggaggcagatggcttccatcccagaaatcgctctcctctttccatccctacagagagggacagagaggcaaagttccttgcatccccggggcgctgtccctgtgagctcctggtgtcctgcaaacgttggcccctgaatcaccgggccagtgtgtgtgggatggggctgcgtagccaggctggcctcctggggttcactttcggctttcctaccccaactcttcctgtgtggctttgctggccttccactggggaggcatgtgggtttggagggcagatgagggcccgctggagaactgtacccctcagtgagggccgccaccttgatggtttttaatggataatggggttgacctctttgttccttccacatgtttttatgtttgaccatttgctcagctgagcttgtcttaataattggattcatggttaatgagccccacatgggagagagggcggtcttcattctgaacccatttaggcagcatgggcagccctcctcgccgtgggcggcatcagagcccccctgcccagtcttggggttgctcctggatgctgtctgggaggctt

SEQ ID NO: 1273 - DNA, 2100 bp, Homo sapiens
  misc_feature (1)..(2100): DMR8:8243201
taagattttgacagttttgtaagtgtttgctgcttccagggactcatatttatccatgtaaatgtaggcatagctggaaggtggagtgtattcagctcttcagaaattaagggtttcattttacattgaatcttgcctttggctctcagatccccttgatcaactttgtcaatgattttccctactaagcatgtgagaaaaagaaacaaaggtgacagaatacaaaaattcctgcgaatttccaaaagccaaagttcacactccaccgcaattttgccatttactgtcagttcctgtctgacccaatcagacacctgaggtctctaactggatccaggctagttaattcttggatccaatctgatcctggacccagtccagtttctgtcacaacttctgaatgcagtttggataaaaaaatttgctcaaacaaactcagatagctcaaatcataaatcagcggggcttcagaatctgagagagaattgagcagtaatccccagttgtgagacagcaatggacacagtgggcaggcgagtactgaactccctctgcaaaaattctaacagtgagaaaatttaaccatcccacatcttgcctgtacccttcaaactgcccttcattcttcctgggcatgggccaagctaactttgggagacatttagtttatagtttaaatgataatagctcttctccaaagctcaaccacatttgtaaagctgatgagagaccgccagggtaagaggatgggaggagcctgatttctgctaaggtgtagacataaatgattacctgccattattctggaggtcacaagacatggaacttccccaattactcctgcaaatcacatcactattgtagaacccacgatcagccttttcggatgtcttttcaggtttttgcttgtctgatgactgatggctccacccagacctgccaaccactcccgcggccccatccagaagtggctcagcgtgcatgaggaccatctccaacatccctgtgattgtacccccaaccaaccagcagcaagaacctattgcctagtcacctcccctctctttccccaactatcattgaaaaagtctggcttccaaattttccgggagactgatttgggtaataataaaactccagtcttctgttcagccagctctgcatgaattaagctctttctctattgcaattttcctgtcttgataaattgtctctacctgggcagggggcaaaatgaacccatagggtggttacagtaccttgctgggtcacttgatattcctggagggtcacgggaagcgctatgtgaatcccacttctgatattgtaagattctctccagggcctgaaagcttaaggggttgagcaactcctcccttctcaggcccagccccagggcgcaaggccgcttgcatcagcagcgtgcgtgagcagatgcgccagcaagatagcaaaagcaggaagagagccagccggaagacaagtacctctgaagatggagaaagaggccatctgggtacaacgttgcagttacgtcagaccaggacacttcctgtttacaggagactataaaacctttgccccatcctcacttggggctgacgccgttttaggcctcagcccgccagcacccaggctctcattaaaacagcatgttgctccacactgtcgtgttgtctgttggcgcgctctcgaggttcaaaccgatacaagaaacttacaataccatctgataaaagaaaaactttagacaaattaaatttgacagagtttaattgagcaaaaaacaaccggagaatcaggtatccctagaaccagagtaggttcagagcaacgcctagtttttaaaaaaatgtttaacatttatgaaaattcttcaactttagccttcaaaatttataatgaattgttacttcagttaccatctttataaactttgaagaggtctttactttttaaaatttacttatttatctttacataacatgctcttctgatttaagtgtagctttttaccgtctcctgcgtcttttgtttccactaagttggttttggtttccatttttcatggtgatgactttcctgaaatgtgtgatgacc

SEQ ID NO: 1274 - DNA, 1000 bp, Homo sapiens
  misc_feature (1)..(1000): DMR8:9325701
tagcggaggtgctagggccactcagggtgactgatgtccatgtgttagccacggacattgaaagatttttggtctttcaaactcgaggacttgcctaaccaagcacagagcaaagaacagaaagctgactttgctagatgcttgggcatcaatatcacgtggaaccagccttttctttgatacctcttgcgtttcttgcagatcccctgcctgcagcacgtgctgatctccaagggtgaggctggatgaagccaggggctatggaaagggagactgtttcagaggacttgacaccatcttcagtaatttctctggttcttggcagctccatttggctgcgtccctaccctgcataaccctcccagctagtctactccagggcagcatccagctggtgacctgagagggcagtggcgcaccagtctccatgaaggttgagctccgatggccaacagccatttccaccttgtggtctacaactcttcatcccgactgcatggaggttggtctctctcttcagctggatttaggccaccatctgagcccccggggtacgttttgtctgaccctggcgccattcgaacggttcttctacagcatcaggtacgatgttcctatttagttcaaccccattcctaaggcgcgtttccactcctccactcctttccaaatggacatctcctccctcattctctctcttttttttttaaattttataatataaatatgtattaaaaatagagacggagtcttgctatgttacccaggctggtctcgatccccttggctcacgtaatcctctcacctcagactccgtaagtgttaggattacaggcatgagccacctcacctggtctcctccctcattcttcaagcgtctgctctagcgttaccttccctgtgaattctttctttcctttttgccatttggaatcctttttcttttatttatttaattgacaaataataattgtacaaatttatggggtgcatagcgatc

SEQ ID NO: 1275 - DNA, 600 bp, Homo sapiens
  misc_feature (1)..(600): DMR8:11572801
cttgcacaggcagggctgggctacatgccctcggctctccaaagagcagatacagtacatgcccggcgccttggaggctggagcagggtggggtgtgtgcatgcacatgtgtacctgtgcccgtggtgggtgtgcctacaagtctaactaaccaaaccagggtgtctaggaaggtgacagttgtggaattgtgcaagcatttcatcagcagcatcattcctaggttgtgttatttcttgcttatctccaaggctcccatgtaatggctgatggcctcagcttactcatttctagccccaagcattaaacacttggcccaactccacccacacatcacccctgagattaagaaagtgctctcaaaggatatttgtcaaatacgcaaaggaatggggacaagtcactatcttattctttgtccatatcccatacctggtaacatcttaatccaaaactacacactcagtcagggctcaggcaaggatgatttgagctgggagaaaagccagctgaggttgaaaggaagagaagcacagtggtcaaggctctggggccagttggatgtgggctcaagtcctgcccagccacatggccttctgc

SEQ ID NO: 1276 - DNA, 1000 bp, Homo sapiens
  misc_feature (1)..(1000): DMR8:11887001
aatgacaagtggtaattcacacgtggcctcaatgttgcggagaaactaaaggacggaggaggaaaagtggaacgtgtaagccttaaataaagacggtagcttctacttagttctagcagattcctgccaagagaggatgatagcagaatgttgccatggctgcttctttattcgctagaagcagaaatccgtatttttggatgaagcttcctgctttttaaatgttggctcaaatgaaagacaaaacaggaatccaggctaggggagagggtgacttggagcagggggcttgcagggaggtgtgagaagtgagaatattctgaaggcagagatttcctcatgggttgggtgtgggctatgagagaaaaagacagaaaaagaggaagcaggatgattccaagttgtttttttttttttgagacggagtctcgctctgtcgcccaggctggagtgcagtggcgtgatcttggctcaccggaagctccacctcccgggttcacgtcattctcctgcctcagcctcccgagtagctgggactacaggcgcccgcaaccacacccggctaattttttgtacttttcgtagaaatggggtttcaccgtgttagccaggatggtctcgatctcctgatctcgtgatccaccagcctcagcctcccaaagtgctgggattacaggcatgacccaatgcgcccagcttcttttttttttttttttggctgagcctctgggctcctcctaatgaccccctgcgtcctgctttctccctcacgcctggcatgtcagtctcaacgcagcgcccgagggcttctttaaaacccaagtcaaatcatacactcctctgctcaaaggccaccaatcgcgcccacaccatcaaagtaaaagcccaggcccaggaagtagaatgggggctgtcaagagctggggaagggggagctagtgtttaataggtgtagcgtttcagctgggggatgagaaagttctggagatggatggtggag

SEQ ID NO: 1277 - DNA, 900 bp, Homo sapiens
  misc_feature (1)..(900): DMR8:12196301
ctccaaggagcaaaagggcatatacggtcaatgccatagtaagtaacactgtattatgttatactaaaatattaataaatctaggttggttcagtctttcctgagtccacagattggaagcagattgaggaaggacgctagtggaccacagagctgagccatgcacacagaagaaatctttttttctttttttctggagacggagttttgctctctagttgcccaggctggagtgcaatggcgcgatctcggctcactgcaacctccacctcccaggttcaagcgattctcctgcctcagcctcccgaggagctgggattacaggcgtgagccaccctgcctggccacttttgtatttttagtaaagacagggtttgaacaccttggccaggctggtctcaaattcctgacctcaggtgatccacccacctctgcctcccaaagtgctgggattacaggcatgagccaccgcgcctggccagaagaaatctttatcttggtgtgcagtgtctggtgagggacaaatgtcatctctcttggatctgaatctggaaggatcaaggcactgaagggatttttttgtttcagacagtatccctctgtcgccaggctggagtgcagtggcgcaatctcagctcacggcaacctctgcctcccgggctcaagggatcctcctgcctcagcctctcgagtagctgggactacaggcacgcgtcaccaggcccagctaatttttgtatttttagtagagacagggttttaccacggtggccaggatggtctcaatctcttgacatcatgatccacctgccttggcctcccaaagggctgggattacaggcgtgagccaccacgcccggcctcactgaagggatttttttaatgtcacgtggctctcac

SEQ ID NO: 1278 - DNA, 1000 bp, Homo sapiens
  misc_feature (1)..(1000): DMR8:12607801
gcaccacctccccgccccagccaggttgcaccccgatggtctccctgcccaaggaggagagaagagaagggacgccacgagagggtggacatcggccacagccaccttgtctttgctcttaccctgtgtcttccatgatttggaggtggtgggaaacccgaggctgctcaaaactcgtggagaattccgcctgcaggatgacatgaatgcaccttcgcattgcctaccaacagatcttttttgagcatcactgtggaccagtcgtggtgatgggggaggggatattgtggtgaacatgacaggcattgccttcaccaagtggggctcagcgctgggtgggaaggcattgagaatggacattgtcaattgggccaaaggaggccaaggagaagtgctgggggcatgggaactgaaaaagacaggaggctcagcaggtctttgagctgggagagggacagcagcagcggcttttccaaaggaagcaacagctgagagaggtctcagagagttgttctcagcacagtggagggcgttcaggcagaaggaacagcgtgtgcaaaagcccagaggctgggaaagaagcagaaagaggactgtggggctggagcgtggtgggcaacaggagagaggtgtggtgggcagacagattgcctgggacccagccgtgcaggggcagaggagatagaggatccttgcaggcccccagccggggctgaggcacagagacaatgcaggtgggcaaagggaggagacgtggagaaatattttggaggcatgccctgatgaatgagcccaggatgcacccttagtgtcagtgtggagctcctttcttggctgtgtgataagctgaacccgggggtattttctggacatcgaagtgctacacccagagtccaggacaggctaagtgagcaccagcagctcctggcccacctcaaaagcaggaaagacaggggagactggggaggccggggcggaaggggaagccagaaaggcagga

SEQ ID NO: 1279 - DNA, 900 bp, Homo sapiens
  misc_feature (1)..(900): DMR8:13341101
gttttcagcaaaagtactgtttttcacattgaactaatttctttagcttataaccacaacactgagcaaaaaacaccaataacaaatgcataacaaagacaaaaagaagagaaaagaaagacctcacgaaactgcaaagcttgatgatcctaccatatataaaagaaccactgggaattgtctagtctagaaatgaaaatcatgatgcaggaatgcagctatgagtgtcacttggagctttgggaacggacatgtgctatgccttcagcttcgagcagttcttgaactccagcgtgcgtcagaatcacaaggagggcctgttaaaatgcaagttactggcccccacacatggtttctgattcactaggtttggggcagggcctgggaatttttaatttctgacagttcctcgaatacgctgctgctgctggagtccgttttgagatagggtgcctttgagaattcccaggtggcccagatgggagaatcgctgctgggcttcagaggatgtcccagcagttagaatgttgtaaggacacgtcgcagaaagccttgaaagcaaagtggccaggttgtgactctggtaggcaaaacaggcaggttcatcctcctggtatgcagctactgagatgcaaggtgctttttaaacattgtgcagctcttagattggtgccccagggaaggacaggccccatcaaggctagccaagagcagattgattacatctgtggccaaagtgtaggcgataaaatgtcatccatcagattctctaatcaccggtgaacatgaaataaggcaaatcagctgaagagtctttcagtaagtaaaaataataaaatgcctaaactgctttctattctacaagctaagtggtatttattttagtaataaagatgctct

SEQ ID NO: 1280 - DNA, 800 bp, Homo sapiens
  misc_feature (1)..(800): DMR8:14528201
cgaagaatccattgtaaatgcagaatcttctcaagtttgggaaagaaggcagtatcaatttttgacaatgacaaagttacacatgaattataccatctgggatatgagaaagcatgcgacggattaaaaagacaggacaggacttcagtaactgtgtcatgtcaagattatactaaacaatatgtatgcgtgttcacatcactccagattactcctctcttagttcagaatctcaaaaacattaaaggaagcagcatggtatagagttatatgtaccaaataaatgccataaaaagtccaactttgttacacctagctttgtgacattgagtaagtctcgttggccattctgggccttagttttcttttatttaaaatagactttctctgtggttgtcagtttgatcctccaaatcccctgttccaacataaccaaactacagaatcaacttccattaatcacttatatgagaaaactgatacttgcagcgggaagaagctgaggttgtcctccctctctgccctggcccaatttctatttctgggctgcctccttcctcccagttaataaccacttaattccttgcactactgtcttaggtaataacacaacatcacggaccagccaaaaaaaaaacaaaacaaaaacaaaaaaagagaaagtgccaaaatcttcaaatttataaaagaagcatttttttcatatttagaagggatctcagacatcatccactgcaatatcctaattttacagatgaatcagctgagacctagaaaatgacaaccaactaaaccaaaaa

SEQ ID NO: 1281 - DNA, 1700 bp, Homo sapiens
  misc_feature (1)..(1700): DMR8:15344801
atactttttaaatgaatgtaattatttttcattgagtcaaagatgagaaaacaatctttcctgtaatatcactcatatccaatcaagtgcccaacaaataacaattttctaactatcagattatctaatcttttcctgatcttttatttcttaacaaaaagaaaaatgtttgctcttcatggtggcatttcaacgacgatcaattaacctccaaccccttatactgtaggactccttgaaacactattttaaagctgctctcggcgtgtattactctctcggtttttatttcacttatgcattcactcatcaagtaattattggatggctaatatgtaaaatgaaacattaagatatcatccttgctcttgatgaatttaccactaatctagcaggaggaaaaataaattgttactctattagcaacaaaaacaacacactgcagtttttgctgcttcgtgagtgggtgatacaattcatatcaatggaaaaaataaagctctgcccttctgtcttccacttagatagacagggatggaataaggaaaaacctgcactgtcagagctttagtgccgctaaagagaaaagtctgaaatgattagcctttttttctttagtagaacatattaatttctgacaatgcaaagtgaatcccttagctacataggatatggaaacaaagattgttttgtgtgaaaatgatgatgagcaattttttcatacatctgttggctgcctaaatgtattcttttgagaagtgtctgttcatatcctttgcccactttttgatggggttgtttttttcttgtaaatatgtttaagtcctttgtagattctggatattagccctttgtcagatggatcgattgcaaaaattttctcccattctgtaggctgcccgttgactctgatgatagttacttttgctgtgcagaagctctttagtttaattagatcccatttgtctgttttggcttccgttgccattgcttttggtgttttagtcatgaagtctttgcccgtgcctatgtcctgaatggtattgcctaggttttcttctagagtttttatggtgttaggtcttacatttaagtctttaatctgcctcatgcatagttttaatagatgattggacataattgaagagagatttggtaggctgaaagatcgataagattaaaataaccagaaagaaacacagagaacatgaatgataaaaaatacaaaaaatattccagacatatgcagatgtaagaaaaatgtcaaatttatttgtaactggagtcccaggttgagaacaaagataatgggtcagaaatattatttgaagaaaatggctaaaaatgtcccaaatcttacaagtcattaaaccacactttgaggaagtaccacatactccatctgggataagacatacacataagaaaacacacttaaccattgtattatttccccagggcggtcatttaaaaatcacaacaaacttagcagctgaaaacagcagagatatattctcttacagttctggaggccagaagttctgaaatcagaatattagcagggttgtgttccctctgaagcttctagggaggaatccttccttgccatttcttgggttctagtatctcctggaattacattatgctccttggtttgtggctgcatcacgacagcctctgctctgtcttcatatggcctt

SEQ ID NO: 1282 - DNA, 700 bp, Homo sapiens
  misc_feature (1)..(700): DMR8:16310801
accttgtctttgagaagcacaaccgttgatagaatcctacatcatgctgttcagcaaatgaaagcatctcctattttatatgattatagggaacgaggctctacttgttcaacatgagtccacaaacactaagtactttacttaatagatttggcaagcatgaatatctggggaaagcttaagagaaacattcaagtaaaaaaaaagatgcaaaaccaaatcttttctgactattcaaaaacctttgccccatttgagggtttggagtgagaaatgtttattctctggaattcatgaggtctggcctggaccagagatccagcaataataaagtcatgttacccaacacttacacaagcatgattaaatgctataaggtaggagaaaattagtaaatataagttaaagttgttatattcttttaaaatatatatatctcgaagtgtttatggcctacgtataagctccatgtagtggtatccagttacggtagacaaaaatgaatttttttcaggcaatgttttactcagtctttcaaagcattgcaagcataaaacccaaatagcgttaccaaactctgagacatttctcttcattctttattgaaaaatgaaataaagctacaagcagcgagataatcaacaaggaatcagcagtgaatttaaatgtgtttacatttaaattgatcatgttagttaaa

SEQ ID NO: 1283 - DNA, 1300 bp, Homo sapiens
  misc_feature (1)..(1300): DMR8:17255301
tgaaaccctgtctctactaaaaatataaatattagccgggcatggtagcaggcgcctgtaatcccagctactcgggaggctgaggcaggacaatcacgtgaacctgggaggcagaggttgcagtgagctgagatagtgacattgcactccagcctgggcaacgagagtgagacttcgtcttaaatatatatatgtgtgtgtgtgtgtgtatgtgtatatatgtgtgtatatatataaactaagtgataaattattgtttattctgtaaaaggaagcttcagaaatagtgcctctgttgcatttttaaatcttttaaaattgatacatgatagctgtacaaacactaggtcttatttcttttatcaactgtatatttaaactcactaattaatttcatttcccctcctgtttacccttcctagtgtctggaaccatcacgctactttctttctttgtggatctacttttttagctttcacatatgcaatgtttgtctttttgtgtttggtttatgtcacttaacgtaatgacttccagttccactcatgttgctgtaaatgacaggatttcatccttttttatggtgggataatattctgttgtgtattatgccacattttctttatccattcatttgttgatgtgtacttaaatttattacatattttggctgttgtgaatagtgctgcaataaacgtgggagtgcagctatctctttgattttttttctttattttggcaatatacccagtagcagaattgctgaatcatatggcagtttcattttttttttcaaggttctaaaggtgcagagatattgttagtcttttgaggaacctccatactgttctccatagcagactccaaattagttgtactaatttacattcccaccagcagtatatcagggttcccctgtctccaaatccttgccagcattcgttattgcctggctttttgataaaagtctttttagctggggtaaaatgattttttttttttttttttttttttttttggagatagggtcccactgtttgttgcccagactaatctggaactcctgggctcaaggagtcccacttcagtcttgcacgtaactgggtttacaggcgcacaccaccacaccctgtatgctgcttttgagaaatgtttgttgagatcttttgccaatgtttaaatcacattatttgtttttctgcttttgagttgtttgaactcctcatgtattcggtagttaatcctttgtcagatggatagtttacaaaagttttctcccgttttttgggttgtctcttta

SEQ ID NO: 1284 - DNA, 300 bp, Homo sapiens
  misc_feature (1)..(300): DMR8:17401701
aaaaagaggagtgaagggtaactccaaagttattggctccagcactggaagggtgaaatgccaagattggaaagagcacaagaggagaaaattgggtgtgagacgagagggaatcagctcagtttgggacatagtgaaattgaggtacctattagatatacaaattattttaataagatccaggtactatgaatcttatgcatattatggatcttatggataagtaccttatcttaaggaactatggaatgacaatacaaaacatattttatagggttattttttaaatcatgtatactt

SEQ ID NO: 1285 - DNA, 1000 bp, Homo sapiens
  misc_feature (1)..(1000): DMR8:17422701
ccaccactctccctctgacatgaaaacctgatgctagaatttgcttttcttggttttcccattttcagttgtgatgggtttatctcactctttgggtggagtcaggacctttgtggggcagatcatatgcagcctgcattacagactgtctagttcttcagataattgcaaatatctcttcagggttcaagtttttataaattcaggaagttcttcagctcctgtgaaaataattgtattccaatagacccgtggtggggtggtgggggaggcaggatttttcctaacctaacaatatgggagcacctgagtcccagctgtagtccatttaggacttcctgtcacattttgaatagtgaaaaattacaaacaatagcaaaaataaattgaattattacatagagtatggtgtggccatatatacaatatgatatagccgttaaaattgtttcaaagaatactcaatgaccggccgggcgcggtggctcatgcctgtaatcccagcactttgggaggccgaggcaggcggatcacaaggtcaggagatcgagaccatcctggctaacacggtgaaaccctgtctctacaaaaagtacaaaaaattagctgggcgtggtggtgggcgcctgtagtcccagctattcaggaggctgaggcaggagaatggcatgaacccgggaggcttgcagtgagccaagatcacgccactgcactccagcctgggcgacagagcgagactctgtctcataaaaaaaaaaaaaaaaaaaaaaaaagaatacttaatgacttagaaaaatgctcatggcaaaattttaagccaaaaacctgggtacaaaagtgttatatatagtatgacctaagttgtgtttcagaattgtgtgtgtgtgtgtgtgtgtgtgtgtagagagagagaaaatagaaaaaggaataaatagatacaacacttacatctgagtggtgggtttgtggttgattttaattttatgttttaaaaaatatt

SEQ ID NO: 1286 - DNA, 300 bp, Homo sapiens
  misc_feature (1)..(300): DMR8:18761401
aaataatatcaaaaataaaaagttttaatagctaacagacaatacttactatatgtgaggactctaaaatctcccattttatagatgaggatattgaaatacactatttacttgacgtagtcccctgactattaagagacagaacctggtattagaacccagtcagtacagttctcaaatcataatctcaatcctcataccgtactgtctctcaaaacacagcctacaatacagagctagcctgcattctacattcttatccctctttattcacgtcgttagtacctgtaatacttatta

SEQ ID NO: 1287 - DNA, 1300 bp, Homo sapiens
  misc_feature (1)..(1300): DMR8:19063501
cttacacaaccccgcgatctgattctcactacatcgtggtgagacaggtattaccatccctgttgggcagatgaatgaatgtagctatcaagaaattaaatattaatagcatgtctggagatcaatagcgagtatagtaaagacttttacccaggtccacctggtttccaagttcatgtccttcttccctagaagtgtggtagtgcgtcagaactggaggacacagaatcctggcctgaaggtgcatagtcagaaagggattccttagtcttaaaataagagttgtttttttatttttagcatcttataatccggcaatttccttgaagccttagatacagcacaaaaaagaaattcaaggccgggcacagtggctcagacctgtaattccagcactttgggaggccgaagtgggtggatcacttgaggtcaggagttcgagaccagcctgaccaacatggtgaaaccgtatctctactaaaaatacaaaattagccaggcgtggtggtgcacacctgtaatcccagctactccggagactgaggctggagaatcacttgaacctgggaggcagaggtcgcagggagccaagatcgtgctactgctctccagcctgagtgacgaagtgagactctgtctcaaaaaaaaagaaaaagcaacaacaacaaaaagaaattcaattaaacgagaactccaagtacctgagttctagttaattaagctttaacagcatgtaattcctaataattaaagacacctttagtgtgtacctaaatagagtaatattagacatgagaatgcttaaatggcttcttttttctccgtttttgattcgtttcttaaaaaatatttttaattattaactatgttaattatctatttttaactgttatttacacaacagttatacctatttatggggtaaatgcgatattttgatacaagcatacgatgtgtaatgatcaaatgagggtcactggggtagtcgttgcctcaagcgtttatcatttctttgtgttagggacattccaatggcttcttttcaagtaaagggagaaacattctaataataccgagataatctaaacgctgctcagcagattaatcttctgaatgtgatgaggtcccccctagcaaaaaatgttcaagattaacctttctgaattatgctttaaaaacgttaggaataaaattcttcccactcagcattctagtattgcttcattatttggtctaaacatgaaattccaggaattaaaaacaagaacttgctagaattatttggtccaaacatgaaatg

SEQ ID NO: 1288 - DNA, 800 bp, Homo sapiens
  misc_feature (1)..(800): DMR8:19202901
tcaattgcactcataaagcagaaaggtagcagcagcccaagacaaggtaactattactttcattcttggattctcaggcagaactgtggagagatgccttcataacctcaggtgtccctgacttgcctgtttggcacaaaagggggaagcagagtgttaccccaaatgctgcatttatatcgcttcctcagctctagttgtcagcacctgtcaaggcaagagaaaaacaatgccaaatgaaatagggagctgaagaaaataaacaagtctcagcagagcaccaggtaacacagactgcttcctggttgcttcccaagtttagaaaacagtaagttctaagaaactagagttttattagaaaaggaaaaatatttagcttacactgacccaacatgtgtaacaattcttcataaaattgttggccaaaaatgggtgatactccaaaatgtttaaataaacaaatattaatccaaaacagtttatgtttccaaaagagtgatgctttgaagattggatacacaagtgaactatgtatactctccagctaaggagtcaaacacctaatcaaaatttagccaattattctttactaacgatatattaactcaagaaaatcataaccatgaaattatgattatatgaaagcattggctaaatataaatcctgtcaacagaagtgcataggactacagaagcaaaaccagaagaccctgtccagcattcactacagtcacattccctacacagggaggtaaaagaaaggaaaagaagaaaatatatacagggaaataaaaaaacaa

SEQ ID NO: 1289 - DNA, 400 bp, Homo sapiens
  misc_feature (1)..(400): DMR8:20145301
cggctgggaaaacccgggaaagaacacgttgaggaaaagagggtaacactcttccgatctgttgggactatgccagagaaaatcaggcaacagattaaagaggcttgtcagtcaccccactggtttcaggggcacattactcactaccacctctatgcaatgagtcaccccttgcagaacccgtcacagctcaagtttaatcaacctcacagcagcgggaaggtgcatcactctgtcttcccataaaagatgggccactgcggcaccaaggcatagaggaagagctacaagttacacaggtgagaagagtatcagggacagtgtccatgggaggggaggaaagaagattcccaggcagaggtatgtgaagcccactgagccgtgggctcagccatggtga

SEQ ID NO: 1290 - DNA, 2300 bp, Homo sapiens
  misc_feature (1)..(2300): DMR8:21777601
accctgaatttcagtgtcacctttgcagaaggcaagaaacctggtctcaaagcccccatgcagccaagagtggcagccccctgtgtaaaaactggtggtggtaatggcagtgaggaaaacggggcccaggccgtgggatcgcccccaagacagtgaaaagggacctggataaggagtcggggccctgggacccactctgggtcctgccacgagcttgctgtgtgccctgggaggccatctcacccatctatgcctcagtttccctgccagatggtaggggtgagcccgaatgattgccagatcctctgcagttcagactctagaagctcagcagccatgtcttgcggtcacattcccaccccagccctctctccatcctccccactgccgccacgggctctttgcacctgctgtgcgccttgactgcatactgagagctaagtcccaggaaggcggagcacagccccatggtaaatcacgcccaccagcaggggccaaggagaggctgagaatcggaaggaaaatccaatcctacacacatcgctcctctcagcgattcttgccctctccgcagccccaggcctgcatcaggttattaaatgttatcaaggaacagggaggaaggactcgcagcctccctcagggagactgctcaacaggccatggacgcttacctctcaggtagaccccgccactcacaagaacactacctggaggcctcctggcttcccctggtcagccctgggcagaaactacctctgggctcccaagacccaggagaaggtagaattcccctacagagaaaagatgcagtcttctatggaaggaaaaaagtaagggtgtattttctaggcagggcccagaggaaaggtctcccgacctgtctgctggccagcacagggaacacagttcctacagtgctgttaccttctgaggcacacagtaggtgcttaacaaatggttgttgaataaatgaatgaataaaccatctcaagacttagaaccaggcaggacgcagcggcttatgcctataattccaacacttttggaggccaaagtgggaagagattgcttgaggccagaagtttgaggacagcctgggcaatatagcaagaccccacctccataaaaaataaattagccaagcgtagtggcacgtgcctgtagtcctagcttctcgggaggctgaggcagaagggtcacttcagcccagaaacttgaggctgcagtgagctatgatcttgccactgcactccagcctgcgataacagagcaagactccatctcattaaaaaataaataaataaaaagactcaaggccaggcacaagcggcccacgcctatcatcccaccactttggtaggccgagacacaaggattgcttgagctccagagttcaagatcagcctgagcaacatagtaagacctcatctctacttaaaaaaaaaaaaaagccagtcatagtagcaggctccagtggtcccagctacacgggaggctgaggtgggagaatcatttgagcccaggaggtagaggctgcagtgagctgtgatcatgccactgccctctagcctaggcaacagagtgagaccctgtctcaaaaaacgagatttggaaccagagaagccatctgcagtcaggcactcccgatcaaggggccttgaaaaccacacagcagcatgcagctaaacgcacacagcatcgtgctcatttccctgggatcccatcagcacagtcctcccgtggcctgatgcagtgatacagagggagccagtgacatgggaagggctgttggtgctaaaaggcccaagtgcccccccggctgttctgggtgacatttctgtcctgttctctcccctgtccactctgcagcccacccgaacccgctgcccagtctcccttgggtggaaactgaaggctgccagaaagaagacaagaaacacaactactcagctcaggcattgagcgctttaattatttgtacgctacagagtccggctctgggtgaagacagcgccttatctcctgaagaatagagtgcagtaccctcaggacagtattcctccctttgctcatgctagttctaggaatccaggttgctagggagaaggcaccgcctgattcatgaggaatactttgctattaatgatggtagtaattatatgcatttcttattcccatatttagaacatattcgagccatctctgactggtcagggatccccctctatctggcttcgcacctgcagccacttcctccctccctcccagcacctggagggagcatttgctcccctgtt

SEQ ID NO: 1291 - DNA, 1900 bp, Homo sapiens
  misc_feature (1)..(1900): DMR8:23031901
tttgcagtagcatttttttttttttttttgagacggagtcttgctctgttgcccaggctagagtgcagcgatctcggctcactgcaacctctgcctcctgggttcaagtgattctcctgcctcagcctcccgagtaactgggattacaggcacccaccaccgcacccggctaatttttgtgtttttagtagagacggggtttcaccatcttggccaggctgttctcgaactccagacctcgtgatccacctgcctcacatatttcaagtgattggcaatcacatgggcctagggactactatattagacagtgccatcttagacctttaaaatgcacagaagaatgtcctaatacctgttctgaatgagctcctagccagtggaagatacaccaggagcagaagtcatacaacaatgggaaaagccttcaaaattaaagctcacaccatcagccatgggaagaaaacgggaggaatctctatagagtcaaagaatgatccaaagaaaaggggactaaagctgccctggaatgaggatatgtttcaaaattggaaagtgtgagtcccgccaactctgcttttcttttaccagattgtttttggtcaataagtctttttaattccatacgactttgaatataagttcttccatttttaaaataacaccactgagattttggtagggatttcattgaatctgtatattgctttgggtaatttaacaccattttgatctatgaacatggaatatcttcctgtttattttgcttttttaaaatttcttacagcaatgtttgatagttttcagcgtaaaagttttgcagtagcaaagaacaatccaaaaaggaaattaagaaaacaatttcattgacaatgacataaaaatgaataaaacatttaggaatgatatttaacaaggaggtgcaagacttttaaaaaacatttgtctgcacatccaagaaactcaatgatctccaagcaggataagttaaaagagaactacactgagacacattatagtcaaatggacaaaagcccaacaccaacagaaaatcctgaaagtagcaagtggcccactcagtatgtacaagggaacctcaataaggttattagctaatttctcaccaggaaccatagagcccagaagggagtgggtaacatatttaaagtgccaagaaacaaaaacacaagcatacaaaatcctgcaaccaagaatttgatatccaggaacattatcattcaagaatgaagaagaaattaagaccttcttagataaatgaaaggtaatggagcacattactagtagatctgccctgtgaaatgctaaaaggaatcctttaggaggtaatgtaatgacattagataatagctcaaaggcatacgaagagataaagaacactggaggccgggtgcggtggctcacgcctgtaatcccagcactctgggaggccgaggcgggcggatcacgaggtcaggagatcgagaccatcctggctaacacggtgaaaccccgtctctactaaaaatacaaaaaaaaattagccgggcgaggtggcgggcgcctgtagtcccagctactcgggaggctgaggcaggagaatggcgtgaaacccaggggccggagcctgcagtgagccgagattacgccactgcactccagcctgggcgacagcgagactccgtctcaaaaaaaaaaaaaaaaaaaaaaaaaaaaaaaaaaaagaaccctggaaaaggtaactatttaggtaaatataaatgctggtacgcagctacttaggctgctataataaaataccatagaccaagtggcttaaacaatagacatttatttatcatagttctagagatggccaccatcttgctgtgcatttgcgtaacctcttccttgcacacaccag

SEQ ID NO: 1292 - DNA, 100 bp, Homo sapiens
  misc_feature (1)..(100): DMR8:23203001
taaaaagagaatgaggtcaaattaattttaacaatgtactttttggacctaaaatatccaaaacattagcatttcaacatgtaaacaagataaaacattg

SEQ ID NO: 1293 - DNA, 1000 bp, Homo sapiens
  misc_feature (1)..(1000): DMR8:24735901
ggaacagaaaaccatgttcttactcataagagagagctgaacgatgaacacatggacacagggaggagaataacacatattggggcctgtcagtggggcaggtgggtagaaggagagcatcaagaaaaatagttaatgcaggctgggcttaatacctaggtgatgggttgataggtgcagcaaaccaccatggcacatgtttacctatgtagcaaacttacgcatcctgcacatgttccccagaacttaaaataaaataaaatgtatgggagactttaacataaccgcttgtagttgattaatcaagtagttgcatacatgcatatgtgtgtgtttgtgcatgtgtgtgtttgtgtgtgtgtgtagaaagagacaaagaataaaaaggatctctataactaaaggtccaagccactggcctctaaaccaagaaatgtatttaacagcattaaaagtggcaacaccagcagcagagaggtcaagataaaaaacacacaggaacagcagaagtgacagcagcaatgaaagagggatttcactgtgtcccacagaagacacctgctatgtttgcagtcctactgagacaaatgttactgaaatgctttggtcttccatttttctatccaggttggtggctaccatgtttatttatataccaccactctgtaactaaagctaaacgtgattctttacttctctcccttctacccaacaccaatgtcaatgtcagtgtggcctttgaaaatgagatctgcaactacaataaaactttgttcaatgcaactaccatgctgcttattacgaccttgtattacgaccttgtgatactgtgaaatatatatgtggtttcctcctctgtttcctggcacacaataactaaaagttttggaatctcttaagtgataagtgcctttgtgaatgccagtgagaagactggtggctttgggctcctggatagcctcaggatggggtctggttgccacgggaaccaaccaagaga

SEQ ID NO: 1294 - DNA, 1100 bp, Homo sapiens
  misc_feature (1)..(1100): DMR8:25270401
tagccctattggtgttaattttactcatagttatggaagtggtagttacttcaaagcaccattagagttaacaattttgatgttctgaatttgttaaacagtaagaatacttatgtcacttaattcccaatccttttttaagaaaaaaaaagttaatttaaaaacaataaacaaaaagccattctcaaacaaaattatgtgatgaacttaaggaacaaacgaaactcttggatttttcactgcgaaattcaattacgttcaaccaaggtcctagatcaggtcttctttttcatagactacagtatgtaaggatccttttgaacatggcagaccttgctttctaaagtatcctatgattttttaatatagtcatttcctcatttccacaggcaattggttccaggacccccacaataccgaaatccatggatgctcaagtctctgatataaaatggcatagtatttgcatataacctctgcatttcctcccgtgtactttaaatcatgtctagattatttataatacctaatacaatgtaaatgctatgtaagtagttattataccgtattgtttagggaataatgacaaggaaataaacctctgcttactttttttttctatatttttaatcatcagttggttgaacccatgatatggagggccttgtgtatataaaaatcagtctagctaatagtgccattgttgttggctttgaacagtagatagatagggttcccccaggatctaaatgataaattctggattttttttaaatttttttgtgttcattaaagagtgcttaaaacctttaagcttaaaatctcacccttcagaagaaatctttcggtaagagtttctctttgttctcttggtaagtaaagaaaaactttctaattcaatgaaatgatgacacagacaagggacatgcatttatttgatgattgttttaagccgaaatatccttcttgtggagagattcagggaaaatacaggcaaatcaaattcagttgccatgaattctgctctgcttttgacaccccgtcattaagagatcagctcattagaaacgctctcctgtgctgtgtccctcatttctccg

SEQ ID NO: 1295 - DNA, 700 bp, Homo sapiens
  misc_feature (1)..(700): DMR8:25659001
gatgcagtttcttcctagcctcgatggtctttacaatttggcacgattttgcagtggctggtacctgttgttcctttccatgtttagtgcttccttcaggagctcttttagggcaggcctggtggtgacaaaatctctcagcatttgcttgtctgtaaagtattttatttctccttcacttatgaagcttagtttggctggatatgaaattctgggttgaaaatccttttctttaagaacgttgaatattggcccccactctcttctggcttgtagagtttctgccaagagatccgctgttaatctgatgggcttccctttgtgggtaacccaacctttctctctggctgcccttaacattttttccttcatttcaactttggtgaatctgacaattatgtatcttggagttgctcttcttgaggagtatctttgtggcattctctgtatttcctgaatctgaatgttggcctgccttgctagattggggaagttctcctggtaatatcctgcagagtgttttccaacttggttccattctccccatcactttcaggtacaccaatcagacgtagatttggtcttttcacatagtcccataattcctggaggctttgttcatttctttttattcttttttctctaaacttcccttcttgtttcatttgattcatttcatcttccatcacagatacccatt

SEQ ID NO: 1296 - DNA, 2800 bp, Homo sapiens
  misc_feature (1)..(2800): DMR8:25933401
acacagacttccaccttatggggacacacaggaatatgccctaaagacttccattttgggaactctgatccacagctggtgggagtataaattagttcaatctttctggctgtatggcgatatagatcaaaagtcttaaaaatgcatacagcctttgaccccgcaattctattttaaggatttgtccaaaaaaagagtcatggatatacccaaagctttatctacaaaagatgttccttgcagcattgtttataataaatacgatggtggaaaacaaatttgtccccaaatggataattgactatgatatacaaagaaatactacataattatttaaattatgttatagaataacatctaataataccaagagatagtctagtataaaaaaatacgaaacagtaaacataagattatcacatttttgtttaaatacagagagagataagagacaaaactggaataattaccaattatttctgagcggtaagttactgggccattttcattttatttgtccatattttctaaattttctaaaatgaccatacattgtttgggtcagaagaaaatacataaattaattttaaagataaaatctctctagagggttttggttgttttaagtaaaaattcaatctgtggcaatgggaaggaaagtctgcattcctgaatggtgtgctggcttcttgacttaaagcttcactgccttacatgatggaagtgcacctccctttgagggaaaaagaatggtcagctaagagcaaatcttaggactccaggtgaaggaccaggctgctgcttattgttgacttcatgtgcatacacacacacacacacacacacacacacacacacacacacacacacacacaccaatcttgtttttgatatctgttctctgaaaacataggtcagcaatacttcaggcctttagaaagacggatttccctttatgacttttgacttcatcctctgataattctgctattttattttgcccttattgtggtacccacaacctcatttattctgaaacactgcaggaagacatcattgccgttttcaaattttgtctctccaccagtcatttggaagggaagagagttggaagcacacgaatccaaattcagcccatggactcacaaaatagactctgtccatgtcgtatcacaagtcgagtttactgctaatagaggcggtcctgctgcatagggccctattcaccggtctctgcatgctcaaccaaagtgacacaatgtgcatggctggagctcgcacgacactccctgtacttgaacatcggccaggaagttgagtgagagtgtgacacttcagaggtgccttagagcacacgtacgtttgccggggcaatgacgtatgcatcccgtatcccatcaggtctgctttttgaaaaaatccttattaatatcctacggcgccattgccaaaaacacaaaatcccaaaggcaaatcccctacgttctagcactgccagaactagtaccaccaggctttgctcagggactgcgaactgccgcagttgcttctagcaaggagcaccaagcccaccccattagcttcagccacaggaccaagcgacttgcaagctgtttctcgccaggagtgtgggtgggcagcgggcaggatcccaacgcgacaactagactcaattgactgtaacccagaaattttttttaagtggcttttttggatggtggtacccaaggccccccatccttcattcttcctaacagttatgcatcaggaaaacaaagcgatggagggggaagtgggggtgttgctgcagccagttggtgccaaatacagttaaggatggagagggaggtgggattggaaagggggggaaaagcaagtcactttcaatcaagtgtcacacctttaaatagtggttaaatctttgcattatgcagctcatccctttacaacatggggttcccttagagaattccctgtttacactgggaattcctccagggccgcatcaataaagctgaacagatgtcagggtggaatgccagcggcagtggctgttgtcaggggtactggggagggaggcacagaacaatgagaaacggcatctgctacacaaagcccttgcgcgtgggtcaggttctgccagtgtgtagggattccaccctaccctttgtctgggcacattgcctttcttgtttctcaatgacaagggttgacacatgtcacccggccctatcaggagtgttatttgtttgccacttgcatatgcaccagtgttcctgaccttccccgcatctctgctgaatgcacccagcaaagctgaaactctccagccctgccccaatctatgatttcattatgcactttgagtcgaaagtgggatgtagatgtccttctttttaattaaaaacatgattgatgagatttaactgacagtaggaaatgcaatttaaatattccttaaagaggcactaaccctgtttgtgtggcaaggcttgcgtggctttccaaagttgcgaccggtgggagaaaggaaattaaaataaaagcccgttcaagtccgctcggctgtggaagggtggtaacgttagacagaaattgcagccgtgtaaccagaaacttctgcgcattaggagccgatgtgaagtgttgctcaggaatggcagtgttcagtgtggttagaggcagcagaggagtagagaagagtatgctatgaaatcatgtggaagcaaaacaggctaattcaccacatttttaaagcaacaatctgatcccaaaagacattatactaaaactctccctg

SEQ ID NO: 1297 - DNA, 200 bp, Homo sapiens
  misc_feature (1)..(200): DMR8:26526901
ggttgggtgatatcagaaagtggggacaatcctatgactgggcatctcagtgcatcttctgcagagcagggcagatgagactgaggctaatgctgtagttgacaaagaagcagtgatcactcctattagttagaatgggggagtttggcattttgtggcttgagccaatattcagattttattaaatatgactggggagt

SEQ ID NO: 1298 - DNA, 500 bp, Homo sapiens
  misc_feature (1)..(500): DMR8:27797501
atccatttagccactctgtgtgtcttgattggcaaacatattctatttacacttaaagtaattattgataaataaggatttactattgccattttgttttgttttctggttgttttatatatattcccttcttcctctcttgctgtcttccttgggatttgatgattttctgtagtggtgtgctttgatttctttatcttttatgtatctactataggttttcgctttatggtcatgaggcttacataaaatatcctataatataacagcctattttaagctgataacaatttatatcacctacaaaagctctgcactttttttcccttcaacattactaattttacagtttacatctttttatgttgtgtatttatttaagaggccttttccttcttcgatctcaaagaagtagactgttatgtcctgataataggcaagatgtagctaactaactgttctcttctactctcaggtcagaaacaatgttgtgttgttcg

SEQ ID NO: 1299 - DNA, 600 bp, Homo sapiens
  misc_feature (1)..(600): DMR8:28033801
aagtgtagagacaacatgctctttaaatatatgattaaactaaaagagggaggacagtggtcacgcctctaggtcgtctgggtgcccctgccatgggcttcctaaagtccctgtgctcacttggatcacaacccttctgaagtgattctgtgttagtttactcatttgtccggctcctgtactcagccattagctcattgaaatcaggcacagtgtctcatccatctttatgtcctcaacatctgggaataacttaagtagtgtttgagaaatatttgctaaatgagcaattattgaacgactaaataaatgaatgaatgacaacgtgctatgaccggacaataagtatatgtcttgaattttctaaggatagtccagatttcataaactttttgttaaacttttaatgaaatacaatttgatttgtaatgtcttggcgatgtttttttcccagggaaataaatacataaatgagaggaaagaaaaatataaagctagacctatgagagacattaatcaatttcggccagatggtaatcattagtaaagagagtaaaaatgtgtttgctaaaatttcagtagagagctctgtgatttttt

SEQ ID NO: 1300 - DNA, 1700 bp, Homo sapiens
  misc_feature (1)..(1700): DMR8:28444501
acggagtcttgctctgttgccctggctggagtgcagtggcgtgatcttggctcactgcagcctccgccctgggttcacgccattctcctgcctcagcctcccgagtagcttggactacaagcacccgccacttcgccgagctaattttttgtattttttttagtagagacgggatttcaccgtgttagccaggatggtctcgatctcctgacctcacaatctgcccacctcggcctcccaaagtgctgggattacaggtgtgagccaccgcgcccggactttttttttttttttttttttttttgtatttttagtagagacagggtttcaccgtatttgccaggatggtctcaatcccctaacctcgtgatccacccacctcggcctcccaaagtgctgggattacaggcgtgagccaccgtgcccggcctatttcttcattttcacaatcatcttgcatcacttaggaggccgatgagggcaaactaccatcctgtggagagaggaactgagtcacacccgccttgtatcccaaacagccaagcttgtccttggcaagctcatcaccggcatgagtcaaaatatcgcagcatactttttgggggatttaatgatgccgtatgctctttatcaaaactacgaaacataaatagtgattataattagtatatttacaaaaaacacaagaatagacagatacaatcatgagtcccattcacgaagagctattcttctctcactgcttaatgtaccctggtttccctttcaggcttaattagcgcaactttttaactttttaatttataatgaatgctttcacttaagcagttcctgctagggtttgacagatggttaatgtcaaaagcccatggggatggcttagctttgggttttgtgttttcgaagcaggagaaatgtttgactgtgctgataatttctcagcatgtatcaccatcaacttttattgtccttcaaattccccgttctcccatggacttctcttccactccttgcctatcaggggctggaaaccaggcagaagcacgacataatggcccatgtgataagcctcataaagttatttttctcaattaatggcttcactgacaattttactgctttgctctaagctcccccgttcccttgggcatcaggacacatgtctatggtaagcctcatccagtccaacaaaactggccctacagaattcagatggccctgtttaaagaagctcatctctctctctctttcttttttcttttttttgcaacataacacttgaaaatacattttaacagaaagtaatagagctttaaagcagagctataaaagtgatttattcctgagtacgtacttattcctctcccagctgacatccattttatattaattttccttgagtgtgtatcttcatctcttttctaaatccttactactatatatgaactttgaattccacccttattcctttctacttcgtgccaaagacttgcataatgtgctgaaagagagccacagggcttcggagccacgatttgggaaactctgctaggcaatgataatgctccctagtcacaattactggctttattaggtagtcaattcgctgttttttaattaggaagggaaaagttcttaattcattttttccaaagttactttaaatgcatttttcctttttttttttttttttttttttg

SEQ ID NO: 1301 - DNA, 2600 bp, Homo sapiens
  misc_feature (1)..(2600): DMR8:30585101
gcttgagtccggaaggcagaggttgcggtgagccgagatcacgccattgcactccagcctgggcaacaagagcgaaactccgtctcaataataataataacgataatagtaataataatacctgcctcatagaatagtgaggattagaggagttaataaagcaccgaaaataatgcctgcaaatgaaacagcattatctacacctattactgttatcatcaccatctaacacccatcataattttctgtgtgctggtgtctttaataaaggcaatataaaacatttaagaagaggatcagctactagacacaaagtgatctcatttatgtaaagcagaagaaacaaaacttctaaaaatttcttaaaaagcaaaaacacatacatattaaatacatcgtaaagatgtggaaaatacacaccaataggtatccccagagaaaagaatacagtttgcttagagaattttcatttttttgttctgcagacttgacaaaggttttattaataatatgcagaaatatttgtgtattgctagtgtaaaattttaaagaaataacctaaaaataaggaggatcatacttactaataattcacgcacttgccactttttctcagccccacattaggctatggtgttctagtgttagcattaaggtacatctttgccctttaaaaaaaaaaaaaaaaaaaaaaaaaaaaaaggccaggcccagtggctcatgcctgtaattccagagcttagggagatggaggtgggaggactgcttgaacccaggagctcaaggccagcctgggcaatatatagagacaccatctcaaaaatttaaaaaacaagccgggcatggtggtgttcacttgtagtcccagctactcaggagactgaggtgggaagagagcttgaacccagtttgacgttgtgagctacaattgtgccactgcactccagcctgggagacaaagagagaccctgtctctaaaacaacaacaacaacaaaaccaaatgcagaatctcaacgagcaacacgccatgccttcctcccttttcctttaacaacacgtgttattaacgtgactttttatcctcaaaagtgtcattatatccactttgcagttccagaaaataggacatttctcaatttacctcatcttctagtgatcttacatttgagacctatcaaaataatttcttgtgtgctacacagaaaaatgcacccccacccaagatgtccacaacgtaatccccagaacctgtgaatacgttaccataaaagagactttggtgactaagaatcttgagatgaggagatctcaagatttggattctgaattggaagaattaatactgttaaaatgtccatactatccaaagtgatccacagattcaatgcaatccctataaaaattccaatgtcatttttcacataaatagaaaaaataattctaaaagtctaatggaaacacacaaaaaaactgaatagccaaggcaatcttgagcgaaacaaacaaaactagaggtaccacactacttcaaactatattacaatgctacggtaatcaaaacagcatgggactggcataaacaaaagcccagtaatgaacccatgcatttacaatccgctgatctttgacaaaggtgccaagaacacacaatgggaaaaggacagtctcttcaataaagggtgtcgggaaaactgaatatccacatgcaggagaatgaaatgaggccactgtctcacaccatatagaaaaatcaactcaaaatggattgaagacttaaacataagacctgaacctgtgaaaatactacaagaaaacacagggaaaacaacacaacactggtcagggcaatcattttttggatttgaccccaaaagttcaggcaacaaaagcaaacatagacaactgggattacaacaaaccaaaaagctgcagcatggcaaagtaaacagactgaagagacaacctacaaactgggagaatatatttgcaagcaatacatctaatatgggtttaatatacaaaatatagggcaggtgccacaactcatgcctataatcccagcactttgggagggcgaggcaggaagattgcttgagcctaggagtttgagaccagcctgggcaatatagtgagacctcgtctctacaaaaaatgttttaagattagccaagtttggcagtacatatctgcagtcccagctacttaggaggctaagatgacaggatcacttcagcctgggaggtggaggctgcagttagctgagatcatgccgctgcattacaatctgggcaacaaaatgagacgctgcctctaaaaaagaaaaaaaaattatatatattttccatatatatggaactcaaaataatagcaaaaaaaaaaaaataacctgatttaaaaattggcaaaagatctgaatattgtctgaaaattcagaaatcctgaaatgtcagaaatattcagacatttctcaaaagaagatatacaaatgaggccaggcacagtggctcatgcctataatcccagcactttgggaggccaaggcatgtggatcacctaaggtcaggagttcgagaccagcctggccaccatggcaaaaccc

SEQ ID NO: 1302 - DNA, 200 bp, Homo sapiens
  misc_feature (1)..(200): DMR8:31535701
atgaaagaaaaagtcttgtggcacccacaccgagaagatgctaagcagagatgtgaggaaacaaagctgagaattgagggacaatccaagggaaagaagtggactgggaaatcggttctcctggcctggaaaagacacgtcaccacaggaaaaaatctggctccagagaacaatttattttaatatgcctcattttgcta

SEQ ID NO: 1303 - DNA, 900 bp, Homo sapiens
  misc_feature (1)..(900): DMR8:33083901
atatctgagattggggaagttttcagacattaattctttaaataaattttgtctctattctccttgaattctacaatgtacatgttagctcttttgaagatatcccataaatcttgtaggcttttcgctcctttttattttctcctctgatcaaatattttcaaatatccagcgtttgagtttaccaatttgtttttctgcttgatcagttctgttaatagtctctattgtgctttttcattttattcattgtattatttagctccaggttgtttggttcttttgaattattcccacccctctgttaaacttctagttttatttgtattgactttctgatttcattgagttgtctctgttctcctgtagttcactgagcttccttaaaataattattttgatttttctttctttttttttttttaagacaacagaaatatattttctcacacttctggaggctggaaatacaaaatcaagatgttggcaggacaacactccctccaagacttcgagaagaagatccttgcctttgagcttctaatggcgccaggcttccctggcatgtggttgcacaactccaatctcaatctcatcttcctgtgctgtcttgcctgtgtctatatgtctccgtcttcatatggcattctcctccctgtgcctccattttctcttttttttttattattatactttaagttttagggtacatgcacacaacgtgcaggtttgttacatatgtatacatatgccatgttggtgtgctgcctccattaactcgtcatttagcattaggtatatctcctaatgctatccctcccccctccccccaccccacaaaagtctccagtgtgtgatgttgcccttcctgtgtccatgtgttctcattgttcaattccc

SEQ ID NO: 1304 - DNA, 1500 bp, Homo sapiens
  misc_feature (1)..(1500): DMR8:37129201
agccttctcctgtctccccatcttattttctgtccctttagatgaggtcaccctgactggatgaaggacacggggctcagaagaggtcagacattagcactgctataactgcagtgctaccgaaactgggcaaacccatccatcaccagctccactactccattaggcctcccatgaaatatgccctgctctgaatcgcacagccatacatctcccggtctagacaccttcctgttgtatgaagatcaatgctgctcggtcatgcatcatgtgtcatgcagtagccctcactctaataaccgtgtctattctctagtctgcagtataaattatggcactgggaaagtactatattattcagcaaccttggtcactaatggattattgggtttattggttgataatgtgagctccctttcctccttctatctttcttttttctttttctcatttttggctgaatctcactcttattttatttatttctctctatttttattttatttgttcaagtttgagtgatggctgctttaggcttctgtcaacatactcctgcatcaaacccctaaaatgatgatgctctaaaataagcccaattaggaagacttctctgtgatcccctattagataatggactgagtccagtgaaggttgtttggccttcaatttccctgggttttggttgaggtgcttttttttttttcttttgaggcagagtttcacttttgttgcccaggctggagtgcaacggtgcaattttggctcactgtaacctctgcctgccgggttcaagtgattctcttgcctcagcctcccaagtagctgggattacaggcataagccaccacgtctagctaattttgtatttttagtagagatggggtttctccatattggtcaatctggtcttgaactcccgacctcaggagatccgccctcctcagcctccaaaattgctgggattacaggcgtgagccaccacacccagcctaaggtgccttttaattgaagggcacttttagggaaccaaatgcagtttgggcccccagcaacctctagcgtcccatggggctcagtctcatgaaacccctttctgcattccttctctccacttgtctttctatcctttgacgacttatattcagtgctgctggacgctgataattgtgattgcaacactggctctcagtttttcctctctgtaaaatgggtgagagagggagagcgcacatcaacagaaagaaggaaaaattaaattatagtaaagaacttggaatgtaaaagttgaacttttggggcatgttaactctaggaaaagttggattatctgacattctgaaaccactgaaattttatattaaaaattacaaacttaattagccaggcatggtggtgcatgcctgtagtcccagctactcaggaggctgggggaggagaattgcttgagcccaggagttcaaggttgcagtgagttatgactgagccactgcactccagtct

SEQ ID NO: 1305 - DNA, 1100 bp, Homo sapiens
  misc_feature (1)..(1100): DMR8:37247501
tcccaaaagctgtggcttcaggccacaaacaaggcaggagatctggctctcctccctctgtcactggctgaaatgcccacccgtggccttgggactgcctaagccaggctcggaagcgaccctgagcatcccccagagcactccttcacccacctgcttccctgcagagcaaccctactgacaagggactctttccttctcgccccctggaagcagccaggccgtgcaaggacgggcaccccagcaaggggggctcaggatccgagccagtcaagtgcagacaatctcgggagacagatggccaggcggatgggccggcagatagaggctcctgctccttgtcaagatgacactcaaaagtacatccccgtcatcgcgggttgtcagtggtgtgtcagcgcgagatgccgtgtgtgtttttgggcactctgtgagtttggaaggctgagctggttcccacttccatagcaacgacaaaattccagccccagacgcaagtctctgagttagtgtcagacatgggtgggggggcagcaggcagagaggggtgtcactcccagcagagagcagcgccggagtggcgagcatgggcaggaggcagttttctggaagtctgtggggagaccgtgtgtgggcacagagtaacagaaggcaggagctaatggctgagctaacgggaaatgcaatctgtcggtttgagtaagctggggagtcggggtttcctgagccctggtaccttccaagacccctgaagggacctctgggtgtttagaagaaaatccaggtgggttcaaactttgtgaagtctggagtaactgatgtgatgttctcatggaatggaatatggaaggggaaaaacataatctccaaagctagtaataagaaaaaacataatctccaaagctagtaataagacacacacaaattaccagatagatttgtccctccttgactgagggaggtaaatttctcctgactctctgaaaataagttcattcacttgtgaatggctgagatgttgtatatctagagaaagaagattggggtaacggccctttcccaatttctacttctcctgtccctctttctctggtcaatca

SEQ ID NO: 1306 - DNA, 1700 bp, Homo sapiens
  misc_feature (1)..(1700): DMR8:37533701
ggccttggcatagaagcagcatccacttgctagccctgaattcaacatacaaagcaaacccttgaacgcgggtagggtggtctaggaaatgctgatctttgcaggccatctcagggttttggtgtagccccagccaaagacagagatgtgtagaatcttacgtctcatctctgacatcaaagggactccactggctacaaggacccatcccagctctccatctggaaccacagttgatagcaggacattttcctggtcagtttttcttgggagattttttgtctgagcactaagttattccatgtgggcaattttcccacttgttttggggtcactggaccatacttccttctgtcactttctgcttctgcacagagcacctgcagtgaccttattccttgcaagtaaagagatgctttttccactgaggggctcctcctgctggtctctgcagagagaatgcagagtccctgagggtcagtgaaaagctgtgtctgtttccctcgcccttagagggttaaaaccaaatgcacctgacaactgctggatagtccaaaactctaccatgcctgaccatgagaacataatggctgcatttgcccagacgttgcaagcccctggctcagaaacaaacccaacaacagaaaaataaagggtaaataaatctggatgggaataaaagaaaaaaacagggccgtgtgtattgagtgaagtccttgctcttctcctaactggacatagagttgggacaagtctcttcaagcctttgtgggcctttctttcatgtagcctaaaaaagaatgttaggccagattaattctgagatttctgaaaaccctcatagcaaacagctttggctctcacagcctggaatggtttcaaaagagagtaacaagaatggtggagggctcagaatggtcagttcagaaaagagattgaaaacactgggaatgttcatccaggaaaagagaggacgggggatggtgatggtcctctgggtttcaatcagcccatttgcatgtgatcccattagtgtaactttctttttttttttttttttttttttttgagacagggccttgctctgttgcccaggctggagtgcagtggcacaatctcggctctctgcaacctctgcctcctggactcaagtgatcttcctacctcagtctcccgagtagttgggaccacaggcacataccttcatgcccggttaatttttggtatttttggtagagacagggtttcaccatgttgcccaggctggtctcgaactcctgacctcaggcaatccacccgcctcagcctcccaaagtgctgggattacaggtgtgagccaccgcacccagccaacaatgacttaactttcaccagctcactcagagcggcagcctgtttgcaagtgtcccccagtatttctagagtgacttgggggtgcctcatgtgtgctcaacacacacagcagttttctggtccccatagttctactctcattggcctgatccaggcctctgccaggacacagggcgctgctacctcttgctggggatcgctgtccttgccaccacagagatgctcaagaccagagaaccgcaggctctgcagtgcagtggaggagtgagcctctctccccgtttcgtgttagtctcaagatgagtcccagagctggttccccagtgactaccacatgttagtgtcaa

SEQ ID NO: 1307 - DNA, 2800 bp, Homo sapiens
  misc_feature (1)..(2800): DMR8:37801301
ccaggctcccagcccagtctgcagggcagctgtgggcacccgtgcttctgaacagagagagcaggagcctttgtgggcctcccccagggaaaaggtcccacggggggtggcttatgacagggagaacctgggtgtgggaggaaggtgcagaccactgtgagccccagtattactcggcagcagctgagggctgaggttctcagctctgggagtgagtgagggggaagggggctgaggataaggaattccaggaaaggactgtttgtagataactccagaaggaaatctataaagacctcctaggacatctgagcaggcactccgaggataccagccagtgtcataaattcccagacggcctgggctccaaaggatcttagcgataaggaagcccagtcccacatcttacagctgagcaaactgaggccaggagaagaagggtgccttgctgacagtcacacagtcggctggggctggcgccgggatgggcattgcattcctgccaggtgagggcctcgctgctcacctggctgaacttgggacccattagacacaaaagacactttaaaaaacccggttccttcccagcaggatctgagcccttttgacctgggaacattccaggctgggcaaggagaggtcactttgaatttccccagaacaggcaaaccctcaacctgctcggcctcccattcagggaagcgggggtgcccaccacgcaggctgcccacctaggggagaagaggctgtctgccgcaggtgtgcctagcacgggctgggttcttctgctgggatttcagtggtctttgtaggggaagttgaggaagatgggcctcagggaagtggttcttgagcacaggtctccctctggacctccagctgctggctgggactcacttcagggcccctcgttacagccaccaggatccagttaggggaatttgggcaaagtgtgccaagcgtcgtgcacatggcccgagggcaggacaaggatgctggtggaggggcgggcccaggccggcgcctccacccccttctcttccaccagctttcccccatatggttctcataaggtctgggcgcagagacagcagccagaggaagtggctgtgtacagagagcttttgtgagagaagagggggagggggaaagagcaaagaaaaagaaggaaagaagagagggaagaggccagagacagagaaggccagagcaagcccagagactccagcacccactcccctccccacccaggggtgcaggtcttagctgcggcacccccacccgggctccgggacctcgcctgttcaaaggcaggggcccagcagaaacctcagtctctcctggactcttccccaccacccactggagaagctggaggtcgctagctcaggatacaggaattccacccatccatcctctggggcctggaagcccctcccctgagagctccctctgctgcaggatgttagagtcagggtcccatcctagggagagccctgggcagagctcagagctctctggggctcactggttgaatgaagaaaactgcagaggccatcgtgctggctcctaagggggcacttgtgactccgcccccagtgggtccaagatcccaaatgtgttatttggccggagttactcctgcatgtgcatgaacccaaccactcctgaagccaccgaagtccctgcctgctggctaccacggctctcccctctgtgattagggagggggagtggcaacccctcgtcctggggggagtgtgagaatttcccccaaaggcacaggcaaaccagtgtaatttgaacctaaccataaattgacccttcaatgcgggtcatgtttttaaagaaagagagtgtttctaagtttatcccacatgggagtcattgggagaagaaccctttcctgatggagaataagttccagccacctctgagttgatcgctgtccttccactccgtggaggcaccggctgctcccctcagcaaagtccagagaggggaggagagttcccggacagcctggacccagacactgctatcttccccatcaccccagaggtagaggctgccccagcctccctgggagcagccagagagcaggggcggggagaggagggaaatggcccgggactgggggaccagaaggaagatccgctaaccgctaggaagggctgctcagaggggctgtttattttcattcccccagcccagccgctctgttctatttacagctcagacactgacaggacgaagctgcctcctccccttcctccctcctccaggggcccccatccttcccaaactccagaacattcctttgctttcaggactgggttatggggggagggggcagagaagccgtggagtgtaggtcactccagcagcctcccaggacactctcagctctcccagccctttcctgggagccagggatgtgtgcaggatggatggggccaggtgaggcacgggagccccatctgtcacagaggagcaggcaatggacagggtgggagagcgagtcctggggagggagttccagcctcaaccaaggggccagacatctcccagctgggaagggaagagaaggtctcagggccccctctaccgcctctgttcctccctctcctcctcccttcccctgccagggctcctagccttgctgggaattgtgtatcaaggcagaaactatgacttcaggcttcaggagactcagcatccaggatgggaaagaccatcaaagataagatgtggggtctccagtctacccccagggaggggccagcctgcccacggtgag

SEQ ID NO: 1308 - DNA, 400 bp, Homo sapiens
  misc_feature (1)..(400): DMR8:37996501
cccacgctctggggtggctttcgaggacattccggctaccccttcccatcacacccccatgtctttcttttttgttgacccgcatgttttctcatgtacatgccaacccagaggttagggacagaggcgagtccatgggcagaactggtccccagtgcgctgggacacttaataaatgtcacattttgtgtctccaataaaggaaactgagggcctgttggcagaagcccagcctgggaaccaggaggcggctgctcaacggcgctgggcattccctgtgagtccaccacggttcccaacatgacgccttaggttttacatggggaagtagtgcttcctccatttcactcgtggaaaaaaaaatggaatttcagagtgatttgtaaagggtgcataggaa

SEQ ID NO: 1309 - DNA, 900 bp, Homo sapiens
  misc_feature (1)..(900): DMR8:39112301
ttttggatattaatcattttattttttctatatcttgcacaagttttcttcaatgtgttattgatcttttcacttgtgatatcctgatttttgtactaagtttatcaacactttcttatggcttctgcattttgttttccgtattaaggcttcccttggtacaatgattaaaacaaatagtttcccatactttcttaaagttattttacaactttagacaacgtagcctttcagtctttctaatagttttgtaactttgtacatgaagtcttgtaatccacactgtggtgctagataggaaactatatttgtatttttccaaatggataaatactgatattacatcattcccccattcatttgaaatgccacatttagtagatgttaaactatcaccacccccttgcccccaaagtacacaggtaggtctcacttagagacctgtcatgagactgaggatacactgaaagggtttaaataaagagagtttagctatgggactatctatagagatgtgggcatcaataattaacgatgaaacgcacagactagtaacagtagaaagccatatcacatgtgttgaattgattgtttgcaaagatgacaatggccttaacacttcctccatccctgtgtgtgcttccattttgcaacatttctttgtcattcctcccattgagaggtagaatgtatttcttcactctctgaatctggttggcctcattacttgctctggccatttgaatgtggtagaaatgagttgtgagacttccaagtctatgcctcaagaggctttgcagcttcctctctgctctcttgaagcactgtcttgactgctacatgaagaatcctagactaggacgataagaggatgtgtgaaacagagatgactcaacctag

SEQ ID NO: 1310 - DNA, 400 bp, Homo sapiens
  misc_feature (1)..(400): DMR8:40433501
tgaagcgagaagggaagtttagagaaaaaagaataaaaagaaatgagcaaagcctccaagaaatatgggactatgtgaaaagaccaaatctacgtctgattggtgtacctgaaagtgatgtggagaatggaaccaagttggaaaacactctgcaggatattatccaggagaacttccccaatctagcaaggcaggccaatgttcagattcaggaaatacagagaacgccacaaagattctcctcgagaagagcaactccaagacacataattgtcagattcaccaaagttgaaatgaaggaaaaaatattaagggcagccagagagaaaggtcgggttaccctcaaaggaaagcccatcagactaacagcggatctctcggcagaaaccctacaagccag

SEQ ID NO: 1311 - DNA, 400 bp, Homo sapiens
  misc_feature (1)..(400): DMR8:42749401
cacactgcatgcctatatcaaaatatctcacataacccatcaatatatacaagtcctatgtacccacaaaaattaaatattaaaaaatagaataactgtctgatccagcaatttcacttctaagtatatacccaaaataactgaaagcagggactcagaattatttgtaagcccaagttcatggcagcaggcaaaaggtagaagcaacccaagtgtccattgacaggtgaatggatacataaagggcagtaaatacagacaacggaatattattcagccttgaaaatgaaagaaatgttgacacatgctacgatacagatgcaccttgaagctgttacattatgtgaaataagccagtcacaaaaggacaaacacaatatgatcccccttatatgaggta

SEQ ID NO: 1312 - DNA, 1600 bp, Homo sapiens
  misc_feature (1)..(1600): DMR8:42814301
tatcatgaggctgcagtgtagcagcaggcacctcataaatgacagctgtgtggcccgtttcaccagcgtggcttacatcaccccacctcatgtttatttctgagtgatcactcaactcaccacgtgctcgtcagcccatgggctcctgtcccaaagtaggaatcagatgcaggcaggcgccaaacctgcagtgcaaacagcctgcaggggaaggggtggggatgccattgcggccgcagagtcagtgctgagaactgccctggggcagccacagcacagcactggcccttgctcctctgtgaccccacagcgaggaccactccccatcacagccactgcagggtgacccctcactcagctccagcccggtcaaggctgcccgtgcacttgagttcacactcgcgctggctgggtgtgatgccgcccgagcacaccgctctaaggaggaggaagatgaagcgggactttcaccccctgccctgggtggtctctctctcaccaggcctgggctccgtttcttcagactgcgcttccccggagaagcccttggggctttccctgcctatagacggcactcggtccctcaagaagttctgatactgttgggtctccaaggggaaggagtccatagttctcctgaaactgccaaggtcatgaaaaacaaagtctggtgtgaggacagaacgcaatgcagctcccagaacagaaaaaggacgctaagtggaacagcggtgacctcagaatacagttgggaatttagttcagagtaacgcactagtgttggtcgcttagttttaacaaagctaccatgctcttgtagggcgaaatcattaaaggaaactgaaactggatgggaaatacataggaacttcgcaaatgttctttctccctccctccctctctctctctctttctttttctttctttctctttctttccccttcctccctccctccctccctccctccctcccttccttctttccttccatttctttttttctaattttgtagagacagggtctcactctgttactcaggcttgtcacaaactcctgggctcaagagatccttctgccttggccttccaagtagctaagaccacaggtgcacaccaccacacccagctaagtttttaattttttttttttttttttttttttttgtggtagagatagggtttcactatgttgcccaggctggtctttaactcctgggctcaagcaatcctcctgccttgccctcccagagtgctaggattacaggtgtgagccaccaggcctggccaaattttctatacatctaaaattattccgaaatttaaaagtttatttttaaagagagaaagagaaagggcccaggttttagtctcttactgtgcaggaaaatccctggtccttatacaaatatatttacctctttcttatctaccagtttctttaaaaaaaaaaattctttcacagggcaacctagtcaaaccaaaaacatggacatgtttcctctatgcatacagtacctatctgcacacatttacctaatacacgataggtgattcttcccagattagagaaaaatctgctccaggaggactgagaaggagc

SEQ ID NO: 1313 - DNA, 200 bp, Homo sapiens
  misc_feature (1)..(200): DMR8:43413301
tctgatggtagtttcttttgctgtgcagaagctctttagtttaattagatcccatttgtcaattttggcttttgttgccattgcttttggtgttttagacatgaagtccttgcctatgcctatgtcctgaatggtaatgtctaggttttcttctagggtttttatggttttaggtctaacgtttaagtctttaatccatc

SEQ ID NO: 1314 - DNA, 800 bp, Homo sapiens
  misc_feature (1)..(800): DMR8:44047001
taaaaattagacagcagaattctcagaaacttctttgtggtgtctgcgttcaagtcacagaattgaacatcccctcacatagagcagttgtgcagcactctatttgtagtatctggaagtggacatttggagggctttgtagcctatctggaaaaaggaaatatcttcccatgaatgcgagatagaagtaatctcagaaacatgtttatgctgtatctactcaactaactgtgctgaacatttctattgatagagcagttttgagacactcttcttttggaatctgcaagtggatatttggatagatttgaggatttcgttggaaacgggattatatataaaaagtagacagcagcattctcagaaacttctttgtgatgtttgcatccagctctcagagttgaacattccctttcatagagtaggtttgaaaccctctttttatagtgtctggaagcgggcatttggagcgctttcaggcctatgctgaaaaaggaaatatctacctatagaaactagacagaagcattctgagaatcacgtttgtgatgtgggtactcaactaacagtgttgatccattcttttgatacagcagttttgaaccacactttttgtagaatctgcaagtggatatttggatagctgtgaggatttcgttggaaacgggaaggtcttcatagaaaatttagacagaagcattctcagaaccttgattgtgatgtgtgttctccactaacagagttgaacctttcttttgacagaactgttctgaaacattctttttatagaatctggaagt

SEQ ID NO: 1315 - DNA, 300 bp, Homo sapiens
  misc_feature (1)..(300): DMR8:44360401
tggaaacactcttattgtagtatctggaagtggacatttggagcgctttcaggcctatggtgaaaaaggaaatatcttcccataaaaacgacatagaagctatctcaggaacttgtttatgatgcatctaatcaactaacagtgttgaacctttgtactgacagagcagtttgaaacactctttttttggaatctgcaagtggatatttggatcgctttgaggatttcgttggaaacgggatgcaatataaaacgtacacagcagcatactcagaaaatactttgccatatttccattca

SEQ ID NO: 1316 - DNA, 400 bp, Homo sapiens
  misc_feature (1)..(400): DMR8:45228001
atctaatcaactaacagtgttgaacctttgtactgacagagcagtttgaaacactctttttttggaatctgcaagtggatatttggatcgctttgaggatttcgttggaaacgggatgcaatataaaacgtacacagcagcatactcagaaaatactttgccatatttccattcaagtcacagagtggcacattcccattcacagagcaggttggaaacactctttttggagtatctggaagtggacatttggagcgctttctgaactatggtgaaaaaggaaatatcttccaatgaaaacaagacagaagcattctgagaaacttatttgtgatgtgtgtcctcaacaaacggacttgaacctttcgtttcatgcagtacttctggaacactctttttg

SEQ ID NO: 1317 - DNA, 900 bp, Homo sapiens
  misc_feature (1)..(900): DMR8:45252501
tccctttcgcagaacaggtttgaaacaatcttctcgtactatctggaagtggacattttgagctccttggggcctatgctgaaaaaggaaatatcttccgacaaaaactagatagaagcattcgcagaatcacgtttgtgatgtgtgcactcaactgtcagaattgaaccttggtttggacagagcacttttgaaacactctttttgtagaatctgcaggtggatatttggctagctttgaggatttcgttggaaacggaaatgtcttcaaagaaaatctagacagaaacattctcagaaacaccttcgtgatgtttgcaatcaagtcacagagttgaaccttccgtttcatagagcaggttggaaacactctttttgtagtatctggaagtggacatttggagcgctttcaggcctatggtgaaaaaggaaatatcttcccataaaaacgacatagaatctatctcaggaacttgtttatgacgcatctaatcaactaacagtgttgaacctttgtactgacagagccgtttgaaacactcttttttttggaatctgcaagtggatatttggatcgctttgaggatttcgttggaaacgggatgcaatataaaacgtacacagcagcatactcagaaaatactttgccatatttccattcaagtcacagagtggaacattcccattcatagagcaggtttgaaacagtctttttggagtatctggaagtggacatttggagcgctttctgaactatggtgaaaaaggaaatatcttccaatgaaaacaagacagaagcattctgagaaacttatttgtgatgtgtgtcctcaacaaacggacttgaacctttcgtttcatgcagtacttctggaacactctttttgaagattctgcatg

SEQ ID NO: 1318 - DNA, 300 bp, Homo sapiens
  misc_feature (1)..(300): DMR8:45519101
cgttggaaacgggcttacatgtaaaaattagacagcagcattctcagaaacttctttgtggtgtctgcgttcaagtcacagaattgaacatcccctcacatagagcagttgtgcagcactctatttgtagtatctcgaaatgtacatttggagggctttgtagcctatctggaaaaaggaaatatctttccatgaatgcgagatagaagtaatctcagaaacatgtttatgctgtatctactcaactaactgtgctgaacatctctattgatagagcagttttgagacactcttcttttg

SEQ ID NO: 1319 - DNA, 200 bp, Homo sapiens
  misc_feature (1)..(200): DMR8:45532501
agcgctttcaggcctatggtgaaaaaggaaatatcttcccataaaaacaacatagaagctatctcaggaacttgtttatgatgcatctaatcaactaacagtgttgaacctttgtactgacagagcagtttgaaacactctttttttggaatctgcaagtggatatttggatcgctttgaggatttcgttggaaacggga

SEQ ID NO: 1320 - DNA, 1500 bp, Homo sapiens
  misc_feature (1)..(1500): DMR8:45572801
taaaaattagacagcagcattctcagaaacttctttgtggtgtctgcgttcaagtcacagaattgaacatcccctcacatagagcagctgtgcagcactctatttgtagtatctcgaaatgtacatttggagggctttgtagcctatctggaaaaaggaaatatcttcccatgaatgcgagatagaagtaatctcagaaacatgtttatgctgtatctactcaactaactgtgctgaacatttctattgatagagcagttttgagacactcttcttttggaatctgcaagtggatatttggatagatttgaggatttcgttggaaacgggattatatatcaaaagtagacagcagcattctcagaaacttctttgtgatgtttgcatccagctctcagagttgaacattccctttcatagagtaggtttgaaaccctctttttatagtttctggaagcgggcatttggagcgctttcaggcctatgctgaaaaaggaaatatctacctacagaaactagacagaagcattctgagaatcacgtttgtgatgtgggtactcaactaacagtgttgatccattcttttgatacagcagttttgaaccaccctttttgtagaatctgcaagtggatatttggatagctgtgaggatttcgttggaaacgggaatgtcttcatagaaaatttagacagaagcattctcagaacctggattgtgatgtgtgttctccactaacagagttgaacctttctttggacagaactgttttgaaacattctttttatagaatctggaagtggatatttggaaagctttgaggatttcgttggaaacgggaatatcttcaaataaaatctagccagaagcattctaagaaacatcttagggatgtttacattcaagtcacagagttgaacattccctttcacagagcaggtttgaaacaatcttctcgtactatctggcagtggacattttgagctccttggggcctatgctgaaaaaggaaatatcttccgacaaaaactagacagaagcattcgcagaatcacgtttgtgatgtatgcactcaactgtcagaattgaaccttggtttggacagagcacttttgaaacactctttttgtagaatctgcaggtggatatttggctagctttgaggatttctttggaaacggtaatgtcttcaaagaaaatctagacagaagcattctcagaaacaccttcgtgatgtttgcaatcaagacacagagttgaaccttccgtttcatagagcaggttggaaacactctttttgtagtatctggaagtggacatttggagggctttgtagcctatctgaaaaaggaaatatcttcccatgaatgcgagatagaagtaatctcagaaacatgtttatgctgtatctactcaactaactgtgctgaacatttctattgatagagcagttttgagacactcttcttttggaatctgcaagtggatatttggatagatt

SEQ ID NO: 1321 - DNA, 200 bp, Homo sapiens
  misc_feature (1)..(200): DMR8:45580601
aggaaatatcttcccataaaaacgacatagaagctatctcaggaacttgtttatgatgcatctaatcaactaacagtgttgaacctttgtactgacagagcagtttgaaacactctttttttggaatctgcaagtggatatttggatcgctttgaggatttcgttggaaacgggatgcaatataaaacgtacacagcagc

SEQ ID NO: 1322 - DNA, 300 bp, Homo sapiens
  misc_feature (1)..(300): DMR8:45815901
gtttcatagagcaggttggaaacactcttattgtagtatctggaagtggacatttggagcgctttcaggcctatggtgaaaaaggaaatatcttcccataaaaacgacatagaagctatctcacgaacttgtttatgatgcatctaatcaactaacagtgttgaacctttgtactgacagagcagtttgaaacactctttttttggaatctgcaagtggatatttggatcgctttgaggatttcgttggaaacgggatgcaatataaaacgtacacagcagcatactcagaaaatacttt

SEQ ID NO: 1323 - DNA, 6800 bp, Homo sapiens
  misc_feature (1)..(6800): DMR8:45927501
agaatcacgtttgtgatgtgtgcactcaactgtcagaattgaaccttggtttggacagagcacttttgaaacactctttttgtagaatctgcaggtggatagttggctagctttgaggatttcgttggaaacggtaatgtcttcaaagaaaatctagacagaaacattctcagaaacaccttcgtgatgtttgcaatcaagtcacagagttgaaccttccgtttcatagagcaggttggaaacactctttttgtagtatctggaagtggacatttggagcgctttcaggcctctggtgaaaaaggaaatatcttccaataaaaacgacatagaagctatctcaggaacctgtttatgatgcatctaatcaactaacagtgttgaaactttgtactgacagagcagtttgaaacactctttttttggaatctgcatgtggatatttggatcgctttgaggatttctttggaaacgggatgcaatataaaacgtacacagcagcatactcagaaaatactttgccatctttccattcaagtcacagagtggaacattcccattcatagagcaggtttgaaagactctttttggagtatctggaagtggacatttggagcgctttgtgaactatggtgaaaaaggaaatatcttccaatgaaaacaagacagaagcattctgagaaacttatttgtgatgtgtgtcctcaactaacggacttgaacctttcgtttcatgcagtacttctggaacactctttttgaagattgtgcatgcggatatttggatagctttgaggatttcgttggaaacgggcttacatgtaaaaattagacagcagcattctcagaaactcctttgtggtgtctgcgttcaagtcacagaattgaacatcccctcacatagagcagttgtgcagcactctatttgtagtatctcgaagtggacatttggagggctttgtagcctatctggaaaaaggaaatatcttcccatgaatgcgagatagaagtaatctcagaaacatgtttatgctgtatctactcaactaactgtgctgaacatctctattgatagagcagttttgagacactcttcttttggaatctgcaagtggatatttggatagatttgaggatttcgctggcaacgggattatatatcaaaagtagacagcagcattctcagaaacttctttgtgatgtttgcatccagctctcagagttgaacattccgtttcatagagtaggtttgaaaccctctttttatagtgtctggaagcgggcatttggagcgctttcaggcctatgctgaaaaaggaaatatctaccaacagaaattagacagaagcattctgagaatcacgtttgtgatgtgggtactcaactaacagtgttgatccattcttttgatacagcatttttgaaccacactttttgtagaatctgcaagtggatatttggatagctgtgaggatttcgttggaaacgggaatgtcttcatagaaaatttagacagaagcattctcagaaccttgattgtgatgtgtgttctccactaacagaggtgaatctttcttttgacagaactgttctgaaacattctttttatagaatctggaagtggatatttggaaagctttgaggatttcgttggaaacgggaatatcttcaaacaaaatctagccagacgcattctaaggaacatcttagggaggtttacattcaagtcacagagttgaacattccctttcacagagcaggcttgaaacaatcttctcgtactatctggaagtggacattttgagctccttgtggcctatgctgaaaaaggaaatatcttccgacaaaaactagacagaagcattcgcagaatcacgtttgtgatgtgtgcactcaactgtcagaattgaaccttggtttggacagagcacttttgaaacactctttttgtagaatctgcaggtggatatttggctagctttgaggatttcgttggaaacagtaatgtcttcaaagaaaatctagacagaaacattctcaggaacaccttcgtgatgtttgcaatcaagtcacagagttgaaccttccgtttcatagagcaggttggaaaaactctttttgtagtatctggaagtggacatttagagcgctttcaggcctctggtgaaaaaggaaatatcttcccataaaaacgacatagaaggtatctcaggaacttgtttatgatgcatctaatcaactaacagtgttgaacctttgtactgacagagcagtttgaaacactctttttttggaatctgcaagtggatatttggatcgctttgaggatttcgttggaaacgggatgcaatataaatcgtacacagcagcatactcagaaaatactttgccatatttccattcaagtcacagagtggatcattcccattcatagagcaggtttgaaacagtctttttggagtatctggaagtggacatttggagcgctttctgaactatggtgaaaaaggaaatatcttccaatgaaaacaagacagaagcattctgagaaacttatttgtgatgtgtgtcctcaacaaacggacttcaacctttcgtttcatgcagtacttctggaacactctttttgaagattctgcatgcggatatttggatagctttgaggatttcgttggaaacgggcttacatgtaaaaattagacagcagcattctcagaaacttctttgtcgtgtctgcgttcaagtcacagaattgaacatcccctcacatagagcagttgtgcagaactctatttgtagtatctcgaagtggacatttggagggctttgtagcctatctggaaaaaggaaatatcttcccatgaatgcgagatagaagtaatctcagaaacatgtttatgctgtatctactcaactaactgtgctgaacatttctattgatagagtagttttgagacactcttcttttggaatctgcaagtggatatttggatagatttgaggatttcgttggcaacgggattaaatatcaaaagtagacagcaggattctcagaaactcctttgtgatgtttgcatccagctctcagagttgaacattccctttcatagagtaggtttgaaaccctctttttatagtgtctggaagcgggcatttggagcgctttcaggcctatgctgaaaaaggaaatatctacctacagaaactagacagaagcattctgagactcacgtttgtgatgtgggtactcaactaacagtgttgatccattcttttgatacagcagttttgaaccacactttttgtagaatctgcaagtggatatttggatagctgtgaggatttcgttggaaacgggaatgtcttcatagaaaatttagacagaagcattctcagaaccttgattgtgatgtgtgttctccactaacagagttgaacctttcttttgacagaactgttctgaaacattctttttatagaatctggaattggatatttggaaagctttgaggatttcgttggaaacgggaatatcttcaaataaaatctagccagacgcattctaagaaacatcttagggaggtttacattcaagtcacagagttgaacattccctttcacagagcaggtttgaaacaatcttctcgtactatctggaagtggacattttgagctccttggggcctatgctgaaaaaggaaatatcttccgacaaaaactagacagaagcattcgcagaatcacgattgtgatgtgtgcactcaactgtcagaattgaaccttggtttggacagagcacttttgaaacactctttttgtagaatctgcaggtggatagttggctagctttgaggatttcgttggaaacggtaatgtcttcaaagaaaatctagacagaaacattctcagaaacaccttcgtgatgtttgcaatcaagtcacagagttgaaccttccgtttcatagagcaggttggaaacactctttttgtagtatctggaagtggacatttggagcgctttcaggcctctggtgaaaaaggaaatatcttccaataaaaacgacatagaagctatctcaggaacttgtttatgatgcatctaatcaactaacagtgttgaaactttgtactgacagagcagtttgaaacactctttttttggaatctgcatgtggatatttggatcgctttgaggatttctttcgaaacgggatgcaatataaaacgtacacagcagcatactcagaaaatactttgccatatttccattcaagtcacagagtggaacattcccattcatagagcaggtttgaaacactctttttggagtatctggaagtggacatttggagcgctttctgaactatgctgaaaaagtaaatatcttccaatgaaaacaagacagaagcattctgagaaacttatttgtgatgtgtgtcctgaactaacggacttgaacctttcgtttcatgcagtacttctggaacactctttttgaagtttctgcatgcggatatttggatagttttgaggatttcgttggaaacgggcttacatgtaaaaattagacagcagcattctcagaaacttctttgtggtgtctgcgttcaagtcacagaattgaacatcccctcacatagagcagttgtgcagcactctatttgtagtatctcgaagtggacatttggagggctttgtagcctatctggaaaaaggaaatatcttccgatgaatgcgagatagaagtaatctcagaaacatgtttatgctgtatctactcacctaactgtgctgaacatctctattgatagagcagttttgagacactcttcttttggaatctgcaagtggatatttggatagatttgaggacttcgttggcaacgggattatatatcaaaagtagacagcagcattctcagaaacttctttgtgatgtttgcatccagctctcagagttgaacattccgtttcatagagtaggtttgaaaccctctttttatagtgtctggaagcgggcatttggagcgctttcaggcctatgctgaaaaaggaaatatctacctacagaaactagacagaagcattctgagaatcacgtttgtgatgtgggtactcaactaacagtgttgatccattcttttgatacagcagttttgaaccacactttttgtagaatctgcaagtggatatttggatagctgtgaggatttcgttggaaacgggaatgtcttcatagaaaatttagacagaagcattctcagaaccttgattgtgatgtgtgttctccactaacagagttgaacctttcttttgacagaactgttctgaaacattctttttatagaatctggaattggatatttggaaagctttgaggatttcgttggaaacgggaatatcttcaaataaaatctagccagacgcattctaagaaacatcttagggaggtttacattcaagtcacagagttgaacattccctttcacagagcaggtttgaaacaatcttctcgtactatctggaagtggacattttgagctccttggggcctatgctgaaaaaggaaatatcttccgacaaaaactagacagaagcattcgcagaatcacgattgtgatgtgtgcactcaactgtcagaattgaaccttggtttggacagagcacttttgaaacactctttttgtagaatctgcaggtggatatttggctagctttgaggatttcgttggaaacggtaatgtcttcaaagaaaatctagacagaagcattctcagaaacaccttcgtgatgtttgcaatcaagtcacagagttgaaccttccgttacatagagcaggttggaaacactctttttgtagtatctggaagtggacatttggagcgctttcaggcttatggtgaaaaaggaaatatcttcccataaaaacgacattgaagctatctcaggaacttgtttatgatgcatctaatcaactaacagtgttgaacctttgtagtgacagagcagtttgaaacactctttttttggaatctgcaagtggatatttggatcgctttgaggatttcgttggaaacgggatgcaatataaaacgtacacagcagcatactcagaaaatactttgccatatttccattcaagtcacagagtggaacattcccattcatagagcaggttggaaacagtctttttggagtatctggaagtggacatttggagcgctttctgaactatggtgaaaaaggaaatatcttccaatgaaaacaagacagaagcattctgagaaacttatttgtgatgtgtgtcctcaactaaaggacttgaacctttcgtttcatgcagtacttctggaacactgtttttgaagattgtgcatgcggatatttggatagctttgacgatttcgttggaaacgggcttacatgtaaaaattagacagcagcattctcagaaacttctttgtggtgtctgcattcaagtcacagaattgaacatcacctcacatagagcagttgtgcagcactctatttgtagtatctcgaagtggacatttggagggctttgtagcctatctggaataaggaaatatcttcccatgaatgcgagatagaagtaatctcagaaacatgtttatgctgtatctactcaactaactgtgctgaacatctctattgatagagcagttttgagacactcttcttttggaatctgcaagtggatatttggatagatttgaggatttcgttggcaacgggattatatatcaaaagtagacagcagcattctcagaaacttcttt

SEQ ID NO: 1324 - DNA, 2400 bp, Homo sapiens
  misc_feature (1)..(2400): DMR8:46134001
cttctaggatgggagaggcctttttggcatgctctgagcattccctgtggtctcaccagttctctcgacctcctgcttcaacttccccgagtccctgccacctgcccatgctaccctgcggccccatttctgcttgtgagagccttctgcgagacacacaggcaccctgttccaaagtctgaggctttacagtctgccggtaaagccctgggggtggctgggatggaagagtcgtcattgggaggctcccagcattccctgcggtttcgccacttctcctctccgcctgccttaatgttcccctgagtccctgcgtcccttccaggccaccgtgcggacccgttttcgtttgttggggcctgttgcgagagacacaggcacccttctccaaagactgtggcatgaaagccagtccgggatacacctgggtgcttctgggatcggagaggcctccttgaaaggcttccagcatttcatgcggtcttgcttctcccctcggcctacctcaacgtctccctgagtctctgtggccggtccgcacaaccttgccaccctgttgtctcttttatgggtattccacgagagacacaggtacccttccccaagtactggggtattacagcctgcctaggacagctgttgtggcttctgggttgggagaggcctccttaggaggctcccagcattccctgctgtcttgtcacttcccccttctgcctgcctcaacatcaccgtgagtttctactgccgcacatgccacgccgccaccccattttcgcttgcgggggccttccgtgagagacgctggcaccctgctctgaagcctggggttttatagccagcctaggacagccctgggggcttctagaatggaagcggcctccttgggatattccctgcattctctgcggtctcactgcttctcccctctgcctgcatcaatgtctccctgagtccctgtggcctgtcctcaccaccctgctgccccattgtcttttggtggtcttccgcgaatgactcggggactctgctccaaagcctgtgatattacagaacatccgagacagccctggagacttctgtgatgagagaggcctccttgggaggctctcagcaatccctgccatgtcaccgcttcttccttctgcctgtttcaattccctgagtccctgcagcccacccacaacaacctgcagctcgcctatgccaccctgcttccctgtattcacttgtgggtgatttttgtgagacacaggcaccctgacccaaagcctggggctttacagcccgcccaggacagtcctggaagcttgcgggataggagagaccttcttgggaggctttcagcattcccagcggtcttgccgctttcctccttgcctgtctcaatgtcaccctgagtcactgccacccacccatgctaccctgcggccacgtttcctttgtgggggccttgcaggagagacacactcaccctgctctgaagcctggagctttctagcctgcccaggacacccctgggggattcagggatggagaggtctccttgggaggctcccagcattccctgcagtctcgccacttcctccctctgtctgcgtcaatgtctccctgagtctctgcggcttgtccatgccaccctgccacccccttgtctcttttgggggtcttccgtgagagacacaggcaccctgctccaaagactggggcattacagctcagccgggacagccttgggaccttctgggattagagagttctcctgggaggctcccagaattccctgcagtctcgctgcttcttccctctgcctgcctcaatgtcccactgagtccctgaggccctcacacgccaccctgtagccccgtttttgcatgtgggggttttctgcaagagacacaggctccctactccaaagcctggggctttataacccgcacgggacagcccaggggcttctgggatgggagaggcctccttgggaggctcccagcattccctgcggtatcgccacgtctcccttttgcctgtcacaatggcctcctgagtccctgcggcttgtccaggccacactgcagcccccttttcacttgtgggagccttctgcaagagacacagacagcctgctccaaatcttggggctttacagcccgcccgggacagcccaggggacttctaggatgggagaggtgtccaggggaggctcccaacattctctgtggtctcaccgcatcttctctctgcatgcctcaacgtccccgtgaatccctacggcccactttcgccaatttgaggccccatttttccttatggatgccttccgcgagagatacaggcaccctgctccagagcctggtgctttacagcccgtctgagacagccagggggcttctgggatgc

SEQ ID NO: 1325 - DNA, 8200 bp, Homo sapiens
  misc_feature (1)..(8200): DMR8:46250301
ggagaagcattgagatggcagggaatgctgggagccatccaacgaggactctcccatcccaaaagcccccaagtctgacctgggcgggctgtaaatccccaggttttggagcagggagcctgtgtctctcgcaaaatgtttccacaagcaaatacatggccacagggtgggcatggcaggccgcaaggtggcataggcgggctgcagggattcagtggggcgttgagacaggcagagggtaggtgcagcgagaccacagggaatgctgggagccccccctaaaaggcctctcccatctcagaagccaccagggctgccccaaacgtgcagtaaagcaccagtctttggagatgggtgccttagtctctcacaaaatgcctccataagcaaaaacggtgctgcaagttggtgtggatgcatcgcagggacacaggggtagaagcagtgagactgcaggaaatgctgagagacgcagggtgtggtgggtgggtggcagggactcagggggatgctgcagtacgcagagggaagaagggttgagactgcaagtaatgctggtagcctcccaaataggcctctcttatattcgaagcccccagtgttgtcccaggcaagctgtaaagccccaggctttggagcaggttgtctgtgtctctcgcggaatgctcccacaagcaaaaacggggcctcagggtggcatgggtgggctgcagggactcagggggacgttgagacaggcataggggagaaggggcagcattgcagggaatggtgggagactcccaaggaagactttagaaccagaatcccccaatgctgtaaggtcccagacttcagagcagggagcctgtgtctctggagaaagtccctcacaaacaaaaacggggtggcagggtgggatgggcgggtgcagggacttccagagatgttgacactggcagaggatagaggggacgagaccggtgagaaggctgatagcctccctcgaaggcctctgccatcccagaaacccccagggctgtcccaccgggggaatgctgggaaactcccaaggatgcctctcccatccaagaagccctcggaactgtccagtacgtgctctaaagcttcaggttttgaagcatggtgcctatgtctctagcgaaaggcccccactagtgaaaatggggatgtagagtggcgtgggtgggctgtaaggactggccgttgagccaagcagagcaaagaagcttgaagaccgcagaatataaagggaatctttcaaggaggcctctcccatctcagaagccttcagtgctgtcctgggaggtctgtaaagcctcaggctttggatcagggtgcctgagtctctcgcagaaggcccccagaagcgaaaacagggccacagggtgacatgggaaagccccaggaactcagggggatttgaggcagacagaggggagacgtggtgagactgcagggaatgctgggagcctcccaaaggccttttccatcccagaagccctaagggctgtccccgtctggctttaaagcaccagggtttggtgcagggtcccttgcatctcgaagaaggcctccacaagcaaaaacggaaccacacagtggtgtggacatgccgcagggacacatgggtactttgaggcaggcagacggaaaaagtggcgagacagcagggaatgctgggggacacgcatggaagcctctcccattataggagccccctgggctcccctgggcaggctgtaagcaccagtcattggatcaggtgtctcttgcggaaggctcccacaagtgaattcgccgccgcaatgtggcatgggtgggccgcagagactcagggacgttgagacaggcagagaggaaagaagcagtgagaatgcagggaatgctaggagcctcccaaggatggctttctcatcccagatgccctcaaggcggtcgtggtgggctgtaaagccacagactttggagcagggtgcccgtgtcttttgcagaaggaccccacatgcaaaaaacgttgccacaggatggcatgggagggttgcaaggactcagggaaatgttgaggcaggcagacaggagaagcagcaagaccgcagaaaatgcagggagcatcccaaggaggcctctcctatctcagaagccccgagatgtgtcccgggaaggttgtaaagccacaggctttggagcagggtgcatgtccctctcacgaatgcccctaccagtgaaaacgggaggtagggtggcatgggcgggttgcagggactcaggggaatggtaagccaggcaaagaagagaagatttgagacagcagggaatgccgggagcatgcgaagccggcctctcccatcccagaagcccactgggctgtcccgtgcgtgctgtaaatccccaggctttgaagcaaggtgcctgtgtctcttgcggaaagcccccacaagccaaaacagggcagtaaagtggcatgggtgggccacagggactcaggaacacattgagacaggcagataggagacacagtgagaacacagggaatgctgggtgtatttctaaaaggcctctcctatcctagaggacaccagggctgtccaggagggctgtaaagcaacaggctttggagcagggtgtctgtgtctctcgcaggcctccacaatcaaaaccttggccggagtgtggtgttggcaggccgcaggggctcatggagacattgaggtaggcaaagggaagaatcaacgagaccgcagggaatgctaagagaatcccgtgaacttctatcccatcccagaagctcccagggtgtctcaggcgggctgaaaagctccaggctttggaggaaggtgcctatgtctctgaagggaggcccccacatgcaaaaacagggccgcagggtggcgtgtgagaaggcagtcaggaggacgttgaggcaggccgaggggagaagcggagagactgcagggaatattaggagcatcccaagaaagcctctcaaaacccagaagcccctaagggtgcccctggcaggctttgaagcagtgtgcactcatctctctcggaagacccctacaatagaaaacggggccacaaggtggcatggacggcctgcagagtctcagggggatgtcgaatcagacacggagggaagtggtgagaacgtagggaatgctgggagcctcccaagatggcctctcttataccagaagccaccaggactgtcctgggcgggctgtaaattcccaggctttgaagcagcgttcatgtgtctgtcgcaaaaagccccaacaagggaaaaaagggccacagggtggcgtgggcagaccgcacaatggcgttcgcgggtcatgtgtactcagggggacattgaggcaggcacgggggagaagccgtgagactgcaaacaatgctggctgccccctaacgaggcatctcccaacccagaagtccacagggctgtcccagacagactgtaatgcctctggctttggagcagggtgcctgtgtctctcgtggacagcccccacaagtgaaaacggggccgcagcgtggcgtgggcagacggcaggaactcagggtgacattgaggcaggcagaggggagaagagataagactgcagggaatgctagaggcctcctaagcaggcctcttccatttcagaagcaccccagaatgtctcaggcacgctgtaaagcttcaggttatgaagcaaggtgcctatgtctgtagcggaaggctcgcactagagaaaacggggcggtagggtggcgtgggccggccgcagggactcagaaggacgttgagccaggcagaaaggagaagcgttgagactgcagggaatgctgggagactcccaaaaatgactctcccatcgaggatcccccagggctgtcccaggcgggctgcaaagccccaggttttggaacaggttgcctgtgtctcgcggaaagcccccacaagcgaaaacaaggccgcagggtggcatgagcgagccacagggactcagggggacactgaggcgggtagaggggagaagcagcgagtccgcagggactgctgggtgcctcccaaggaggcctttcccatcccagaagttcccagggctgtcctggacgggttatgattccctaggctttggatcagggtgccggtgcctcttgtggaagacccagaacagagacaactgtgtggcagggtagcgtgggcgggccacagggactcagggagacgttgagtcaggccgaggggagaagtggtgagaccgcagggaatgcctcccaaggaggcctctcccatcccagaagcccacagggctgtcccagaccagctgtaacgtcccaggctttggagcggggtgcctgtgtctctcgcagaaggcccccgaagtgaaaatggggccataggttggcctgagtggaccacagggactcagaggatctttgagtcaggcagagaggagaatcggcgagagcgcagggaatgccgggagcctccgaaggaggcctcttccatccagaagcccccagggctgtcccggacgaactgtaatgcaccaggcttaggagcagcgtgcctgtgtagcttgcagaagacccccaaaagagacaacagggaggcagggtggcatgggtgggccgtagggtctcagggagatgtagagacaagcagagagtagaaggggcgagacctcaggaaatgctgggagcctcttaattaagcccccccccattgtagaagcccccagggctgtcccggatgggctgtaataccccaggctttggagcagagtgcctgtgtctctctcagaagaccttcaaaagagacaagcgggaggcagagtggtgaggtcgggctacggggactcagggagactttgaggcaggtatagagaagtggcgagaccgcagggaatgctgggagcctcccaaggatgactcttccatcacagaagcccccagggctgtcccagatgggctgtaattaccaaagctttggagtagggtgcctgtgtttctcactgaaggccccctcaagcgaaaacggggccacaggcaggcacgggcgggtggcagggactcagggtgacattgaggcaggcaaacggtagatgcatggagacagcagggaatgcttggagcctcctatggatgcctctcacatctcagaggcctccaggactgtcccaggagtgctgtaaagcttctggttttgaagtagagtgcctgtgtctctactggaaggcacccactagcgaaaactgggcagtagggttgcttgggtgggccacagagtctcagggggactttcagtaaggcagaaaaaataagtgtcaagaccacagtgaatgctgggagctttccagggaagcctctctcatccaagcccccaaagcttccctggaggcgctgtaatgtctcatgctgtgaagtagagtgcttgtgtctctcatggaagacaccgaaaagagacaacggggcggcagggtcccgtgggtgggccacagggactcagggagtcattgaggaaggcaaaggagagaagcggcaagaccaaagaaaatgctgaaaacctcacaaggaggcctcttttatcccagaagcccccagggctttcccagcagtctgtaaagccccaggtttaggaacagggtgactgtgtctctcacagaaggcccccacaagcaaaaacagagccacaaggtgacctgggcaagcgttagtggctcagcatgtccttgaggcaggcagagggaagaagcatcgagatcacaggggatgctgggaggctcccaaggaggcgtctcccatttcagaaaccccaaggactatcccgggcgtgatgtaaagcttcaggttttgaaatagggtggctgtgtctctagcagaaggcccccactggaaaaaacgagtccctagcatggtgtgggcgggccacaggtactcagagggacaccaagccaggcagaggggagaagcagctagagtgcaggagtgctaggagcctccaaaggatgcctctttcatcccagaatctcccagcactgtcctgagcctgctgtaaagccccaggctttggagcagggtgcctgtctctcacggaaatctcccacaagcgaaaacgtggccgaagggtggcatgggtgggccacagagactcagggggaacattaaagctggaagagtgcagatgcggtgaggccgcagggaatgctgggagtctcagtaaaaggcctccctcatatcagaaacccccagggctgtcctgggtgggctttaaagtaataagctttggagcatggtgactgggtctcctgcaaaaggcctccacaagtaaaaacagggcagcagggtggcatgggcgggcagcagggactcatggaaacatagaggcagacagagggaagaatcagtgtgtacacagcgaatgctgggagcctcctgtggaggcctctttcatcccagatactcctggactgtcctgggtgggctgtaatgccccaggcttaggaggatggtggctgtgtctctcgcagaaggctctcacaagtgaaaatgcggccgcagtgtggtgtgggcgggctgcagaaactcaggggtactttgagacaggcaaagcagagaagcttcgagaccgcagggaatgccaggagttggccaaggaggcctctcccatcacagaagcccccagggctgtcccgggcgggctggaaagtcccaggatttggagcacagtccctgtgtctctcgaggaagtccctcacatgaaaaatggggccgcaaggtggcgtagcagggccagagggactcaggagtcattgaggatggcagaggggagaagcagggagactgcagggaatgctgggagcgttccacgaaggcctctcccatcccagaagcccacagaggtgtcccgggcagactgtaaagccccaggcttcaaagcagggttcctctgtctctagcagaaggctcccactagtgaaagtaggggctcagtgtggcttgggcgggcctcagagtggagtgagaggatcgcagggactcaggaaattgttgaggcagcagaggagagaaacattgagatggcagagaatattgggcgcatcccaaggaggcctctccattccagaggcccccagggctgtcctggacctgctgtaaagctttggagcagggtgcctgtgtctctcgcggaaagcccccacaaacaaaaacaagccatagggtgcgtgggcaggctgcagggactcaggggacgttgaggcaggcagaggggagacgcagcgagactgcagccaatgcagggagactccttaaaaggcctctcccatcccagaagccacaaaggctgtcctggtagggttgtaaagcaccaggctttggaacagggtgcctgtgtctctcgcggaaggctcccacaagcaaaacccgggccacggtgtggcgtcggtgggccacagggactcaggggcacatggagacaggcagaggagagaagcgaccagaacgcgggaaatcctgggagcctcccaaggaggcctctctcatcccagaagcccccagggctgtcccaagcgggctgtaaagcaccaggctttggggggggtggtgctgcatctctcgcaataggcccccacaagtaaaaaacagtgcctcagggtggcatgggcgggctgcaggtattcagggggacattgaggcagtcagtggagaaaagcggcgagactgcagggaatgctgggagcctcccaagcaaacctctcccatcccagaatccccagagctgtcccggatgggctgtaatattccagcttatggagcagggtgtctgtgtctcgtggagcaccctcacatgcaaatcatggccgcagtgtggcgtgggaggtccacagggactcaaggttacatggaggcaggcagaggggagaattggcgagaccgcagggaatgccgcgagcctccaaagaaggcctctttcatcctggaagccactagaactgtccctggtgggctgtgaagccccaggctttagagcagcatgtctgtgtctcttaaatgtctgccacaaggaaaaacgggacctcatggtggcgtgggcaggcggcacagtgacgttgaggcagacagaggggaggagcagctagaccacagggaatgctgggagcctcctatggaggcctctcccatcgcagcagcctgctgggctgtc

SEQ ID NO: 1326 - DNA, 1200 bp, Homo sapiens
  misc_feature (1)..(1200): DMR8:47113201
ccatggctaccatttattgacactgctcctagtcaaagtcactaatccttattgtaatcaatctttcaacagcattgatatagttgagtactctccagctttgagagactacattattctatttccaaaaataaaagtaatcagtgttaacattccttcccggagatttctttctttttttttttttttttttttttccagacgaagttctgttcttgttgcccaggctggagtgcaatggtgtgatctcagctcaccacaacctccacctcccaggttgaagcaattctcctgcctcagcctcccaagtagcaatggcgcaatcccagctcaccacaacctccgcctcctgggttcgagcaattctgcctcagcctcccgagtagctgggattacaggcatgtgccaccatgtctggcaaattttgtatttttagtagagatggggtttcaccatatcgatgaggctggtctcaaactccagacctcaggtgatctgcctgtctcgggctcccaaagtgctgggattacaggtgtgagccaccgcgcctggcctaccttttttttttttttaagttctgggatacatgtgcaaaacgtgcaggtttgttacataggtatacatgtgccatggtgatttgctgcgcctatcaacacatcatctaggttttaagtcccacatacattaagtatttttcctgttatccctcaccttgcccgacagaccccagtgtgtgaagttccctccctgtgtccatgtgttattgttcaactcccactaatgagtgagaacatgcagtgtttggttttctgttcctgtgttagtttgctgagaatgatatttccagctgcctccatgtcccagcaaaggacatgaactcatccttttttgtggctgcatagtactccatggtgtaaatgtgccacattttctttatccagtctatcattgatgggcatttgggttggttccaagtctctgctattgtaaatagtgctgcaataaacatatgtgtgcatgtgtctttacagcagaatgatttataatcttttgggtatttaccatgtaatgggattgctgggtcaaatgttatttctggttctagatccctgaggagttgccacactgtcttccacaatggttgaactagtttacgttcccactaacagtgtaaaaccattcctatttctcaacatcctc

SEQ ID NO: 1327 - DNA, 200 bp, Homo sapiens
  misc_feature (1)..(200): DMR8:47118101
caggaaaatgaaatgtttatgtgtttaaggggaagagtggtgggaaagttgggatggccagaaaagtccctgctgagaaagggtattttaattaaagaactgaaggaatgggaagagtaagcagggaggatatctgggggaaaagtatcccagacaaaaggaactgccaagtacagaggtgtgcctggagtctttaaaca

SEQ ID NO: 1328 - DNA, 2500 bp, Homo sapiens
  misc_feature (1)..(2500): DMR8:49612001
tagctctctccatcaaggagagagctagaaagagagctagccctggagatctgcggagtcatccccacccccccgcccaccccactccctctggctaagtcttcagttgaggaatgatcaatgaatgcatatgaggaaactacctgaagtcagagaaagaacaccccaagaggattagaaggagcaatagcaggggctcacaggactatcataactcctgttcctagcagccggagtggaaaaccttatcatttatgatgcatcaggtaaagctgacctcagcaaactttttctctaaagagccagagactaaatatattaggctttgaggacgacgtgcagtattttattttatacaagtctttaaaaatgtaaaaatcattttagatcaaaggctatagaaacaaacataagccaaatcatcaagaacatttgtagaaatacagaaatacccagcaccccccaaaattaaatcaacaatatctgggaagcaagcaaaaatgactaagcatatatcatccaaaagaccaccaggagggctacatagtagaaaggaaagctttattggaaatgttagttttcaaaccaggtagagacagtatcttgcatggattgaaagtgctatctcttcacagagggaaatgacaggttgactgttatgcctcataaagttcatattatacaatcgagtcatacatatttttcagataaggagaaaaactatatatttatgagaggaactgagtgcatgtgcaatgagtaaacatatatgtaatatatatttcgtgctcactttagggcagggtttcagcattaaaatgaggtggaatttgactctttatatcaaaagatgaaccataggacacaaagtttgtgcatggtctctacaagctactgaaactgatgtaagctttgagttgcttatgagaaaagaatatttgtaaggacggtcctccaccaaataagagctatggtggtctgggttgtaaatcagataggaggagtctgatacttcctgttcttagggatttcagcaagagtgtggggtttttttgtttgtttttgtgtttttttcttgtagctgtaggattttaaaaatttgccataacagccaggccctgaatccttgatccacaggtaactttttttaaaaatttattttaaccataatgtctgtcttaggtgataacagtgaatttcagatcagacatgcaaaaaaaggtgaaaaacacaaccaataattgggagaaaaatcagtcaatagaaaatgatcaaaaagtggtacgtatgattgaaatagttgacaaagtctttaacagagctattttaattttattatagacattcacaggattggaggaaagatcgtcatgttatctaaggagagaaaatatataaaagactcgaatatagttcaagagataaaaacaaacaattatgaagtaagaaaatacacaaggtagatagaataatcagtagattagttatagaaacgcatagtaactttgaggatatagtaatagaatatagtattagaaagtattcaaaatgagagaacaattctgaaaaaaaataaacagagcatcagcatgttgtgagacaagaccaagcagactactgtttgtgcaaattaatgttccaaagaagataagaaagaaggaggggtggaaaagctgtttgaaaatataatggtcaatattttgcaagtttgatgaaggctataagcccacaaatccaagaaattcaacacaacctaagcacaagaaaagtggcagggcggggcggggagctacaacaaagcaaattataatctcacttcttaagaacagcaataaatcaaagtttttaaatagcctggagaaagatatcatgtgcacaaacaaacataagaatgacagcagacctatcatcaaaaaggatttaagccagaatgcactggaatagctagctttaaaataatgacaggaaaaaaagaaaaagtcaacttggaattcaattgccaataaaatatctttgaaaactgaatgtgaaatgaagacttattcagacatgtagaacctgaaagaattcatcatagacctgacttacaataaatattaaataaagccctacaggcagaagataaatggtaacctacagaaatctggttctactcgaaggaataatgaggaatagaaatggtaattacttgggtaaaagtaaatgtttaaatctgttttagagataattgagcattcaaagcaaaatacaataacatcattgtggagtttatggtacaagtagaagtgaaatctatggtaatatgcaaaggtcaaataggagaaggtgaactatggtttgataagctagattgtatgtaaagcaacataaaactacttgagcgaagagggcaataataagttaaatctgtaaaatgtaaactctaaacatctattaaataaaagttgtagtaaataagccaaaaaaaggaagatataaaagggacatataaaacatactt

SEQ ID NO: 1329 - DNA, 200 bp, Homo sapiens
  misc_feature (1)..(200): DMR8:49615501
ggcatgaacttcccgaggctccaccccagtgctcactcctcccagtgcacaggccagtcggaggctctgccggggagccctttttacttggccgtctcaaaattactagcgaataatagaaaggcacattttggaatctacaaaagagctggtagaactaataagtatatttaggaagtttgcagtatacaaatacacaa

SEQ ID NO: 1330 - DNA, 500 bp, Homo sapiens
  misc_feature (1)..(500): DMR8:51365501
ccccaggtaaggagcatactccaagctcttggtattatcctcctgataatcataacagtagtctccctgctgcgttgtattctctcaaaaattttaaacgtttgcatgcagccatctgtagaatgtcaaatggcctttcttcaactggaatgacaaaaactcaaagaaacatgtgatcatgagaacatcgtagcctgtgagtgatatgctgagacagaaaacccaaaatgatggtaactgagagtggtgataaggccctaagtattggtcacatgctcacctaagtgagaaccttaccaaaaagggagaggaggtttttaaacaaaattatgggagatcattgttttggactgagctcctgcaccaggccccaacaaaccagacaaaagcaaaatggaggcacttatgctaaaagcagcataaccaaactgaaactttaaggaaggagataggtcctaaagtgaccattttctccccctgtgaacagtagattccaacaa

SEQ ID NO: 1331 - DNA, 1300 bp, Homo sapiens
  misc_feature (1)..(1300): DMR8:52294901
atcaccttctcacatatatttgtaagttgttatatgctactgtgctttatctcttaaaacaaatatatgcttacatgcttgccgtttgtaagatgaacttagaatgaaaataaaaggagatggataggagtcattttcagacaagatttacctctaaggagcctgccaggcagcaattcatttcatcacctctagcctgacaaaccagtgacattaaagcaaaggcatgtcctaatcgtcacacgtgtaaccacttttttctttttttcacatttgtatgctaatcacgagaagcaaaaatagacttagattggaaatcaaagattggttgtatacaggtaatagagtgcttgaacgctttatttaaagatagaaggctcttgaaccaggctttattattgaactaagactatctatcctttttgacactttttaaattaagttcttcctctaatttatgtttttatcaggtttcttcccttacctggttttaaactggctttttttccctctctctctaagtaataaactactccagagcagagaaaaaaattttaatgaccttcgaaattcagattaacaaaatggatcatttgtatacagccacagaattatgaagccttttgaaatatcagtacagaaattttgcctgatgcaaaatttcattttctctctctctgacatatctctgacttcccccttttaaaaatggagtggttttagtacctctttagtaaggtcaaacactgaaaagtaaaggggtttcgggacaattttgaggcgcaaatgaaagagcttctctttttttccttttttttttttttttttgaattaagggagacaagctccaacaatgtgttagcatatcagatagaaaatagtttgttgaaactggacttgcagcgccagttctgcctgcctcttccctgcacgctcaatctgccttcttattattgttaagccagcctgcctcccagtatgttctgcgtcccatctgacttccgcagagttcgagggagcttaggacaaacagaacaggggagcagctgcatgggatgagtggtggcagccagataatctaccacaatgtcttgctggaaaaaaaaaatgggacaacataatttccccaacttaacacaacccctgcctggaaaatgcaagccaaacttaacaggcaagttcggcagctgcttggcgtcattttgttttaacatcatgcatataaaaaaagaaatagtgcaatgctggggggaaggagaattttcaattgcttagatttgataaagaaaaactagtgatc

SEQ ID NO: 1332 - DNA, 200 bp, Homo sapiens
  misc_feature (1)..(200): DMR8:53945401
acaggaagcggattcgtgcttgcctagggccggtagagtggggagatacaggtgataagcagtgactgcttactggtggggtttcttttgggggtgatgacaatgttctggaattagatagtagggatggttgcacaactttgtgagtatactaaaaaccactgaattgtacactttaaacagataaacttgacggcata

SEQ ID NO: 1333 - DNA, 300 bp, Homo sapiens
  misc_feature (1)..(300): DMR8:55112401
ccctcaagtccattctatttaagaaggacagagttgcctttctgaatcaccaatctgacagatttcatccatgtgaaagcagtctgacttcttttatctgcagtacaggtaatagtcatgaataaagatctcagtctggggctgaattctttacttttcaggttttttttttttttttttttttttttagggagcagagagtcaataatcaaagcaaaggtagcaatcgtagcaataacatcaactaaatgattccctataacttctatcattagttcatggcatagtcactgtatcagt

SEQ ID NO: 1334 - DNA, 200 bp, Homo sapiens
  misc_feature (1)..(200): DMR8:55935001
tggaggtgatgcccacaccatggacggaagcagctccacgggccatggtcatagcctagaggtgacgcccacaccatggaggcagctctgtgatctgagggattcccggcaccgaaacagcattgccttaattgcccccaaacactgttcctattacacatgacatttaaaccttagggagttacattcataatgttagg

SEQ ID NO: 1335 - DNA, 1200 bp, Homo sapiens
  misc_feature (1)..(1200): DMR8:58879601
tctagccatctaataaattctttactgtggctgactagtcctttggggaatgccacagtacgttccctgcaaaaaatcgagagactggcttgtaccaaacaaagcattccttaaaaacaaatctaaatgaaacaaaaccaaaccctggttttgtagttgaccaaattccaaaacaaacaaggctctactggatggatctatgacaaacctcagaatacatattttaatcatttgatccccaagaattaaaaaaaatattttttatagtgccacccacatgtaatatgtccttgtactggtacaacccatttttaatactttgctttttcctctcttccttgtaaaaaatggcactgaataaaggattattatgttttattatctttactgtctttttaaaatggtcatatctattttgaaacattcaaaaataaagacttcctagatcccataggaaatccacttctgaagaaacctagagcagcttccgtagctactaatctagaatgagggattattcctgggacaagggacaactgtaagggagatacaagaagccttgagggtggaggaaagtcagtagtgtgcaagttggtcctatctgcctggatgtcagtgctctgggatgagggggcagtagacaatggcattgcagagtgaagcaatgactaaaggggaaaaggatggctggttatttaacatccttgagcttgagttcctaaaatgtaagatgggacatcataaaacccatcccttcagagctgtgagagttaaataatacatgcaaaatatctggcgtatattaagatcttaacaaatggtgaatactattattatagccattagctggaaagagttttaatgaacttaagactttatttctacatctggagggaataatcatgagagaccagagtggcgggcagctgagtatcctcttaggggatactggatagtttattaaagaataggaaatgcaggcattctctctctttctgctagaataagaccctgaaagctaaacatgctaaagcaaaatgtgagagatagagctctgcatgggcctgagatgatgaagttgctcacagaaaaatggtgagctgagaaaggacttacgtatacctaagattgtctttgaagcttataaataatgtttctgtgctgtccagctaagttatttatggcttaacatcgcattac

SEQ ID NO: 1336 - DNA, 900 bp, Homo sapiens
  misc_feature (1)..(900): DMR8:60383901
atctcaattctgtgtatcagaggcactatattaactatgataatttttttatttttagtttttctgatagttaccagctctctaaataacaggcttaaatcactatagtttgatacatcaagtctcaacacctatggactttctaaggcacgacaaccttcctctctcctcccctcctgccactgaaggtaagaatcgttccttcctcttttgattatcttttaacttaaatactgcatataaatatgcaaatatctcttgagctctcacgtggtaaaaagggattattagtgatctttttctttcttcttttttttttttttttttttttttgagactgagtcttgctctgttgcccaggctggagtgcagtggcgtgatctccactcactgcaagcaccacctcccgggttcactccattctcctgcctcagcctcccgagtagctgggactataggcgcctgccaccatgcctagctaattttttttttttttgcgttttcagtagagacagggtttcaccgtgttagccaggatggtctcgatctcctgacctcgtgatccgcccacctcagcctcgcacagtgctgggattacaggcgtgagccaccacgcccaacctctttcttcttttctccccaccttaccttataacttccagcactactttaagtaccttgacttactttttcttgtcagttttgataacactttctttttgtgtgtgtatacataatcaagtcttctttcccttgttatttgatctgaaaatttgaaaatcagcaaacagtatttatgttattatgactatgtaatattattgtctgtacagccaagtattattattacattccaaattttcgtgttctttaagagtttctcctcctcctcctcctctc

SEQ ID NO: 1337 - DNA, 600 bp, Homo sapiens
  misc_feature (1)..(600): DMR8:61450301
ttttttaaaaagcaaaaaaaacttatgcttatctaaggtttacaggcttcatttttttgagaggttgcaactttacataaaatgaaatcaccataaaatgatattgccataaaatgaaagctactaacctcagcagtgtaggatgtgagtagaactggttagagaaggcaagaaaggggataaaaatcacagagggccctggtcactaaagtacactttaaagaatatgccaactgttcgtcatgtagtagatactcataaatatgtgctgaattgaagacgtgcaagacgtgaactaattgttaaggcaagaattgaatacactaaacatatcattatataattgctgttttcagttgtccccactgccctgaagactctatatttgtatttttcaatgcattaagtgagacatactgtaggccatcaaaaatagttattacattcaattaaaaaatgatcacatttaaaaaggacagaaaaaaagagaagtgaaggtttggcagagtttgggtaattattactgctattcaccaatacttttggtccttttcttactggaaacatggtagattttactttctgatcccctggaagcca

SEQ ID NO: 1338 - DNA, 200 bp, Homo sapiens
  misc_feature (1)..(200): DMR8:62465401
tcaagaaggaaaaaaacaagggcctaattatatctgcaacaaaaaatcataaatgcctactattttaaagtattttcccgtccattcagactttagctgtggccaggactgtttcaatatgtgttttgacctctacgtacattgatagtcattttcctatattaatttcttcattcagtaaaccatccaatgtctccttc

SEQ ID NO: 1339 - DNA, 1000 bp, Homo sapiens
  misc_feature (1)..(1000): DMR8:62674201
aactcaaaattccccaaataagtcggactcttgtggcctgggccttggctcatgctgtctgtagacctggaattcctgcctgctgcctgtctgccaggtgaacttatgcaaaaaacagctcagcagtccttgtttatttcctcagaagcagatgtaactgttaccttctttataagatcaatgctatttttgcaaacatccaccatcctgttcttatttgtccatgtgtcagactccctctactaatgaagctctttgtgcccagaactgccacaatttgcattaattaaatgaatgattgcaggtatcctgcttggggatgggggcgagagaatggtatcactgttgttagaaacactaaacgtaataaatggcaaggaagtgaataattaactacttaattgcaattaaaagtttctggtgcctggctataaatttgcttaacatgtggaggggtagattttgattggacatgatcagctagtaccaggtggacaatcaggcagggatgcccagcaaatctctgtaaatggggagtgagctcagttgtagaagatattccaatgagagactagccggaagggaagaggcattaggattgtgaaaatcctttaaaattgttacctactttacagagaagaacagatggtcttgctctgctgcgccaatcacaaaaccgccacgtaaggataattaaagtgggggacaggtctggcatccagttcttcagtcaacattctcctccccaaatcttagactaaattgtaagacacacaggcgtccacatgaagcgtctgcacaggcttccttcaagtgctgaggaacagtgtagtctttgctcagcttttgtctgggagcatggaagttaattatatttttcatgttaatattttggagtttcagtatgaccctctgcgaaatgaggttatgaatatgtaacctacctatcttaaaggattattacatgcattaatatatgccaaagagctttgtagactgc

SEQ ID NO: 1340 - DNA, 1500 bp, Homo sapiens
  misc_feature (1)..(1500): DMR8:65165401
agaaaattgacaggtttttttttattttaattctttgttgtctgtcaagaattccatagaaataatagatgcctgaaaacacaaggaaaagcgcattttttccccacttcagaggtgtgcctccaaggagactgacatgagggagaaggagggtttctgaaatgtagatggtgggtaataaagtccctcagagtgagttgggaacaaggttagaactcacaaactgcctgcttcaagagtcaaggacatctttgcagccttgggaccagcaggctgcttgggaagcaggaaggcaacatttcaacaaacaaaaacaaacaataaacaaacaaatactgtaaaaagggacaactccctttgcatagccaactcaggcccaggcagagctaccaaagaccaggcctggtttctaccggtcttgggatatagagcagcctctgaaagcagtgccccagcgtgcccgtccgtccagagctggggcagaggggcttcctcctggctggcaacttctaaaggtctgcagtgccaggcaccgccccccccaaccgggtcgtgaacccctgctatctcctggcatacctgccccatcgaatattaatgagccattgtttcaaaaaaagccttgccaaaggtggctgggacagacttgcctactctgcagagagaaggaaaagaaaggatgggggcgttgcgggggaagacactaggggaggaggcgaacatgaggctttcaagttctaaagcttattttgcatgagaaaatacaggaggcttgaggattgctggtaggcatccctcatcctctatcttccctgcaaaaaatccagattaaagccgttggtctctgggacaccttaaaaaaaatcttccttctgtgaccttatgtacaagggtaaagaccagctttctacatccaactcgcgagtgctgaagggaggacgagccgtggggcgcccagccggagcctctgtcctctgcctgttcccgattccatggcccgaggcaatggtttgcatttttaggacaacagcctgctatctgcaagcaggagacctctcgtcaggcttcattactgcacacaaaatgacaggagagagtctgcggcccacaactacgcttatggtgtgcagcaaagccactgcatcgtcctgcaacaccagtcccctccttcccactgacccacacaccgaactgccgccccaaacctgagctttgcttatgtatgtgccctacctggcacacgtggcttctgctggaaaccggccttttccaccttccttgctgtttggcttatgaatttccggggagaccaagaaaagaactgtatttgccaactaatgaagttcagattcaccctttcttttccttccccataagctccccaagactgagtctacagtgcaccatctcctcatctagacatggtgatttacatcatactgggaggacagatagctgggaatacagaccccatgccatacaagataatttaaacctttt

SEQ ID NO: 1341 - DNA, 3100 bp, Homo sapiens
  misc_feature (1)..(3100): DMR8:67317101
tgagctgagagggtaaagcattctgacgacacaaaagctttgcgtctgaggcccttccaaactcatcctatagttctcttcttttgaatcatcctaatttgtgtcctttataacaaaaccacaatcctgaaatagcactttcctgagttctgtgagttgctctacgtaaccggaggagataacaggaacccctgaatttgtagccagttggtcagaagtgcttgtggtctggaaactctcaagcattagctggtatctgaagtgaaaacagttttgccaaggactatgcctttaacctgtgaaatacgactcaactccagaaccaaattatgatgtagttagcatcagaactgcactgaacaaaggcagtatagaaaaatgcagacaaatatcactcatgaatatagacgcaaaaatcatcaaatactaactagaatccagcaaggtataaaaagaattaaataccatgacccactggggtttattctaaagacacagaactaatatttaaaaaaaaaaaaaaaaaaaggttgggagcggtggcttacacctgtaatcccagcactttgggaggctgaagcaggtggatcacctgaggtcgggagttcgagaccagcccaacatggtgaaactattaaaaatataaaaattagccaggcacggtggcacttgcctgtagtcccagctactcgggaggctgaggcacaagaattgcttgaaccagggaaacagagcttgcagtgaactgcgattgtgccactgtactccagcctgggtgacagagcaagactctgtctcaaaaaaaaaaaaaaaaaaagtcaacccctgtaatctaccatagaaataggctaaacaggccaggcgcggtggctcacacctgtaattccagcactttgggaggctgaggtgggtggatcacgaggtcaggagatcgagaccatcctggctaacacggtgaaaccccatctctactaaaaatacaaaaaattagctgggcgtggtggcgggcgcctatagtcccagctactcgggaggctgatgcaggagaatggcgtgaacccgggagccgcagcttgcagtgagccgagatggtgccactgcattccagcctaggcagcagagccagactccgtctcaagaaaaaaaaaaaaaaaaaaaggctaaagaagaaaaaaatcacatgatcatttcaattgatacagaaaaatcatttgacaaaattcagcatccattcatgattttaaaaactcagtaacctagcaatagaggagaatgataaacagtagctacacaaaaccaagagctggttgggtgaggaaaccctctcatcatttctactcaactttgtactgaacatcccagacagtgtaaataagtaaataaaggtatataggttagagagaaatacaacagttcttattcacagattacatgattatttaagtaaaaaatcccaagaaatcttgaagaagaaaaaaactctaagaactcataaatgaatttagcaaggctgcaacatgcaaaaatcaatcacatttctatatactagcaatgaacaactggaaacccaaaattttaaaaaaatactatctacagccaggtgcaatggttcacctgtaatcccagcactttgggaagctgaggcaaaaagatggcttgagttcaggaattcaagaccagcttgagcaatacagtgagaccgccatctctacaaaaaagtttaaaaattaggcagggtggtgcatgcatgtagtcccagctacttgggaggccaaggcaggaggatcacttgagctcacaaggtgatagctgcagtgagctaggctcatgccactgcctgagcaacagaacgagaccctgtctcaaaacagaacaaaaacaaaaaaaaattcacaatagctcaccacaaaataaaattcttaagtatgaacttaacaaaacacatataaaatatatactgaaagaaatgctgataaaaagatcaaagaactaaaaaacaataaatatatcaagttcattgactgaaagtataaaaacaataaagatttccccaaaattatctgcagatttaatccactgccaatcaaaattctagcaggattttctgcacataaacagattctaacatttgttaggaaaggcaatgtaactaggatagacaaaacaattctaataaagaagaataacttgggagaaatccctatctccaattttaagaattttaaattataataatcaaaacaatgtagtgttaaagacagaaacacagatcaatggaatagagtccagacacagacccacagaactatagatgattaatttttgacaaaagtacaagtgcaattcaatggagaaaggataatcttttcaacaaatagtgttggaattagacacccatttgcaaaaaaaaaaaaaaaactcttgacctaaaactcccaccttatacaaaaattaacttaaatggatgacagatctaaatgttagaacaaaaaactatcaaactttcggaaaacataggagaaactctctgtgagtttggattcggcagagttcttagataaaataccaaaagcatgtgacataaaagaaaaaataaaatggatttatcaagattaaaatgattgctctgtgaaagacaatgttaagagaataaaaggtaagctacagaaaatatttgcaaattgtttatctggcaaagacttgtatctagaatatatactttaaaaactcttaaaactcaacagtaaaaaaacaacgaaattttttaatgggcaaaagacttagacattcaccaaagaggatatgcacatggcaaataaacataaaaaaagatgctcagaccgggcacagtggctcacacctgtaatcctagcactttgggaggccgaggcgggtggatcacctgaggtcaggatttcgagaccagcctggccaacagagcgaaaccctgtctctactaaaaatacaaaaattagctgggcctggtgtggccggtgcctataatcccagctacttgggaggctgaggcaagagaatcgcttgaacctggggtggcggaggttgcagtgagccgagatcgcaccactgcactccagactgg

SEQ ID NO: 1342 - DNA, 1000 bp, Homo sapiens
  misc_feature (1)..(1000): DMR8:68742901
cttttgtcttcttagaccccattcccttctgatcatctggcttcctgaccatccatcttagtcttctttgctagacatcttcctgtcttcccctgaaattttgacgttaaccaatacttctggtccctattttattctcatcttgcacactctctctgactaattccattcacagccatgatttctattgaatttaagtccagctctcctattattaggaggaataatctggtggtgacttgaggtagttaaatttgagtggagaacaattcgaaagatgacaaggacacctgttagaaacctgtttttcttgagtatgatgatgaatttatggacttagagtagcaatggataagaaggaggaatagcatgtttttttatttttcattttctcctatgtaattgcttttacaactttgttgaggcataatttaggtattataagatttacaagggaggagccaagatggccgaataggaacagctctggtctacagctcccagcatgagcgacgcagaagacgggtgatttctgcatttccatctgaggtaccaggttcatctcactagggaatgccagacagtgggtgcaggtcagtgggtgggtgcaggtcagtgggtgcgcacaccgtgcgcaagccgaaccagggcgaggcattgcctcactcgggaagcgcaaggggtcagggagttccctttcctagtcaaagaaaggggtgacagatggcacctgaaaaattgtgtcactcccacccgaatactgcgctttcccgacgggcttaaaaaatggcacaccaggagattaaaacccgcacctggctcggagggtcctacgcccacggagtctcgctgattgctagcacagcagtctgagatcaaactgcaaggcggcagcaaggctgggggaggggcgcccaccattgcccaggcttgcttaggtaaacaaagcagccccggagctggaactgagtggagcccaccacagctcaaggaggcctgc

SEQ ID NO: 1343 - DNA, 200 bp, Homo sapiens
  misc_feature (1)..(200): DMR8:70468301
tggtatctgctctggagaagtttataatctattcaaagctaaaaaaaaaaacaaaaaacaaacaaacaaaaaaaacccggccgggcgcggtggctcatgcctgtaatcccagcactttgggaggccaaggcgggcagatcacgaggtcaagagttcgagaccagcctgatcaacatggtgaaaccccgtctctactaaaa

SEQ ID NO: 1344 - DNA, 100 bp, Homo sapiens
  misc_feature (1)..(100): DMR8:70508901
gacttttggtgtacatataagcatctcttggctatacataaaaaatagagggtttgggtaagttcaacttcagtagatattatcaaacacttttccaaca

SEQ ID NO: 1345 - DNA, 1100 bp, Homo sapiens
  misc_feature (1)..(1100): DMR8:72451001
ctatcaaatgtgcccttcagaaagttcaatcttctatagcaaggtggagcaatttaaaatgattaaaagatgaacagaaacaaaaacaggagactgagagacctattttgacaggctttacttgaagaggttcaatgatggtggtagtccaaaaagtcaactagtggcgaagacaatgcaggaaaatagaatatggtctctatgtgtgaaatgatgcggccattcagcaaggcagggaatgttggaagagttaatgaagtcagtctgggagactttaaaaattggaattattggtaggtcaactgaaagacgtccaaactctttgtgttggctttctattttttagtcttgttaaaagtacaattaggagaaaattagaaaaagtctaatgaggaagaaagaatgatttctgtattttagaggcctgcaagttttttgactacgacccatagtaaggattaaattttgcatcattatacccatagacacagatatgaaaacaaaaaaattgatgtagcagtaattacccttattacatataatgcactctggtattttctattcctgtgctattttattatctctccataatatgatacatttaatgactgtgaatatagaagttcaacttaactaacaaagagtgcttgaggacattttgttccttagagtggaaggctttacacgtaaaatctgctggaaaaaagacctggactttgaaatcagacctaggttccatcctggattcaaaatttattaactatgctgcctaaggcaatctacttacccttcagggacttgtgatcatgataccaattatcactgataagcaccttctccataccaggcatggagcaagtctacgcaacaagtgaggaattaattataggaatgttgttctgaataggtaggatggaccccctagaacaggatctggcatatattagttcagaaatgaatgaatcaaatatacatacatatgtatatatataatcctgatttaaatttattcattcaaaaataaatgaaaaatgtatttactaaagctcttattaaataggatatttcatttctttctttctttcttttttttttttttg

SEQ ID NO: 1346 - DNA, 1200 bp, Homo sapiens
  misc_feature (1)..(1200): DMR8:74566901
ggcaaggctaaaggagcattgtaacgctggggttgcaggcacccacccctagacactatcgcagagtcagagcccaaagcactcgccccgactcctgcatctgcccatctgcatgctccctctcccatcaggggtttgagcattggtaactaaacatgtgagccacacccctgtcacacatcctgtgagggggatcagggaactctcccatttcaccacgatccagccatctccaaccagtcccgagctccaacattggggattacaatttgacatgagatttgagtggggccacagatccaaaccatatcgggagcaaaagggtaaggttttcatcttagaaatgtttctttgagtgccatatagagaatgggtagaggactagaagctgtgagaaaatttggaggtagctgcagtatgctaggattcatggaagcagaatctgcaagcactcacagaaaataatattttcaatcgcagagatttcacaggtgtacgtgtacgtggaaatattgatcttatgagccacacttgttgcctcttgattatttacaggcacttctggaggcatatgtgcttcaagcctaagtataactagtcaaaataaactggatttttgaaagactttttatataactatgttaggttgttcaattcaggactcagcacagatgtcagaacttttattgtaattaggttgttgtcaataattatgtgtattgagcatgaaatgagaaattgtggcacattaaaaaaacaaagctatataaatgaataatctaacaaggctggcaaaaaatgatcagtgtagagctgctttaatcagagatcatttaggatcagcacattgtaagaaattggttctcacaatgtttctccattctaattaattaacgtctttttaactcactaatttgcataagaatctccctttgtcgagtagtaaacagaatgaagttgcagcctttatgtgcccaacaggtgtaggaattacttacagtgacggatgatgttgtaaaaaaagtttcttttagtttattttgcccactggaagaatctattatcttttgaagataatagatactttatggtttcaattttgaacaacactcttaaaggaagataattgccaactaccttgcctttaaaggggaaaaaagatgagagctttgctcaaaacaatattgtgaaatacttagc

SEQ ID NO: 1347 - DNA, 1000 bp, Homo sapiens
  misc_feature (1)..(1000): DMR8:75579601
tgttaaaaagagtatggcacctctctcccatctctctttcctcctttcttaccatgtgagacctactctccttccccttccaccataagtggaagcgtcccgaagccctcaccagaagcaaatgttagcatacaccatccttcttgtacagcctgcacaaccatgatacaaataaacatcttttctctataaatcatctagactaaggtatttctttagagcaatgcaaacagactaagacaatcaatcaataactcttttaaacatgaatggtctaaatatactaattaaaaggcagagactgccaagctagactgaaaaaaaaaaaaaacagaaaaaaaactcaggtatgtcttgtttataagaaacccactttaaatacaaagaatcatataaaacaaaagtaaagggatgagaaagatatgttatgctaacattaatcaaaataaagaggagaaactatattaatttcagacagagcagtcttcagagtaaggaatattatcagcaataaagtggggcatttcataatgataaagtggtcaaatctctaagaagacataacaatccttaatgtgtttgcacctaataacagagcatcaaaatagatgaagcgaaaactgatcaaactgcaaagggaaacagatgaacttactattacatgtgtatactttaatacccttctttcagaagtagacagatctagcaggcagaaaatcaataaggacatagttgaactcaacagtaccgttaatcaacaggatatccattgacaacatcatccaataacagcagaacacacattcttctcaagctcacatggaacattcactaagatagaccacacttcagaccgtaaaattgcacctgaaaaaatttgaataaataaaaattttataatgactgctctaagcccacaatgaaattaagctggaaatcaataacagaataatagttaaaaaataccacaatacttggagatttaaaaatatagttctaa

SEQ ID NO: 1348 - DNA, 500 bp, Homo sapiens
  misc_feature (1)..(500): DMR8:75890201
gtagaaacaagagcaacgtatattttctctttctcaagtttctacttttaggtcaagttttctatatctttacctcaaagctataatttcctcataatttttatcactttcttaaaacatttctttcagggagtttattgagtttgtcttttatatgttactttattttctgcactgtgtgttctgcttatactatatgttctgcttatgtatcaaataaccacaaaactgaatggattaaaatatcaactagcatcacatttgttcatgaatctgcagtttggacaggtccaggtgggggtagcttgtctgtttaatcatggctgtctatggggtgcttcagtggcctgggatagctgaagggctaagaaatgttttctttttgtgaagtctctgggctgctccaagtgatttttctacatggtccattcaaaatggcagtgtcagggcagtagaatttacatggcaagtgttgtaggagtcaggaaatggagggtgcc

SEQ ID NO: 1349 - DNA, 100 bp, Homo sapiens
  misc_feature (1)..(100): DMR8:78757301
ctagcatatggtttatcctgaagaacgttccatgtgctggtgaaaagaatgtgtattctgtagctgttggataaaatattacgtaaatacctgctaggtc

SEQ ID NO: 1350 - DNA, 300 bp, Homo sapiens
  misc_feature (1)..(300): DMR8:79850401
atttttatttcccaagttaaaaataaaaaagtttgaatttaaaagtttaaaacatgtgaaattaaaaactgtgtagaaagtttagacgttaaagctataaaaatctcccagaataatacaaaaattaaaaaagatggaaaaggcagggagtggggagagaagacaattaaggatcaatccaggaggtacaatatgtgaaaatttaagttctagaataaaagaacttcagaagaaaggaaagaaaataatcaaagaaagagttcaacaaaatttatctgagtttctggttgagaaaggcct

SEQ ID NO: 1351 - DNA, 200 bp, Homo sapiens
  misc_feature (1)..(200): DMR8:81337201
tcaactgttctgcagttctggagccgtccgtgggaggaagagtggaggaagaggaggcggaagaaggaaggaggaagggccgtaccaagtcaccggtgaacgttcccagcacgcacaggactcctcccagaaacagacaggtggaagctgaccactaaaagctggctagagagagccagggcactcaggacttgggggag

SEQ ID NO: 1352 - DNA, 3200 bp, Homo sapiens
  misc_feature (1)..(3200): DMR8:81444501
gctaccattttcccattcactagctttctctttatggttgtctctttgccatcccatctctgcacttgattcagtgatcctctctgcagggttacgatgctctgcaaagacaaggtcatgcaattgacttgcctgaaatttgttgatcaaagaagcagttctttcagtatggaaccattttcataatagatatagatgtctcaggaggtacactccttttcaacagaattgagtctacccttttacactagcaggaatattcctctctctcaagcagcccactgggccaactttgaagagaaacattaaagattaccttggtctttctattgtcagctgtggtttcttcaaattcctggcctagcttgaaggagatttctgtatttttaaaggtactttcagttcgtatagttataatatctcctttcttgctgatgatcacagtgggtttggccaaatttcccagttttctggtggctaaccccacacctgaaaattaagatagtgttagaattatgttgaccaagagagcatagccaaagagactgtggtggccacatcctacgctcagtggtgccccaggtgagttgatggcaggtaatatcacttactactaagcatctcctcccatgtttcactcctaatggaaatacatgcccaggactcaaacattttaggttttgttgttgcaaaagtaaagtctgcagattttcttttttttttttctttttcttttctttttgagacggagtctcgctctgtcgtcctggttggagtgcaatggagcaatctcggctcactgcaagctccgcctcccaggttcactccattctcctgcctcagcctcccgagtagctgggactacaggggccgccaccacgcctggctaattttttgtatttttagtagagacggggtttcaccgtgttagccaggatggtctcgatctcctgacctcgtgatctgccctcctcggccttccaaagtgctgggattacaggcgtgagccaccgcgcccggccaatgtctgcagattttcaagagtaaaagtttccagctgaaatagctactgcaagtcatccatttttatcacatccaatcctattccccattgaaaattactaattatagatttgcataaatcattctagagattttagtttgtatgtacaaatactatagatatattttaaagatgagactatagcatatacgtattgttctatgatattttccctcaataccatattatggatatagagaagtattcccctcatatttttgatagaatttcacttctgaaattttgtggcttctatatctagctggtaggaaaaaaactatccatctaactttgagatctatactattataaatgatcatagagaaataaaatattttttaaaaaactcttctacatttcaaaaatgaaacaaaattagactcttaagtttattaccattattaccaagactataaaatatatggaaaagggaaaatgtaaaataaaaaatatatgaaagaaaaactaattttccaggaagtctcaatggttgaataactttttccagttaaaaagatctcaaacttttacatactgaataagaagttaagagttacagccaataaactataaactatattctttcttcaaattctgattaatcttttgttattttatacagtttaggacaatgtttctcaagttaaatcataatctctgggtcagagcctgagaatttatatttaccaaatcccaaggtgttattttgcatgctaaactggaaaacagtggaattagaaaatccttcactgagactttcttttatttggcttcttcctcagctgtaaagtgaagtctttaaatctaaccgatctcacagtatgaattgatccccataagttctcttactgttccaggcaacaatgacatgactttgctcattttatctaaaatagaacattttatacaggctttctgaacagttaagtaaagctgtaggcactttgacaagcacagcaaactcgggtcactggcatcactctttattgtatttatatagttctgaaaattcccaaagactcttcatatctattgtgtttatatcgatgggacatactctagaaatagtataaaataaagttgttgtaactaatgactcggttttccatcttcactcactgctccaactccagaaacgtctgatgttagcgaaattgagtttgaattcactgccataactccagttctttttctctcagtaacttccctagactatgaacacagtattttaggaagtatttttgtttttcaaactctctgtatctacatgattgtgtaataaaggacaacctagaggtagagagaaaaaactgttagtttagctaaaacttaaatttttaaattgagattttctaggatttgcaatatattcaattccttattttatgaacacttcagttgctatgaacgtagctctcagaaaagccagaaaatgggttgaccatgcttttaagctttctctcctctggacctgcaaccaaaattctcttggtatgaaattgcccttgaaatcagtgggcattccatgcatttaagcagctctctcatttaagttaattctattaaaaattaccacaaataaaattcaaataaattatctgaatgacacaacaaaagattaatcctaaaagaggattgtactgcagccttgcaaaactccccagtatcctgttaaaagtagtagatgaaaatgtcatgtagctttcttaaaaaggagcttttcagcagaacaacaaaaagcatttcttacccagagctttcatgtaatcgtcaaagttctcactagagacaagtttccaggtgcccaggaatttgttgctcatcgtgatgggtgagagctcaacacagttctaagtgggattcagaagactcagataaaatgctgaggcctcagaagattcttttcaaggatgcccaaagcgtgtgactcttacagagacccaatggggaaaggcagtgtcgggactaagcaatgaatggctcttcaatggccagctgcccgcccaataggataaaagaaaaccccacataatacttccctttgtctccaaaaaaatttataaaatgaatgagattactatttgaatcttcaaaaattttttgatcaatcttacatttataagaaggcttaggccct

SEQ ID NO: 1353 - DNA, 300 bp, Homo sapiens
  misc_feature (1)..(300): DMR8:81911301
tatagaagggtgcgacttgtgaatggagtaatggcaagagcatacctggacaggggaggggaaagagttcttattcctgatgcaggtagcccctactgctgtgttgttcccctattggctacggttggatggcacagtctaagctaattctgattggctattttaaagaggtcaggggtatgagccagagtggtggggtgagtagtttggtgggaaggacgtttaggaacaggtaactagaggtgacttaggtcagagcaggtgaccaggagtgacttaggtcaaagcagctgatcagga

SEQ ID NO: 1354 - DNA, 600 bp, Homo sapiens
  misc_feature (1)..(600): DMR8:82569201
gaaaaaaacatataacactgtttaaagaaatgcaaaaatccagcagctaaggtataaaattcaccacttccaggtttcagtggtaattggaattgtcaggcacacaaaaaaataggaatatatgaccctaaaccagaagcaaaataatcaataggaacaaatcaaaatgtgacatagatggtgagacacacagcaaagaccattgtagtataaattataaatatgttccataagttcaaaatgatacagggcatgataagaaataaatgtaagatattgtaaaggctgaatgaagctttttatgttaaagaataaatataaaatttaaaatacatcgtatatcactagtagcaaaataaacactgcagaagaatgattctgaatatagtaatagaaattttccatactgaaagatgcagtgtataaatacatttacaaagtgtattaattgcccagaaaaaaactattaagcattccaatatacttgaccaactgaaactaattatgaaccaacaaattctagactcagcaaaatagtttcaaattgaagacaaaataaagacacttcgggtaaacaaatgctcagaaaactcattgtta

SEQ ID NO: 1355 - DNA, 300 bp, Homo sapiens
  misc_feature (1)..(300): DMR8:83484801
tgggtctgcactacctttatgagttgtcacactcaccacgagggtctgtggcttcattcctgaagtcagcaagaccacgaacccgccggaaggaataaactccagacacatctgaacaactgaaggaacaaactccggacacaccatctttaagagctgtgacactcacagcaagcgtctgcggcttcattcttaaagtcagtgagaccaagaacccactggaaggaataaattctggacacattattatggtgcttttactataggaattcataagtaaacaaaacagaaaaaagtatc

SEQ ID NO: 1356 - DNA, 200 bp, Homo sapiens
  misc_feature (1)..(200): DMR8:84366401
tctgtaaacaacagctacaactaccaaagatctgcagtagtgggagtgaaaatgaaatatcagagatggaaaaggatgtttaaaaggtggctggaggccgagtgcggtggccacgcctatgatcccagccctttgggaggctgaggagggcagatcatgaggtcaggggatcgagaccatcctggccaacatggtcaaac

SEQ ID NO: 1357 - DNA, 400 bp, Homo sapiens
  misc_feature (1)..(400): DMR8:85554801
attgcaacataagttgttgacttatcattacaggggctataagggtgttgcctttgctctatttacaaacaggttcacaaccttcttcctggtgttctctttcttatataactaggtctgccattctagcgagtggggatattggagcagatggctctgatattaagaacccctgaaggctgagaagcaacaaatgagagattagcggataggaatccctgaaagctctggtcccaacaaatgaagtagaagagggtatttggaggcacaaagaatcctagtgtttgggatatgcaactagggccttgccttttagtcaatggaagcttgctgctaaataacagattgatgactcttgttaagttagatgcaatatgagaacagagattatgtctgattc

SEQ ID NO: 1358 - DNA, 1700 bp, Homo sapiens
  misc_feature (1)..(1700): DMR8:85719601
cattactgggtatacacccataggactataaatcatgctgctaaaaggacacacgcagatgtatgtttattgcagcaccgttcacagtagcaaagacttggaaccagcccagatgtccatcaatgatagactggattaaggaaacgtggcacaaatacaccatggaatactatgcagccataaaaaagcatgtgttcatgcccttcggagggacacggatgaagctggaaaccatcattcttagcaaactatcgcaaggacaaaaaaaccaaacaccgcgtgatcccactcataggtgggaattgaactaggagaacacttggacgcagaaaggggaacatcacacaccggggcctgtcatgggcggggggagggggagggataacattaagagacatacctaacgtaaatgactagtgaatgggtgcagcacaccaacatggcacgtgcttacatacgtaataaacctgcacgttgtgcacatgtaccctagtaattaaagtataatttaaaaaaaaatggaaaacgaaagtgtgatcctaatgtcatggtgcggactgaatgaagcagcacatggcaagccttaaaacgatcgcacatagtaggtgttcaattaatgttaactatatttcttttttataatagtttataaagggaattcatgaacactatgtgattaatccttggaacaacccaacaggtaggtaaataaagcctaattttatacctaaagaaaccatgcggcttaacttgcccaaaataataatgattgtaatgagcactggctgttggtttcttatgtacttggtactttgcacgtattaacccagtcagtcctcctaatagttgtgagagagatagcattcttatccccattttacagatgaggaacctgaagcccaggtgataagtagtttatccaaggtatcatagctagaagtcgggtgcaggcagtctggctccagagcccctgctctgtccgctgacctagctgacttcccaagagtcaaagtggattcttccccaagaccaaccaattacaatgactgaatcagtcagtcaacttcgaactgggctccaagagagaacgaaccatcatgcctctctaaatcctcatttctagtttgaatcttcaaggagagatagacactaagtagctagttttgctggaatggctgattttatcaatgttttcggtgtgtgagtgtgtgtgtgtgtatatgtatagaactaaattaaactgataatttgaatgcttacacttccattagttcaatttgtgtatgtgagccctcacacacatacatacacacacacaaactgttccagaacagtgacttagtgaaaaactggatttccactctgtcagacaaatttcggaaagcactgaagtagggcatttctgattgattttaccgttcccggaattttattttcctttatcacttagaccccttctgtggggatttaataaataaacgtcttttgtagtgtatgttatttcattttacttttataatttatatgaattttaattttaacttgacaaataaaaattatatatatttatggcatacaacatgatgtttcatacgtgtatacattgtggaatgacaaaatcaagctaattaacacactcgtttcctcacatactgattttaatgtgatgaggacatgtctaaaatctactcttatagcaa

SEQ ID NO: 1359 - DNA, 1700 bp, Homo sapiens
  misc_feature (1)..(1700): DMR8:89819101
tcccgcctaggcaacagagtgagaccctgtctctaaaaattaaaactaaaaaataatttatatcattgcgtgatgaatataccatgtcttattagcttgctgctttggtaaggtagatactttcttaaaaccattctgataatagcggttgttttatttgttactaaagggtttaggccatgcaaattagcaccatccgaaactcagataactcaaattaaataaaaagttttgaaacactttatttatttattttttattatgttattttatatttttatcattatactttaagttctagggtacatgtgcacaatgtgcaagtttgttacatatgtatacatgtgccatgttggtgtgctgcacccatcaactcgtgatttacattaggtatctctcctaacgctatccctccctcctccccccaccccacatcaggccctggtgtgtgatattcctcttcctgtgtccaagtgttctcattgttcaattcccacctatgagtgagaacatgcggtgtttggttttctgtccttgtgatagtttgctcagaatgatgatttccagcttcatccatgtccctacaaatgacatgaactcatccttttttatgattgcatagtattccatggtgtatatgtgccacattttcttaatccagtctatcattgatggacatttgggttggttacaagtctttgctagtgtgaatagcaccacaataaacatacatgtgcctgtgtctttatagcagcatgatttatagtcctttgggtatatacccagtaatgggatggctgggtcaaatggtatttctagttctagatccttgaggaatcgccacattgtcttccacaatggttgaactagtttacagtcccaccaacagtgtaaaagtgttcctattactccacatgctctccagcacctgttgtttcctgacattttaatgatcgccattctaactggtgagagatggtatctcactgtggttttgatttgcatttctctgatggccagtgatgatgagcatcttttcatttgttggctgcataaatgtcttcttttgagaaatgtctgttcatatccttcatacacttgttgatggggttgtttttttcttgtaaattcgtttgagttctttgtagattctggatattagccctttgtcagatgagtagattgcataaatcttctcccattctgtaggttgcctgttcactctgatggtagtttcttttgctgtgcagaagctgtttagtttaattagatcccatttgtctattttggcttttgttgccattgcttttggtgttttagacatgaagtccttgcccatgcctatgtcctgaatggtattgcctaggttgtcttcaagggtttttatggttttaggtctaacatttaagtctttaatccatcttgaattaatttttgtatgaggtgtaaggaagggatccagtttcagctttctacatatggctagccagttttcccagcaccatttattaaatagggaatcctttccccatttcttctctttgtcaggtttgtcaaagataagatggttgtagatgtgtggcattatttctgagggctctgttctgttccattggtctatatctctgttttggtaccagtaccgtgctgttttggttactgtagccttgtagtatagtttgaagtcaggtagcatgatg

SEQ ID NO: 1360 - DNA, 300 bp, Homo sapiens
  misc_feature (1)..(300): DMR8:91479401
tcattaagcaaaatagttcaaagttggcatacagtctcaactataaattatagttattcaaatattttatagttacattttaacgttgagaggtacttttttaaattaaaaatattagaagcaacttactttttttttttcctttttttttgagaaagattctcactctgttgcccaggctggagtgcagtggcacgatctcaacttactgcaacctccacctcccgggttaagcgagtctcctgcctcagtctcccgagtagctgggattacaggctcccgctaccatgcctggctaat

SEQ ID NO: 1361 - DNA, 200 bp, Homo sapiens
  misc_feature (1)..(200): DMR8:92459801
agtagtctatcctctatcttctaaatgtaggcacttccaaaatcttcatttctagttccgtacttcctccaaagctgacgtattatttgtcctttctccctgctttttgtctctctcacccaaaacaatacttcaatcacccaaaaattaatatctttttaatattggctctgtggtgctgtttacttgatccaaagttc

SEQ ID NO: 1362 - DNA, 500 bp, Homo sapiens
  misc_feature (1)..(500): DMR8:92881401
tgcaaaagagtggggatacattaataattattgaaactaggtaatgggtagattgagattattacattattctctctacttttgtgtaatacatgtggttagtgataaaaaaagcaagcaagaagtaagagagaggggaaaagcaggtgaggatcaatgacgagtctaaataaaagggtagaggtagttaacacagtaagtacatagttaagtacgtgagagtgctaacctattaaagtagaagtgaggttcaaaaaaaaaaaaaactgaaagaagagagactgcctggaacttagaattaaggcaaatagggtagaagttgaagagctggagaagggagcaaaagcactcttaagctacctagaagggcactccctatctggatcacaaatgtttgggaggtagcatcataaaagattttcatgtatggggtatttctctttagtttaccaacttccacactgttgtttagtgtaaagcatcctaataggcgctaagat

SEQ ID NO: 1363 - DNA, 2400 bp, Homo sapiens
  misc_feature (1)..(2400): DMR8:93555901
ccaacgtgtccctcaccctccctccctgtctctcttcctctcctcccccttcctctctttctctctctgagttgactctgtttgccattctaaggctaggtacaaggggaatattgtagattttcaaagccttctacaagctgtctggagtgcagttgccatcctagttcacacatcacttgactacagctccctatgttccctcaactcggtgtcccattagtttccaagctcagtgcattctctcatttcctcttctgtatttccacagccacattcttaggccaagctccatgagctcttctgtgggcttaggcaacagtttcctccggaggctcccagccaccactcctttcccacggcatcatgcaagttgagtttccatctcattatgtaagtctctttcttaaagccatggttccattgcttgggataaaggcccaatgttccagcaagacatacgaggcttttaacagtgccccatatgacatgttcagcctcttctgtagccagtccacctccccatcactctttgcttgggcctcagtgatgtaccaatttatactggccctttctccatatagctcatgctattgctgtccttccaaaatgcctttctccccattcccacaatgacctcctgccgatctaccatgatccaggttaaatggcaccttttccttgatgcatccatcctcttatatactcattcactgagccccagccctgggccacgtacttccctgggccctagcaatgcagtcatctgcagaactggcaggcagagctcacagtcaagcgagagacccaggcttaaaacacacaaacatagacttcaatgacacaacaagggtaagattgaaactgtgaccagtctgaaaaagaaaagaagtgcttccagctgaagaaacagcataggcaaaagccctctgatgcaagagacccccgcaagcaggagacagcaataaaaagctagcatggggagaggagagagctgcagggagtggctatgagtgcagctgaggccacatgagggcttcatgtccataagaagctgttttatatttttagagcaatgggaagatgttgcagagtgttccatggaagagagtctgctcagttttgctctccgaaaagatctttttggctgccatctagagaatgggtgtggagggggccctagcaatgcaggatgtagagggggctggggtgaatagcgactaaagggaaattaagtgtaatttctctaccacataccaactgaaagtgtggaaaagagacacaacctattctgcatggtatagaaaaccacctcaaaattctatatttgctgtgaataatccccaaattaggatgaagtcttcatctggttctgaccaagagacctccatcccagcatccctgcacctgtctcacaccagcccagaattagagaagattgtcacctcgctcccaatctccaggacaaagaaaaatcaccaaatataccagccaggcatggtggctcacacctgtaatcccagcactttgggatgccaaggcgggcagagcacttgaggtcaggagttcgagacaagcctggcaaacatggtgaaaccccatatctactaaaaaaaaaaaatacaaaaattaaccaggtgcggtggttcatgcctataatctcagcttctcagaaggctgaggcacaagaatcgcttaaacccaggaggcagaggttgcagtgagtcgagatcatgtcactgcactccagcctggttgacagagtgaggctccgctcaaaaaaaaaaaaaaaaaaaagaaaagaggccaggcgcggtggcttacgcctgtaatcccagcactttgagaggccgaggcaggttgatcaggaggtcaggagatcaagaccatcctggctaacatggtgaaaccctgtccctactaaaatacaaaaaattagccggacgtgatggtgggtacctgtggtcccagctgctcgggaggctgaggcaggagaatggtgtgaacccgggaggcagagcttgcagtgagccgagatcgcgctactgcactccagcctgggcgacagagcgagactccgtctcaaaaaaaaaaaaaaagaaaggaaagaaaaatcactaaatatttatattcacttaaccattatatttctgtgttaatataaccatgaatatttccttctcataacaaaaatgttacgttgaccctttcttacagatggttcttgagatgatgtcatcattaatattcctaaatacctgtatgtttggcattatttattttacaaaacatttttatatttgagaattttgttccttatatgaatacttcagttatgttagttgccaaaatacacacacacacacacacacacacacacacacagcaggaagaaataaa

SEQ ID NO: 1364 - DNA, 600 bp, Homo sapiens
  misc_feature (1)..(600): DMR8:94448501
atctgcactcccatgttcgctgcatcatgggagcacacacacatacacaaaatagaatatcattcagccttaaaaaaggagactctgtcatttgccacaacatggaaggatgtggatgacattatgctaaatgaattaagccagacacagaaagaaaaatactgcatctcacgttatatgtggaatgttactttaaaaaaaaaaaaaaggccaaacatacagagattaaaaataaaacagtggttactagaacagaaaggtgggttggtgggggaggagggagaggaaatcgggagatacgcgtcagaggatacaagtagtggatatgtacgatgaacaagtctagggatctaatatacaacatgaaggctatagttaataaaattgtattaggtactttgttaaataagtagattttaggtgctctggtcacacacaaaaaacagtatatgtgatgagtaatatgttaacttgcttcactatattaccattttactgtctctatatatgtacgtgtgtgcacatgcatatacatacacacatgcatgcacacacacacacacacacatacacacatatatatctcccataacatcatgt

SEQ ID NO: 1365 - DNA, 100 bp, Homo sapiens
  misc_feature (1)..(100): DMR8:94884301
attacttacgagaagtaagcaagaaagaatgggatctcctctttttttttttttttaattttttgagatggagtcttgctctgttgctcaggctggagtg

SEQ ID NO: 1366 - DNA, 2800 bp, Homo sapiens
  misc_feature (1)..(2800): DMR8:94998601
caaggtgaggaccacaaagtccctgttctcagaagcccacatgagtagaagaggcagacacctttggaagcagctgctgcccagtgcacagtgctatgagtaggtcaggtggaaggggaggtggatgcacgcaggagggtgtctggctttgctcagatgctgcttgagcagcatcttgaagggtaaaccaaggacttgcaggtagaaaaggaaggcaagtttattcctggtaaaggaagcaataaatgccaagtcctatagattataaaacagcctggtgttttggggaattgaaggtttgtttgggtttgttacggttggagagcagggtgtgtgtgtgtgtgtatgaaattagatcagtggttttcaaacttcttgaccacaatccagttaagaaatgtattttacaccaccacacagtgtatatgtgtgttcgtgtgtgtgtaaaacagacataaaatgtcataaaacatttaatatttattaaatgtactccggtatttttctactaaattccattctactttttttttttttttttgaagacagagtctcactctgtcaccaggctagagtgtagtggcatgatctcagctcactgcaacctccgcctccctggttaaagcgattctcctgcctgagcttcccaagtagctaggactacaggtgcacgccaccacacccagctaatttttgtatttttagtagagacggggtttcaccatgttggccaggatcgtctcgatctcttgacctcatgatatgcccacctcggcctcctaaagtgctgggattacaggcgtgagctgccacacccagcctctttttttcttttgagatggagtcttgctctgttacccaggctgggtgcagtggtgcaatcttggctcactgcaacctccacctcctgggttcaagcaattctctggcctcagcctccccagtagctgggattacaggtgcatgccatcatacccggctaatttttatattttcaatagagacagggttttgctatgttggccaggctggtctcgaactcctgaccttaggtgatccacccacctcggtctcccaaagtgctgggattacaggcgtgagccaccacaccgggcccattctatttattttttaaaatgctagtcataactttctacattgattttgcaaactactaataggcactatctgtgagttgaaaaattctggactacattgtgtctacagacactaatattctataacctagtcagcctctccctgatttatatgaccatgaccactttctgaattagaagatattgacaggaatcaaaaagcttatttgggggccagatgtggtggctcatacctaatcccagcactttgacaggctgatgggggaggatcccttgaggccaggcattggagatcagcctggacaacatagtgagacaggctgtattttttttttttttaaagaagcttagctgggtgcggtaatcccagaactttgggaggctgaggcaggtggatcaattgagctcaggaattcgagaccagcctgggcaacatgccaaaaccccatctctacaaaaaatacaatagttagctgggtgtggtggtgcatgcctatagtcccagctactctggaggctaaggcaggagaatcacttgagtctgggaggcggaggttgcaataacccaagactgcaccattgcactccagcctgggtaacaggaatgaaaccctgtctgaaaaaaatgaaagcttatttggacattcactcagaaatatttattcagcagctacaatttcttagacactatgatacatgctagagatacggtgggaaggaaaacgaaacttggcctctaccctcatagaaccaaaaatcggtgtcctgaatgatttgcaataattaaaaatgcatattctaatctttttattagaattagataagatatgcaaaaatgcatattttaatctaaaagtaaaatatgcttattgtaaaaaaattcaaactatataaaaaagtataacatagtaagcaaaaaaaaaaaaaaaaattctggctgggcgtcgtggcttacacttgtaatcccagcactttgagaggctgaggcggtcagactgctggaggtcaggagctggagaccagcctggccaacatcatgaaaccctgtcactactaaaattacaaaaattggccaggggtggagacacacatctgtacccccagctacttagggaggctgaggcacaagaatggcttgaacccatgaggcagaggttgcaataagccaagattgcaccattgcactccagcttgggcaacagagtgaggctctgtttccaaattgcttccccttactttttttttttttttttttgagacagggtctcgctctgtctcccaaggtggagtacagtgacacaatcatggctcactgcagccttgatgtcccaggcccaagtgatcttcccatctcagcctccagagtaactgggactccaggagcaccaccatgtgtggctaattttttaaaatttttaatagggttgaggtctcgctatgttgcccaggttggtcttgaactcctgaactcaagtgatcctccctacttggccccaaagtgctgggattacaggagtgaaccactgtgcctggccctccttatctttttttggataaagtttctgtatttattttattcgaatagaaggactgaatttctgcttgaatttctgaccccctgggaaatcttttgggggagtgtgactctgcttgccagagcttcatcatccccacctcgagag

SEQ ID NO: 1367 - DNA, 1600 bp, Homo sapiens
  misc_feature (1)..(1600): DMR8:95563101
caaaaacaccaaaattctgctaattacaagaacgaacatgggagtgaacttttctttagagcctagacaagaagtcaggaggtgtgtatcagccaacatcttgattttggccatatgataccctgatcagagaacccatctgtgtcatgccagacctctgacctgaagatgaatgctctaataagagggtactgttttaatatgctaagttcgtgatactttgttacatgggaatataaagctaacacagagcataaaatcatattttatgaaacatgtaagtagggaattttaggggttaattcagcaagagtatacaacaattatatattcaccgaacactggagcacccagatatataaagcaaatattattagagctgaagagagagattgatcccaacacaataatagctgcaggcttcaacaccccactttcagcaatggacagatcttccagacagaaaatcaacaaagaaatattggacttaatctgtgctatagaccaaatggacctaatagatatttacagaaaatttcatccaacagctgcagaatacacattcttttcctcagcacatgatctattctcaagaatagaccgtatgttgggtcacaaaacaagtcttagcacattcaaaaaaaattgaaataatatcaagcatcttctctgaccacaatgaaataaatctgaatatcaataagaagaattttggaaactaacaaacacgtggaaattaaacaatatgctcccgcatgaccagtgggtcaatgaagacattaagagggaaatttaaaaatttattgaaacaaatgataaaggaaacacaacataccaaaatctatggaatacagggaaagcagtactgacagggaagcttatagctgtaagtgcctacatcacaaaagaagaaaaacttcaagtaaacaaccttatgatgcatcttaaagaactaggaaagccaggagcaaaccaaacccaaaataagtagaagaaataataaagattgaacagaaataaatgaatttgaaatgaagaaaatgataggatcaacaaaacaaaaatttagtttttgaaagataaaaaaaatagacaaacctttagccagactaagaaaaaagagagaagacccaagtaaacaaaattagagatgaaaaaggagacattataactgataccatagaaattcaaaggatcattagtggctactatgagcaactatatgccagtacattagaaattctagaagaaatggataaattcctagacacatgcagcctaccaagattgaaccaggaagaaatccaaaacctgaattgactaataacaagtaacaaaattgaagctgtaataaagtctcccagcaaagaaaagcctgtcacccaatggcgtcattgctaaattctaccgaacatttaaagaagaactaataccaatcttaaaccattctgaaaaatagaggagaagggaacacattcagtctcattctatgaggccagtattaccctgataccaaaaccagacaaagacacatcaaaaaaagaaaactgcatgccagtgtcactgataaatattggtgcaaaaatcctcaacaaaatgc

SEQ ID NO: 1368 - DNA, 700 bp, Homo sapiens
  misc_feature (1)..(700): DMR8:97005801
tgagtatatacagttgtgctaatatcagtttgtagtcgttcaaggctaatcttcccactccagaggaaatttttttatcatatatgcatacattgctgcactgaataatgggaacctaaaataaaaaagatcattgcctattttatatgctccataaaattcactgacagtaaccaccaacatcccaggtatcgtctgcagtttagaatcctgaatattttccccaaaaatgtccgataagggaagcaatttaagcaaggcagacagtgctgctaacagagaccatacagtttcagccagcgagtctgctgactgaaatgaagtccttggacctgtggtttttttgtggggttatttgctcttgtagaataaggctctcagaatttcaataaaagggtgaaaacagttttgaaactgagaagactgttacactgcctaagaggaatagaggtgtgattgagatgtggtgaaagaatctgaaagttgagttgtttttttttaagtctcttcccgtgtctatgtcctgccatttcttagatttatacaaacccgacccaaaaaagggtgtcaggggcttgaatccagcaggcactctcatacaggtctgttataccacttcaccttttatagtcagtcgacaggacagggggaattacttagtatacaaagaagtgcaagggaaataaaacctatgcaaatc

SEQ ID NO: 1369 - DNA, 3100 bp, Homo sapiens
  misc_feature (1)..(3100): DMR8:99694501
aagctgaaactggatcccttccttacaccttatacaaaaatcaattcaagatggattaaagatttaaacgttagacctaaaaccataaaaaccctagaagaaaacctaggcattaccattcaggacataggcgtgggcaaggacttcatgtccaaaacaccaaaagcaatggcaacaaaagccaaaattgacaaatgggatctaattaaactaaagagcttctgcacagcaaaagaaaccaccatcagagtgaacaggcaacctacaacatgggagaaaattttcaccacctactcatctgacaaagggctaatatccagaatctacaatgaattcaaacaaatttacaagaaaaaaacaaacaaccccatcaaaaagtgggcaaaggacatgaacagacacttctcaaaagaagacacttatgcagccaaaaaacacatgaaaaaatgctcatcatcactggccatcagagaaatgcaaatcaaaaccactatgagatatcatctcacaccagttagaatggcaatcattaaaaagtcaggaaacaacaggtgctggagaggatgtggagaaataggaacacttttacactgttggtgggactgtaaactagttcaaccattgtggaagtcagtgtggcgattcctcagggatctaaaactagaaataccatttgacccagccatcccattactgggtatatacccaaaggattataaatcatgctgctataaagacacatgcacacgtatgtttattgcggcattattcacaatagcaaagacttggaaccaacccaaatgtccaacaacgatagactggattaagaaaatgtggcacatatacaccatggaatactatgcagccataaaaaatgatgagttcatgtcctttgtagggacatggatgaaactggaaaacatcattctcagtaaactatcgcaagaacaaaaaaccaaacaccgcatattctcactcataggtgggaattgaacaatgagatcacatggacacaggaaggggaatatcacactctggggactgtggtggggtggggggaggggggagggatagcactgggagatatacctaatgctagatgacgagttagtgggtgcagcgcaccagcatggcacatgtatacatatgtaactaacctgcacaatgtgcacatgtaccctaaaacttaaagtataataaaaaaaaaaaaaactccataccaagaaaaaaaaaaaaagaaaatacagtgtccccacatgaaggaaggaacacttacaagggatgggaccctgagagagcctgggtatccaggagcgaagccaaagatcctgatgtctgaggaaggtgagaaggggccctgctcatgaagatgtagaatattaagtatgagtgaatgctgtaatcaatcatgaagccttgatgagaacttctgggtagtccacccagaagtccaactgctgcttgtctcacctgtgccaacatcctggggttgaggagtggagcaaatgttccatttggctgttgcactccggtccaccccgtgtacccttccttcagaggcgatcgccatggctgttaggccttgaggcagaagtgcccacgcacggtggcgagagtgccatggacctctgccacagtggattttatggttgcgggacctcggtgccttcctgtgcacagctggcactcttcacgccgtgtctctgatgacttggtagtagagaagtccctcaagtccttcaaggacaagaacaagaagcttgaggaaggcggccaagtgtacacccccaccccacagaggtggtggtgaataagtcgctcgggcagagggagctggatgagctgaagcgctactgccttggcttctgcctgctgtggatccatgccaagatcgtggtgctcatgctgtggcacatccttgacagccacaccctgaccaggcaaagcgcaggcagtttctccggatccgcgccgacctcctccgcttggtgccgttccttgtgttcgtggttgtccagttcatggaattcctgccgcccgtgaccatgaagctcttccccagcatgccagcatccacgtttgagacccagtccatcaaggaggagagcctgaaggagcttcgggtcaacctggagctggcagagttcctccaggacaccatcgaggagaggaccttgaagaacatagcagccaagggcagtgccaccagacttctccgttttcccagaagatccgggggatgggggagagacccagcaatgaggaaatcatgcgtttttccaaattatttgagaatgagctgaccctggacaacctgtcacggccgcagctggtggcgccgtgcaagctgctggagctgcagtccatcggcatcaacaacttctgcggttccagctcaccatgtgactgcgctccataaaggccaatgataagctgattgctgaggaggggtggacaacctgaacgtcaaggggctgcagccggcgtgtgggaagtgaggtatgtgggccctccgcctcagctgaagcagtgtctggacctgcacctgcatcaggagattcccatatcgctactcatcctgtcccagacgatgtacctcccagaaactcttgccagctgaccagctcaagtccatactgcagactctcccagagattgtggcaaaggaagagcaggtgaaagtggctgaggtggagggtgggcaagtgcacaaggtaaagctggaggtcacgctgcaggaggaggcagccatccagcaggagcaccacaaggagctgcagaagcgctcggagttggagaaggatgtcgcgcccgaaggtgtggaagccacccctcgaaggccaggggcctaacctcagccagaagtgcctgaagcagtcctgtggtcagagaccctgaaggacactgccccctgctagagagcttgaaggagaaggagataactaaggaggaaatcgacatcctcagcgatgcctgctctaagctgaaggagcagaagtcgctcaccaaagagaaggaggagctggagctgctgaaggaggacgtgcaggactacagcgagaacatgcaagagatcaagaaggaactctcaaagactggt

SEQ ID NO: 1370 - DNA, 2900 bp, Homo sapiens
  misc_feature (1)..(2900): DMR8:100851201
gggatgctgatgtggaaggattgcttgagtctaggaatttgtggttacagtgagctatgatcacgccacagcattccagtcttggcaagacagtgagaacttgtctttaagaaaaaagaaaaaaaaagaaatacacattctcaggctccactccagatccttggaatcagaagctctgagggtggggcctgtgcaatgagccctgcaagggtggcaggctggggagcaggcaagggtctggttgtgcagttccaacactcccttcacccttggagccagccagtattcagtcctggggatctgtgcagggaagctgccgctctgccacagcctgaagtcttctctgctaaatcctgcactgcccacagcagccccagtggccagacccaggaacctgcaaagccctgtgccgtgtgccccgaatggcatgggtccctggctcctgaaaggtgctgaggaggctgggcccccacactgacatccattcttgggaacagccagagctgcagcagacatggatgaggggcttctgagcaggagggccagtgtgtacaaaatgctgggaggtgagtgggctgtccaggtcccttctaatggctgacccactccatggtaaaagaactggagaggtggcctgccatctctgtgactcccatgactgaggcaggattaatgctcactgtggaagacctccacgatgtggctacgtggggaagctttctgtgtgttctcccataaaccaagggaagagtactggggcaaagcagattttattagctcatactgagaagtacagagaggcacaggacacaaaagcttctctagggctattcctagcctgggggactcagctctcaggagcacagagcctgcagagagacatgaggaggccagaggcagtgccacccctgcttccaggagccttccttatctgctctgctggcaggaactgcacctgtgaagttaaagcaggggggccaggcaatgcagaatgcagatcttcaagcagtgcactttacgttgaccctctatttactagaacatagattcatgagtgcaatatagattcatcaacccgcttccactgggagagtaaaaaattaaaaaaaaaaaaaattccagggggaggagccaagatggccaaacaggaacagctccggtctacagctcccagcgtgagcgatgcagaagacgggtgatttctggatttccaactgaggtaccgggttcatctcactggggtgtgccagacagtgggtgcaggacagtgggtgcagcgcaccatgcacgagccaaagcagggcaaggcatcacctcacccaggaagcgcaaggggtcagggaattccctttcctagtcaaagaaaggggtgacagacagcacctggaaaattgggtcactcccaccctaatattgcactttcccaacaggcttaaaaaacggcacaccaggagattatatcccgcacatggctcagaggatcctacgcccacagagtctcgctgattgctagcacagcagtctgagatcaaactgcaaggcagcagcaaggctgggggaggggcgcccaccattgccgagacttgattaggtaaacaaagtggctgggaagctcgaactgggtggagcccaccacagttcaaggaggcctgcctgcctctgtaggctccacctctgggggtagggcacagacaaacaaagagacagcagtaacctctgcagacttaaatgtccctgtctgacagctttgaagagagtagtggttctcccagcacgcagcttgagatctgagaaggggcagactgcctcctcaagtgggtccctgacccccgagtagcttaacttggaggcacaccccagtaggggtggactgacacctcacacagccaggtactcctcggacacaaaacttccagagcaacgatcaggcagcagcatttgcggttcaccaatatctgctgttctgcagccaccacggctgatacccaggcaaacagggtctggagtggacctctagcaaactccaacagacctgaagctgagggtcctgtctgttagaaggaaaactaacaaacaggaaggagatccacaccaaaaacccatctgtacgtcaccatcatcaaagaccaaaggtaggtaaaaccacaaagatggggaaaaaacagagcagaaaaactggaaactctaaaaatcagagcgcctctcctcctccaaaggaacgcagctcctcaccaacaatggaacaaagctggacggagaatgactttgatgagttgagagaagaaggcttcagacgatcaaactactccgagctaaaggaggaagttcgaccaatggcaaagaagttaaaaactttgaaaaaaaattagacgaatggataactagaataactaatgcagagaagtccttaaaggacctgatagagctgaaaaccaaggcacgagaactacgtgacaaatgcagaaggctcagtagccaatgtgatcaactggaagaaagggtatcagtgatggaagatgaaatgaatgaaatgaagcaagaagagaagtttagagaaaaaagaataaaaagaaacgaacaaagcctccaagaaatatgggactatgtgaaaagaccaaatctacatctcattggtgtatctgaaagtgacggggagaatggaaccaagttggaaaacactctgcaggatattatccaggagaacttcctcaatctagcaaggcaggccaacattcagattcaggaaatacagagaacgccacaaagatacttctcgagaagagcaactccaagacacataattatcagattcaccaaagttgaaatgaaggaaaaaatgttaagggcagccagagagaaagggtgggttacccacaaagggaagcccatcagactaacag

SEQ ID NO: 1371 - DNA, 200 bp, Homo sapiens
  misc_feature (1)..(200): DMR8:101886901
tcaccagaaaagagagcaggatttttttttaattaaaatgggtgcatagctttcttttcagtaacatacacattcatcaagagttaaaaatggaaatggctaccccatgacaaagcttatttttctacttagcaaatacaaatatataaacacacacaaacctacctaggatacagctttgcattttgaatcgtaattta

SEQ ID NO: 1372 - DNA, 200 bp, Homo sapiens
  misc_feature (1)..(200): DMR8:101929501
ggaagggaaggagggaggggggagggagggagggaaaggaaaggggaggggggagggaggaaggaagggaaggagggagggaaggaaggaggcagggagggagggaggaaggaaggaaaggagggagggaaggaaggaggcagggagggagggaggaaggaaggaaaggaaggagggagggagggaaggaggcagggagg

SEQ ID NO: 1373 - DNA, 5200 bp, Homo sapiens
  misc_feature (1)..(5200): DMR8:103074501
gaaaaggattttactgatctgtgaaacccacagtctgaaaacaaactgatttaagggtatctgtccagaaaagtcaacctatgttatcagtcagtgggtaaagaatagacacatcattttatcacgtttgaccacctagtcggcctggcttagcagtgtccaaaagaatttcttatgatgatggacattctatacctgtgctacccaatgtggtgcccctagtcacatgtgactgaagatcacttgaaatgtggctagtgtgactgaggaactgaatttttttatctaatttttttttgagacaaggtctggcattgtcgcccaggctgccttctgggctcaagccatcctcccttctcagcctcccaagtaactgggaccacaggcacatgccaccacatccggctatttttttttcccggtagagactgctcaccatgttgtttaggctgatctcaagttcctgagctcaagcaattggcctgacttggcctcccaaagtgctgggattacaggtgaaagccactgcacctgaccaatcttatttaactaattaaatagctacatgtggctggtggctactgcgctggacatagaggtctagttggtcacacctggctaatgagcctttttgaccttgagtttccaatatatcccatatcctttggctttttttgtttgtttttttatgactggaagagccagccttgcttctgtttactttgattgctagatttaacatccccacaagcctgagaaaaagagaggaaaggattgctcttggaatcattgttggtgtgcctcagattgctacgcaggacagcattctctttgatcacaaaagacaactacatatactttgtgcattgatgtgcacgagagtaaactggttgtcatactgaaagaccagaagctgtttctgatgggaaatattgaatcagcagaattgaaaacacagctgtgtggttctaatgggaatataatttcttctgtcaatcagtgctcacttagtatccattgtgtgcagagcattcactattccagcctctgcagggagacatcagggagatgctcaccacgtgcttttgaatgatattatttgtctttattgactctaagaaatgtaagaggttcataaaacattgaagccattaaggccttatttgagaagtctagcaactcacagttgcccttggaaagaggcaaataggaaggggagagccctctgtcagacttgttttccatcggtgacatgtggcatggattttacctcctaccgttagctggccaccctctgcattcaggcttgtgaagcattctggaggcccccccgccccatcctccactcccggctcttcctttggcatccccactggccatatttctttcctagtctgttctgacagcctcctaactggccacttgtccccagtctctggtcaccttcagctcaccccagttctgggaccagaggactggcaagtcacttctcacaaattccgaattgctgctcacttgccctcgggatagaggctctattcaaactggactttcttcccttttagaattggcttctctatgtgttctctgaaagaagaatatcgtttactgttgttgatttgatgggggccgctttggaggaggaatttagaccatagatggttcctagggatgctccagcagtctcctctcctttcctacctcctccaagcaggccacatgagccaacttcacatctgtgctctctcaggatgtaaaatcgtgggcagactagcatcccagggtctgaatcattccttcctctgtagaagaaggataatgaggataacactacaggactattgtgagaatgaggattaaaccgcaggtccaaattttctagcatggtacatggtgcagaggaggggctcaacatattaactgctgttgttattgtgtactacccttttccatgctgcatgatttgtgtttcttttttgcctactgcctcatatcttatgtgagatgaaattagttcctctttaactgcatctgtttagaaggcagatttcccattaaaaacctgctggcatcacatgaccagcaagttcacaccaacgtgtaaacccaagaaaactgaaaccatatattcacacaaaaacctgtacatgaaagttgataactgcattattcataatagctaaaattggaaacaacccaagtgtgcatcaactgatgaatgaatggatgaacaaaatccggtttatccacacagtggaatattagccataaaaagaaatggaagtactgacccacgccacaacatggatgaacctagaagacatcgtgccaagtgcaagaagccagacacaaaaggtcacagatgacttcatttatgggaaatgtcatgcatagtcaaataaatcggtatagaaagaagattcgtggttgccaggaaccaggatgggaagggatttagtagtggctgctaatgggtacagggtttctttaggggcaatcacgttctggagttaagatagtgctgatgatcacgcaactttatgaatatattaaaaatcaccgaattgtatactttagaaggtgaattttgtggtatatgaattgtttctcaatttaaaaaacctaccgggaattagctcagattttctacaaattctcttaattctttgcttatctgtttatatcgatagaatttttaaaaattaatttgaatttccttttacgaatggtaaggagatttgccctttggggtttcactccgtccagtgctcttgctgtcgattctgtctgtttgccttttttgttgttttcgtttgtccactcagcatctcagttggccttagctgcagccgtctgcagccgcctcctccacttgggggttaggttgcacatctgtcccagagtagctcatctcactggttatcacattagcagtcactcatgtcagcagtccccgaagaaaagatagctggttggctggggataaagcatctgaaactttgctggtctgatgatatctttctgttgtttcagtacatgtgtcactgacaacttgcttaggtaaaagtgcccatagttccttcatttgttcaacaaccatttactgagggcagaatcctcattcacttagtgaatacttagtaattgttgaatacctgggtactagggcaggagcagccaaatgagaaaaaggactctgtccacatggagcctacctgctggtggacgatacacaataaacatagcgaacaaggtaagacttttcgccctctgcacctgtaaggccattgaggactaacctggctgggaatgggtaggaagagctgcttcagaggggtgtctagatataccccagaggatgccagccatgtgaagacctaggggaaggaagtgtctcatagaggttgggtaatagaggatcagcgtggcaatagctgagtgagtgagtgaagggtgtggtatgtgcagcagatgcacctaggtggggtcttcagaacatggtgaagaactcagacttttttcttctagcaaagggaacccattttagggactcatgtgcatgtttcaaggatcactgcagcagtggtcatacttgtgtgtttgtagcccctatttcttacgtcgtgcttggcgcattcatagcaggcactgggttctggttcagaactgaagtggatgaatgcatggagaatgtactaaacccggaagtgtgccagactctgcacccgaaagttctctgcagcttctccaactttaagagtgttctgcaaacacactgaatgctttgcctggatcttcctgtgaagatccaggcagaatttagtaatagaaatttgtaaaatttattcttaaattcttttgcaactgtcttgatttcttcacaaacatagtcatcatctgtttatcaaatgggcattttaaataatatttgacacataactggctgactccacagctccaaattagtcacacggtagtcttttgataatagccaacatgtgacaacagggattttttgcacgaggtggggagcattctggtttccttttcatttttccaatatgtcatatttctcacttccacttttcttagaggggagggttgtctttttgcttcaaactattataggcttttactgagagacaagaggctatgagccccactcagtagaagaagggtttaagtctatcatataaattattgccgctctaacttctctctgtccctgcctcttaagtcatttacggtatttgtttgggtagctatattggatttcttccgtttttccaggggaaatacagcaactttggagagacgtgaacatgggaatatatgaattgattgcttgagaagtgttagtgttagttctggaatgaagtcctgtgtcattaggtgcttacgttgaaaggaaatgtagaattttccatagtcgcagctttccagattttaattggctgcttgccctcgtgtcactttcttttctaaaataaatgttttggatggctcttatctttacaaccaggcacacagcttcatttcctcctaactaggaaagttaactcttcagctacatggtggtacacaatgttgtccctgctcagcagcccttgaacactcattaaatcccacattagagctgcaaggagatagtaacatttattaggtgcctcattttttttttttttctctgagagcggatctcgctctgttgcccaggctatagtgcagtggtaccatcagggctcactacagcctcaacctcccaggcccaagtggtcctcctgcctcagcctcctgagtaggtgggaccacaggcacactcagatattttaaaaaatttttgtagagactatgttgcccgggctgccattgtttatccattgattttttattttatttacttatttttcttttgtcttttttgttgcctagtttcccccctgttctttgcttcttaattttggttggtcaaaatctttcttttaacattttgtttcctcttcaaccttgggaattcttctgtttctattctttcttgccttttccttgcttcatttcaggactcctttccaatgaacctgccattttttcctgcaaagattgtagtttaaaagaaagcccactggcctgaaactttatgtagctaagcagctatttcaaattctttctgaggttgagggcaataaatgataaaatcacg

SEQ ID NO: 1374 - DNA, 400 bp, Homo sapiens
  misc_feature (1)..(400): DMR8:105705301
agactgttttatacttcaaaagaaactaaaaactacaataaataccaatatataacgtgtcattcatattttcattacaggaccttatttctgttggggtttgaccagaaacaataaatccatcattttttcttatcccaaattctcattctacctatcagggaagggtctatgtaaagatgaccaaataatttactgtacaaattgggacaaataagtagtacttctcattccttcctatttgaaaggtagatatgacatatggcaaatgaagataaaaatatcagctttaatggatcaaagtgattaaagataatagtgaacatgtgtgaccaagtgagctacctcaaaatgcatcaaagactttgctaggtttactcccagagccacacagactgca

SEQ ID NO: 1375 - DNA, 1900 bp, Homo sapiens
  misc_feature (1)..(1900): DMR8:107855801
gttgaaagaagctcagaggactttatttgtgaattctctagattctcctaaaataaccaaggagtctttgaagtgagctaaaagtcctttaatagtaagtaaaaacagaagcagaaaaatataacgtaacactaaatcagtatgaacttcctccatgatgttcaaggtaaaagaatggcagccatagaactccttacctccccacagctccgtcatcccatagaaccgcagatgaagaagctggaggatggggtgaccaaaggagaacagcaggttcttggcttgactcaaatctttcctgcccaacttagcttaggtcaagaactggtgaccagcaggctatagcatgaagtctgcccctcagcatcctgtctttacatcctcttctttcaactcactgtctacctcctggctccccagtcacagaatacacctatgtgaattgtcaaccccactaatgtgtgatatttgcaataatttatttatgctgatgttttaatttttccaaatctagctcagacctgcacaactcataggaaatccaattgctgtccattttttgtgaccccgcctcttcctatggctgtccaagggtgctgggtagttcttggtaaaaagaagtctctacacctgtgaattttattctaccatttctgattgaacaaatccttatggttcacttgaaaacactttcttacggtaaacctggcctctggaaatttcaactaggctcccaaagccatggtgcttaatgctatagtcaataccagtccctgaatattaatatgatctgctcatatgagttctgtcacctgcagggtcccacgtgctactcctctggccttcaagtgtcaagcaatttactttccactcaaatgaaacttccttttctggtgaaccctcaagactaccccatctaccatctacaaaaatctagctctaggttttataataatagcaacagtttacatttagtgaatacctattatattttcagtactatgataaaaactaaaattcacaatactgaaaaaagcattaaataacttactatctcaaaagagttggaaaaatatgtgaactataacgtatggtgctaagttctgtgatagtaaaaataacaaaataacaataatgtccatttattgataatttactgtatcccatgcactgtgccaaatatatgtatctatttgatccgggtgcatctgaaagtggggaagtcttactgagtcttctctccaaatgaatgtgtgtcctgtgtgtattttgcagcgtgtattttgcatatatgcagtacacagtatatatccttttttatttattcctcataataaaccattttaagtacattttgaggtatatgaggcccagaggttgaataacttgtacaatgtccctagataataagtgacagggctgagatttgaatccagacgaaagctgacaaagcctgctttatcttatctctttccccacccactatgggtgcataatgaggaatatctcattgatatagatcttcctagtgggaatgatggaaagtatatttaagagaagaccacaggaatgttttggaattaccaaagcaaaatgacaaagagagagggagagagagagagagagagagagagagtgtgtgtgtgtgtgtgtgtgtgtgtgagagagagagtgtgtgtgtgtgtgtgtgtgtgtgtgttggcaatggctagaggaaagagagaagatataaacaagaggggagacaaagggttcctaacagagaggctggcaagttgcaaaagcttagaaacaacaaaagcacattgctaaatattagttttgtctgctggtactttgaagatgcaaaagatggggaagttaaaaaggtaaggagtttaaactttgttctgaggattat

SEQ ID NO: 1376 - DNA, 900 bp, Homo sapiens
  misc_feature (1)..(900): DMR8:109431301
agaaaactacaaaaatacatatatttttcactgaaaattaacagctgttaacattgtgtcatatttacttccaatcattaatttaagaaagaaatattataggaacagctaaatttctctttaagcaccatccctagacctagtcccctacataactctcgagggacaatcacagtaattaattattgtgtgtgtattcttccatgacattttaaataccttttgtatataacacacacacacacacggtaattttgccagttttgtaagcttacaaatgaaatattacaatgtaaatgttattttgcatattacttttgtcattcagaattcattttgagatatatttatgtggttttatgtacacctaatcaatcaccttaaagtatttcatgagtacaccaacttactagttcctctattggtggacatttagattgtttacaagttttcacttttaccaataagactatattgaactttcttgtacaaacctcctattgcatacgtgttagagcttctttagagtatatacccagacgtgctattactggataacaattggttgtatgagtattcggtttactagatgaccaaattgctctcccaagtggctatactaccagcaaatgtaatagcaacatatcccctacatccttgccaatattggaagtgatcggcttcctaattttaactattccgatgggtgaaagttaacactttttagaaatttttctattcccttattagtaatgtacatgatcatccttcatatgtttcttggacattcagattatttcttctgcaaagtgttagcatcctttttcccttttttattgaattgtctttttaaaatttacttgtaaccatttactatattttatgtttaccaatcctttg

SEQ ID NO: 1377 - DNA, 100 bp, Homo sapiens
  misc_feature (1)..(100): DMR8:109804801
tgagagtcatcagactatactgcaggttttaccccaagggaggaaagagggagagaagagaggttggataaaagtaacttaaattgcagttcagttgtaa

SEQ ID NO: 1378 - DNA, 1900 bp, Homo sapiens
  misc_feature (1)..(1900): DMR8:110355401
cacagtcacctatgtataaatcaccaatatctcttgcctgtaccactgttgtaccttgcggagtggcattcttgcttctactcttgatttttccaatgtgtttttcacacagctgagtaaacgtgtaaatggaaggcagggcctctaattaacagcatgcatgagcaggccctgctgaccttaccatcctcattcctaaccccttcctccacatacctgccccactccaccactgttccacccagtgttcactaaggtagggtccactgaggtgctttagttccttagataattcaaatttttgtttttctttaagacctatacacctactgtgtcttttacctggaatattgtcttttcagcttttgtggccatagtccacaataaaaaataaactgcataccatcatgcagcatgtgtgggtgcatatatgtgcgtgtgtaaaaactgaaactagagttaacaaaacagtgcttattcttatccttaccatatgtgacacctctgaatatttttttaaatttttaatgggtagtaatgactcacttaattgattttataagccactattgtattgaaacctagagtaaaattacatgttaatttttacttataatatcactaaggcattgacgttccttaggtttcaaattaaagattataatctattcatgaccattgcacctgaccgcccaatctaaaatgagtccttctattgctagtccacactgaatcataacataaacatttactgttttacctgttactgtgttccaacagactgtacaatctttgcagaaagggcttgcaacttctggtttactgttttgtatccagtgtcatgtatatagcctgacacatcgtataggtcatcgataacctctaacagctcctctcagtgtatagtggttacaaaaagtcactcctgctatcagtttttggaaatcagttgtgagtagaattttagttgtgcaggtaagcagaaaaaaaataaatccacattaaaaaactaaaggcaacaattaagactcaaaatatttttatttggataaaattattgtattagtttcctgtggaaactgtaacagactaccacaaactgggtggtttaagataacaggaatttattctcttttctggaagctagagtgtgaaatctgtatcactgagccaagatcatggtgtcaaagggtcatactccatctgcaacttctagagaaaaattcatccctagtttcttctagcttctagtggctactggcattctgtgacttgtggctacatctctaaaatctttaccttcgcctttatccttatgttagcttatctgtttatatcaaatctccctctgctgccgtcttgtaagctacattgtgaatgcattttgggcttgcctggataattcaaagttggggaaacagagtaaagacaagaatcccagagcaacaagacaagcctcaatatttaataactctattgaatcataaacataagcaagtgagtaggatttagtgataagggacttaaaagaacaatttgaagttctagtatatatcatggagggggaatgaaatcaaacagatcccaatagtaatgatgcagagagcatttctccagctactctggttatcatcagggtgttttcagatattgctcatagtttatgggcctgggccttcaacacacagaaggtttaatcttgctcaacagaataaattttaatatttctaaaatctgtacataaaaaacaagaataagcagtttaaatatttcttttatataggtaatttgccacagtatatgctacctgtaaagcagcatcataattttagtgcctagattggctaaaaccaatatagcagtatctgctgtccttacagaactttctctaggtttcttt

SEQ ID NO: 1379 - DNA, 1600 bp, Homo sapiens
  misc_feature (1)..(1600): DMR8:111170401
tgggggatggaagctggaaatgccttgagaagattattaggcttgcagagaatattatttgagctggaaagaaagagacacaagttatataaaagccatataattaataaaataatcaataaagggattatgaaaaattgaaaggttaccccaacttgttgatctgtctaaagatattaccagaaaaaaatttgagagtgtgaacttttttaaatataaatattaaatttgtatatcggttgatgataaagtacgagagtagccagaagggctaaaaagtaagtgctcaatttttcaagataatttagagaaaatacaaaaatgcaatacttttctgtcttcaaaaataaaactttgtctattcttagtctctgtggaagacaaaaacagctttcaaagtaggaaatagcctcagagcaaaggacacgtcttggccatcgccagtataaactgatctctgcgtaaatttcagatcaaggatcagctgtacatgcctttgttaaggctcaaaaaactttgtcacctttagaaattttcagctagaaaaaagaccgctaggtcaactaatagaatttctgaaagttttaagaaaaattttacctcagtagccttggatgggaggtctaaggtacagcagctcttacttctgaagggaatgtgagtgctgttttttgtttgtatgtgttttctcatctaatgagttttattataacatgataaatttaaaaacctataaagcttattgaaggaattataacatcttgtactaaaaaaaggtggcagtttataatgaaaagagatcactaggaacctcaaaattttataagcaggatgcaggccagaagagctgctgtgctaaaagcatgagccatttcttatagaaaagtgaggttaagtcagagggcaaatgaaaattcctgaggatggagccaacatctatggggagccacttcattgaaacttaatcaaggaaccacatgcaggtacccagttggatattttaaaaactgttgttttatcaggtcatttatgttcttctctaaactggaacgtatctcaaaataataagagctatttacgacaaacccacagccaatatcatactgaatggacaaaaactggaggcattccctttgaaaaccagcacaagacaaggatgccctctttcaccactcttattcaacatagtattggaagttctggccagggcaatcaggcaagagaaagaaataaagcgtattcaaataggaagagaggaagtcaaattgtctctgtttgcagatgacatgattgtatatttagaaaaccccatcatctcagcccaaaatctccttaagctgataagcaacttcagcaaagtctcgagatacaaaatcaatgtgcaaaaatcacaagcattcctatacaccaataacagacaatcagagagcgaaatcatgcgtgaactcccattcacaattgctacaaagagaacaaaatacctaggaatacaacttacaaggcatgtgaagggtctgttcaaggagaactccaaacctctgctcaaggagataagagaggacacaaacaaatggaaaaatatttcatgctcactgatagg

SEQ ID NO: 1380 - DNA, 400 bp, Homo sapiens
  misc_feature (1)..(400): DMR8:113738801
cccttcataatcactaaattttagccaactgtaactatatgctagttcccaaattcatcacttacacttttgtatctttttttcaaaacgtttctactgcaatgcattcccctgcatgcactctccttcacttcttatatccagtttctgtccattctaaaatgatatgagttaaaacccctgtccctagaatgtctttgcttaaaattttaaaataaatccttggagtaattttatcttgatcatgtaaattaaattcttttggggttagtaaaaaggtctctgtaacttagtataagatacgtattattttacaactcctccaagcttgcctgtattctgtttataagcttcgcttagactactctcctactgatcgtgatcctgggacactggtatg

SEQ ID NO: 1381 - DNA, 800 bp, Homo sapiens
  misc_feature (1)..(800): DMR8:114901001
aacgggatcagtagtgtgcacttacaggatatacttttatttgtgaaagaatttgtatccagccttatacctggataaccttatactttctttcttttttttttttttttttttttgagtcagagtctcactgttgtcaaccaggctagagtgcagtggcatgatctcagctcactgcaacctctacctcctggattcaagtggttctccttcctcagcctcccaagtagctgcgattacaggcacctgcctccttgcccagataatttttgtatttttagtagagatgaggtttcaccatgttggccttgctggtctcaaactcctgacatcaggtgatccacccgcctcagcctcccaaagtgctgggattatgagcatgagccaccacacccggccaaacttatactttaatagataaaagataaaggcccaacataggtaagaaaccttaatagtacatatgttgccttatcatcattcagaaacaaaacatgggttcactcctcttaagccacatcatgggttaaagagatcattgccaggaggccttcactcttctagaagggtatcattttttaggtcctcttctgtggtttaaagtaaaagagacaatgattagaaatgtattctccagataggctctatagcaaattctaccgtaaagggctacagttacacaacagacttcaaattctcttgtgaaagttatgacagaataggctgaacaaagaagtatctgtgcagatgctggcacttgtgacctatagagaaatacatcaaatgaagattacagaaat

SEQ ID NO: 1382 - DNA, 1200 bp, Homo sapiens
  misc_feature (1)..(1200): DMR8:115229501
gacttcatgactaaaacaccaaaagcaatggcaacaaagccaaaatttacaaagaggatctaattaaactaaagagcttctacacagcaaaagaaactatcgtcagagtgaacaggaaacctacagaataggagaaaatttttgcagtctatccatctgacaaagggctaatatcccgaatctacaaagaatttaaacaaatttacaaaaaaaaaaaaaccatcaaaaagtgggtgaaggatataaacagatccttctcaaaaaaagacaattatgtgaccaacaaacatgaaaaaaagctcaccatcactggtcattagagaaatgcaaatcaaaaccacaatgagataccatctcagaccagttagaatggtgatcattaaaaagccaggaaacaacagatgctggagaggatgtgatgaaataggactgcttttacactgttgatgggagtataagttagttcaaccattgtggaagacggtgtggcaattcctcaaatatctagaaccagaaataccatttgacctcgcagtctcattactgggtatatacccaaatgattataaatcattcaactatgaagacacatgcacacatatgtttatcgcagcccttttcacaatagcaaagacttggaaccaacccaaatgcccatcaatgataaactggataaagaaaacgtgtcacatatacaccatagaataccatgcagccataaaaaaggatgagttcatatcctttgcaaggacatggatgaaactggaaaccatcattctcaggaaactaacacgagaacagaaaaacaaacactgcatattctcactcataagtcggagttgaacaatgagaacacatggacacaaggagaggaatatcacacaccagggtctgtcaggtggtgggggctaggggagggatagcactaggagaaatacgtaatgtagatggcgggttgatgagtgcagcaaaccaccacggcacatgtatacctatgtaacaaacctgcatgttctgtacatgtatcccagaacttaaagtataataaaataaataaataaatcactctgatagacttgtttttatgactaataaagaaataacatagataagagagagtaaggaatgctaagcatgaatgattcaagaaaattctataagaaaagtgattgaacaaagtgttagtatttgtttaaaagt

SEQ ID NO: 1383 - DNA, 200 bp, Homo sapiens
  misc_feature (1)..(200): DMR8:115808201
aactagactttcatctctaaaattggaggtaaaataaacttatctcagggaaatttggaagacattatcaaatattagagaacccatcctcacatacatttgaaggggaaaaaaggatttaaggaacaaatgcgactttctaaatcacccgtccatgtgaacaaggtagaaaaatacatgaaatcaaacttccctacatt

SEQ ID NO: 1384 - DNA, 1500 bp, Homo sapiens
  misc_feature (1)..(1500): DMR8:115874401
tagcaccctgtcttcagtcacaggaggcagaaaaatctgaccatgccaagtccttacttaaaatccttcagaaggtccacagctttgaggataaattccaaccaccggagtacgtaaggaatagatgggagcctcttctactgtataggatcaactcttgcttttccctcaggatggaccccatattccaatgctggtaaaccacttgaggtttccagaccttttctcttgggcaggcttagaacacccttcccctcaaaatttcatctctggacatttacctgtgttgttacaccttgcagaaaacattctctggatatcctcttcaagcctcactggattcagtgcttttgcagaaaccctctcatattctttcttctaataaatttctttcccatccactagaatatgagtttgtgggattgtgttcttgtatttttagcatacagcacagtttgaggcagctagcagatactggtgaactaatgaggtggaaggaactcaattttatttcaagtacaaatagtttaatgaaggtttcaggactatctgaagtcagatacagtctgtacgttagcactgttttccaaacaccactgtagctgtccagtttctccacccagctccccttgaatatacattatttaaaaaaatcttttattctttacttcaagttattccgctacacaaaaaccaccaagaagacacttgaagtcgagatactccagaaatttcacattcttggcaaatgctttgcgattcagtttttcctgaaaggaaccctcttctacgaatctgattgaaaaacatggccttattctcctttttgctagaagccatttgatggatgcagtgcagctttacaagtgaattccaagtgattggtgaaaataaaatataatgccactggaatggtataaatcagacttttaccaagaacataaatttctgttcatataattctctcatttcaacatgcaaattaaaaaataaaagttggaaatggaaatgttggtgtggccccacccctctgttttgcttgcaaactcctgagatgcagctagaaacagaatattccgtactaatttgtcgtctgtgtgacaaagagatgaaggtgacagcttctttgatgacggcttgataaagcaattttattgttcttaacagtgactcaaggaaaacacagtccccacttaacatttgacacagagccacgtgtcttcatagaacatatatgtgtactctgtatatatagtttatatatcctaaataaactcactactttgtttctgaagagaatcagcttagcattcatgtactgtatatataaaatatgcacacacatatatactatctacacatgtatgtgtttgcagtgactaaaacagtatgcatgaatgtgtatgttaggatgagtttccatgactataacccagacctgctgccaagattattcataaagattacaacatgctgtcagggcaaattcaatattccata

SEQ ID NO: 1385 - DNA, 1400 bp, Homo sapiens
  misc_feature (1)..(1400): DMR8:116487201
cctctaactgcttgtctgattgcataaatatgttagtacaattccatttaatagctattgctttaaaattttctaatcctcagctttgtttataaattcttaacttcccaagaatgcagaagtattaagttaatttcttcccaagaatgcaaaagtatcaagttaatttcttcaattacaatatcaacaataacaacactgctttcttagaattgaaatccaaatttctctttccatgatgttgctttaaggaatgataggacatatttgaaagttctgaatgcaattagatgaacaagaatgaatcaggatttctgacaaggcagtgtgacctgcgatgcaaagccttgttgtcacctcccttgcttcacactaccactctggtttttcttgcttgggtctgccccaattctaccaacaattcctgagattctgaaccaatgtggcttcagctgccagcagagctgatgtttttgaccttctgctcatcttcaaccaatgaatattggttaaataaatcctctttcctatagtttgatcaatagtatagtggaacatttcaaaaaagggatcttaggaaatcaagaataaagaacacaaaaaatatagaccatcaaaaaatatttacagaagacacaagtgttaccttaaagtttaagtctatcatagatagatactgctggtgtgcaatatgtattttacctattttatcctccaccttgtctaccaagaagtctgagtgcagaaaaacatagggtactggagtcctatacaccatcccagccaagctagctgtggctgaggtttggttaaatcaggtgaagaaattgcatggttttatattttttgtcctttttatttagtttccaagctaatattactttgaaaatatatgtaactttacctttgttaaaataaaggagaaaggggcccttgcaggaaccctctagaaccatgctctctaaaatggatccatttacctcagggggtgacgtagaaagaaaacattaggacttttatgttttgtcttaccctttaaaaaaaaagtttttgcttttacttacattttaaaatatatatgatatgcaatatggtagaataggtacgtaatgtctaaaaaaatacctatatattggggtgcctgatcaaaaattgctcactgaggagaacatgataaatagagtttggataccactgccccaaatgattaacactgtggtggcagtttccatggaaggttgagatctgggaaaaagctggtggagatagaccagaaggtgcacacggaggcagggaggagtcaaaaggcctaatatactgatcactccttgtctaatgttttccttataaccacaattcgcgccttcttttaagtgcacaggctttgtaatcagacagac

SEQ ID NO: 1386 - DNA, 200 bp, Homo sapiens
  misc_feature (1)..(200): DMR8:119880201
atatcactattctctttctagcaatggtagcaattataataataacaataacacttacatggcacctattacctggtaaggactcttctaagcactttatgtatggtaatgcctttaatctttatagcaactctatgtagcagatacctttattacttttattttgtagattaaaaaattgaggaaaagatcatttaaac

SEQ ID NO: 1387 - DNA, 1200 bp, Homo sapiens
  misc_feature (1)..(1200): DMR8:120926601
gctgtcctgacaagagggatttttgttggaaaaggcagagagttactggcaggaggaaaacaacaacaaaaagaaaggacaaagggactaggaggccgaaagtatgttattggagatcttgagagcatggaggtggttaggaaaaagatttgattttgtgagtagctgccatatgtgacatatatagacagggagaatgataacggaaagaggctttaagaagtttggctttgcattataaatgtaatctactcctggctcctttttagggaactacagtaaagacataaattacattcaattattgtgtctgcaggatctttttttttttttttttgcatgtaatactaaagacagttggggcctctgaatggctttataaaggttaactttgaataaagcatttgaaccattctgccatttttgtgccttaaaactccctgtttctccaggcatcctatgagatatatcttcagtattgagaagaaatagctgaaaatccaagggcttgaagttagacagatctgggtttgacttctaactgctcacttgctagctgtttctcatagcgcaatatcacctcatagggcagtattacctcagcttccttatctataatatggagttaagagtatctactctgtaggactgttgtaatcatcaaaacaaaacatctagcaaatatcataaaacaactggggcttcatcagtccgagtcctgccagaaaacatggcccattcaaattaggaaaacttgaggaaaatgtagagcagggcaatgtgtaggcagggcagaggaaaactacaagatatagtacaatattctggggtcaccaactttaggcctgaagatgtgagcagaagaagtgtttcctgggatccagggagaacctaagaaggctgtgtagggagaactatcaggcaggtgctgagaccttttgtggagaaatgtgcccagcccttggcaatcactggggaattgggaaatgaattgtgtagctttcttccctctcttttcgtccctctagtttcctccagggtcttctattggttaaacctaacttgaagccatttggtaaggaagtccattaaggtcacaggagtcagctgtgaaacagattaaataaggattgagagtggatctggggcaaactaaacagactcatcgtgctcagtaagtatcaattcccttatttttct

SEQ ID NO: 1388 - DNA, 1200 bp, Homo sapiens
  misc_feature (1)..(1200): DMR8:123557601
tagctgggtatggtggtgcacgcctgtaatcccagctggctgggaggctgaggtggaaggatcactacagcctgggaggtggagtttgcagtgagctgaaattgtgccactgcactccagcctgggcgagagagtgagactctgtctcaagaaaaaaaaaatgaaaattaaagagaagcccaatttcactggacaaatgttgaggaggaagacattccagggagagggcaaagccatgtaagagtgagagtatctgcggtgttttggaaaaggtggtgaactcagtttggctggggcagaggctgcgtggaaggagatacggagaatgagtggaagacaagttcgggcctgctgtgaagatcttcctcggccatatgaagtcttcagctagaataaaagcagagagccctatgtgagtgaggtaagcatctcccatggtgttcaaccctagaacactggaggcatgttgaaaccagtgtgtgcctatccctgtgggaggggcactccactttcttgtgctttaaacagttgaaaaggctgaagctgaattagaagtccctaagcaaggggaaaccaatgggtccagagtattgtcttgaagtacaaagtctccaaatattggtacaggaccatcgtgtttaaatagcatcccttcctggccggattccttctagagaaagcacatggattgtatgtgaccaaatcagtttccttttacaacatatcaaaaatataagatacaagaatcagcttctggcattggtggacattagggatcaatgtcaagtgctgctttatttttcttatctattttccaggaccaaaggcaaggaagaagggccaaaaagagaagaacaatatataaaatcacatttattgagcacatagagtataccacgttcagtgttaggtgctactgattcacagatgaataaaatgagatctgtggtctgaaagatcagaccagtctagtgtaggagatatgtctactggtagagtgtctgctgtgggtcacgcaacgtgctggattccatatatgtcatcccataatgaccttgagacataagtatagttatcttcattctcaattgtaagactaaggttcccagaaggtgaataatttgctttagatcacctagctgggatatcaaattggggtcctcgtaggaaatagatggcactcgcaaatggcggggattg

SEQ ID NO: 1389 - DNA, 500 bp, Homo sapiens
  misc_feature (1)..(500): DMR8:126066401
taaaatctagctggataaatatacgagggaaaactcatctttagacatttgtagtctggtaggatacaatacaggttctgcttgggttcacaccctgcttactggttcaacaagttactaggtctgtaactttggggaattacttaacatctctgtgcctcagtttcttcatacatgttacggggataataatagtgtcattcctacatggttgtatttgtattaaacgagttaatatagatgaaaggcttacaacaaagcctagcatacagatattgcttaacatgtgttttctattcttactataatctatgtatatctacataaatctatataaaacttaagggccttaaaatgaaaagtgctccatttggtgctcaagatagtgagtcctctgtcttctgattaatccaaatgttatcatgtagaaagttctaatttcaggcggcatggcaaggccagcctactgacggtcaaaccctgcccacaccccgggcatt

SEQ ID NO: 1390 - DNA, 300 bp, Homo sapiens
  misc_feature (1)..(300): DMR8:126213701
atgatttctttgtttgcttttaagtgagaggagtaaaagtcaagatcatattgagtattatgcctgtgtttttggcttgttcaatcagatgggtggtgatactattgtctaaaacagatcaatggggaggaattagatttgaataaaaatgtggaggagggtagtaaaggaagacgatatgtttccctttgggcactgtatgcaaaatatcttggagtcccccaggttttgggcactgaaatgaattcggactgtaagaagtctcttagggggacataaagagaagagaggcaagactat

SEQ ID NO: 1391 - DNA, 2500 bp, Homo sapiens
  misc_feature (1)..(2500): DMR8:127018401
ctctgggggtggaacccagaaatttgtattttaataagccttccaggtcaccctaatgcatgctcaagtttgagaacaactgcccttcaccaattttacttcaggtgtcccctcctacaccaaggaaaaggcagccttgaaacttggcattagactgtcaaattttcttaaacaggtgtcctcccatgtgagccttaggttagcaaatgctctaactaaattcagtaccctaggcgaggatcctgatataggtcagggatgttgatttagctaacttgtttctccaaaaaatgcttttgaagtgtctgagttaaataaacatttgcaataaacccaaactttattacttggcctctttcatcatgtccttatcaaaatcctctcttggagcctattcaaaggagattctgaagacaaggcaggcttataactcctgcttcccaggtcataggattcatgtgctatgagaatcatactgctgctgcatgctttcatcactctgccccatccctgaatttagagtaaacatttcttcttaataaaaatgaatatgagaaaattttaatgtccacaactgtcctgcaaggtataagtttttttatagatcaggaaatccaggcagtgattggttactagagtagatgctgttaatttcacactccatgtcccgaagctcgctgctgagttcacctgaagcttacagctttttacttcaagtgcttctcaacccatcagaccagaagctggaaactgccaagggtagctctcacacagtgagagaaaagagacaggggataaatatcctagctggcctctcccttggcaggaaaagtctgaggtttacacggtgactcaaatggtccccagaaggattgaacccctacagtggcaatggctcattcggaccctctttattgctttctctcccttctgtcttactttcctcagttccttccttatttgagaacaaattcgaaataaattcctgtgctcaagtttttgtttcaggatctacttcaggaacccaaagcaaagtagttggatgacttgatcaaggtcatacatatattacatgagtgcaaaagtaattgcagtgtttgcatggtgggactttgccatttgatattggaatacgttcttatataaatgtggttatgttatacatcattttaatggacacttctcaatttatatttttttgataaggacttattgcttattgtttattttatgtttattttagaccatggaaataatatcagacaaaaagcagattagagcaattttctttttcgagttcaaaatgggttataaagcagcggagacaaaccgcaacatcaccaacgcctttggcccaggaactgctaatgaaggtacagtgcagtcactgttcaggaagttttgcaaaggagactagagccttgaagatgaggagcatagtgaccagccattggaagtcgacaaagaccaattgagaggaatcattgaagctgatcatcttacaactacacgagaagttgtcaaagaacgcaatgttgaccattgtgtggtcttttcgcatttgaagcaaattggaaaggtgaaaaacttgataagtgggtgccttgtgagctcagcaaaaatccaaaaaaataatcatttttaagtgttgtcttctcttattctacgcaacaacaataaccattttgcaatcggattgtgatgtgcaatgaaaagtggatttggggccgggcgcggtggctcacgcctgtaatctcagcactttggaaggccaaggcgggcagatcacgaggtcaggagatcaagaccgtcctggctaacacggtgaaaccccgtctctactgaaaatacaaaaaattagccgggtgtggtggctggcgcctgtagtcccagctacaggctgaggcaggagaatggcatgaacctgggaggcggagcttgcagtgagccgagaccgtgccactgcactccagcctgggcgacagagcgatactccgtcaaaaaaaaaaaaaaaaaaaaaaaaagacaagtggattttatatatggcaaccagcaatgaccagctcagtggctggactgagaagaagctccaaagcacttcccaaagccaaacttgcaccaaaaaaaaggtcagggtcactgtttggtggtctgctgctggtctgatccaccgctgctctctgaatcctggcaaaaccattacatctgagaagtatgctcaacaaatcaatgagctacgccaaaaactgcagcatctgcagctggcattggtcaacataacgggtccaattcttctccacgacaacgctcaactgcaccttgcgcaagcagcgcttcaaaagttgaacaaattgggctacatagtttttcctcatccgccatattcacctgacgtcttgccaactaactaccacttcttcaagtatctcaacaactttttgcagggaaaacacttccacaaccagcaggatgcagaacacgctttccaagagtttgtcga

SEQ ID NO: 1392 - DNA, 1000 bp, Homo sapiens
  misc_feature (1)..(1000): DMR8:127283601
aatgtggatggaggccagctggactcaactaccacaaaagcagaccaaagagttgcaaatgggccaggaggaaggctagaagatgggtatttgagaatgcgggttgtggtgcactctcacagtgctcttcaaagcactgggctcttcccagttcaacgcgtgccaaatacccaaaggagcaagcaacatgcttctgattcccagtagaaagccatggcttagaagacccgtgaaggggaaaattgcctcaacaatgactaagtttctcattcatggcaggtgctttatacgttgatcccatttggtccccacagcacctgtgtcaagtttcaatcatcccaatgatgcaggtgcattgtaacccttcaaccaattttcgttatgattattgttattgtcatcattattattggaaacggagagaaagagactcatggcagttaactcatttgcccaaatttatacagctggttagcaacaaagctaggactcaaactagtggcctatcctttgcatcaaagcctacagcctaaatgactcattaaacaccttccctgaaccaatggccatattaggtgcataaacagagataaaatggtttgctctaaaaaacttagtctagtgaaatgttttgcaaactgtgggacatagcctttgtagttcattaagctactttgaagtcatcacaaatgcatttttaataatttgttgaaaaatttaagtatagaatgcatattacataatactagtatttgatgacacttttgttttaatcatatgtaaatatacatatgtgtatgtatgtaccatatcataatatacaaaatatatcttttttttttttttttttttgagacagggtctgctctgtcacccaggctctgttgcccagggagagtgcagtgatggctgcactgtagcctcaatctaaaaaatagctcataaaaatcgtggtgagaaacttttggaagctattagtttagtaattttgccagcgaaa

SEQ ID NO: 1393 - DNA, 1700 bp, Homo sapiens
  misc_feature (1)..(1700): DMR8:128373201
tgtgctcgtgctgctggagatgcaggtgctggtggcgctgatgctgctggtgctgttggtactggtgctggcactgcctgtggttcttgttttgctagtgctggtgctgttgccactggtgctggtgctcctactgctgctcgtgctattagtgttggtgctggtgctgctggtacagattatggtgctggtgctgctggtggtactggtgctggtgtttgcactggtgctgcttgtggtactgatgctggtgctggtgctgctgctgctggtgtaggttctgctgctggtgctgccagtactgttgctgctggtggtgctggtgccagtggtgctggtgctggtgcaggtgctgctggtcctgtttgtggtactggtcctggtgttgctggtgcaggtgctgctgctgctgctgctgctattagtgctgctagtgatgcaggtgctggtggtgctgatgctgctggtagtgcaggtaccggtgctaatgctcctggtgcagttgctggtgctgctggtgctggtgttgcttgtgctactggtgctggtgaatgtgctagtgctggtgcaggcgctggtgctgctagtgcagttgctggtgctggtgctggttcaggcactggtgctgcttgtgcaggtgctaatgctgctggtgctggcgctggtgctacctgtgttagtactggtggtgctggtgcagtcactggtactgctggtgctgctgcatgtgctggcactgatggagtgtatatcataagtctgatgctctgctcagagtttggatttaccctgaattctcattacagcatcctttccctctcctgctttccttcctgtgctttgatacattaacaaactattccctaatatttcagggtacctggacttaatctaaggctcacaatgccttttctcatgtttccacaaaaccacagatgcaaatgacacattcatagaaaggcatctttcccttcctctctgtaagcagaacccgaagctcacagagatgcatctgttcttatgctataaacagtggcatgtcaccatccccctgttattagtgtaactgctgtgcatgccgagtagatgcctttatcttaggagctgtatgtgaaatggcccagaaacatcatattaagactcaaaagatgcaatttaaatttcctctggctgtagagatgccaccaacacagtgattacatgtgtcaagcaagtgcaatgcaggagggttccctgtaattgtggatcccaggccatggacttcagatggaggtgaagacctggtgaaaggggcatgcattgctgggctgtgcttgggtatagcaggtactcggcgcatacgtgggagttattaatttcagagatagaaggggctaagggagcagtgagtggagggattgttgctgttaatgagaaagattaggctcagaaagccattattggcgtaaggtcatgatcacacatcgaggcagagtcaggactagaactcagaacgtctaaatgcaaatccaaacccactcatttgttcacaaaatatattttgaatgcctactaagttgtaggttctatgcaaagtaatccacatacatggggaataagaaaagtatttttctctaagagtttactgtctggctacatcttagaggcatcctggtacttcaacagacaccaaagcctggccctggttccagagtttctga

SEQ ID NO: 1394 - DNA, 800 bp, Homo sapiens
  misc_feature (1)..(800): DMR8:128869601
aaagctttagggatactcagaagagaaagggggatgtattgctggggaattaaggaaggtttttcaaaggaaatgcaggttgaatttggtattgatgaaggagaaggagttcactgaatatccaaaagggaagcgagtcaggggttggcatttcagacagtgttccggggatgattacagataagatggcttttttgagatggtgaaaagttcaggaggtggttgaaggctacggggataggatgagaatttcttgctatgtaggagtgagagaaggacaccgtgcgatgacagacaaagtaagttttgaaccatacactaaagggtttgagttgaatggagaatttacgttagaaagtaaattgaaagggattttcaaaggaaggatggaatcattccactgggttcggatgaggggagttcagactggtttcctggttgtaagaaaaggaattcattctacgctgtaaaatgttattccaatgataaattctctcactagcatatccactttgaaaaacaacgttatgaacttccctgccctgtaattcaggaaccatagagatttagatcatgcatctttgaagtgttccctacagtgtaatactggccacccagcctgcagcatctgctccgtctgtgtccagtttccttctcttgcaccacgaccgatgcagctcttcttttttggtgtacctcaaattcagaagcacaccacttctgcctccttttcaggctggctttctccattcttctcattcttgctccttcccctctttccttctttctttgtactcatt

SEQ ID NO: 1395 - DNA, 1300 bp, Homo sapiens
  misc_feature (1)..(1300): DMR8:129064401
cctgtaatcccagcactttgggaggccgaggcaagtggatcacgaggttgggagatcgagaccatcctggctaacatggtgaaaccccgtctctactaaaaataccaaaaattagccgggcatggtgtcgggcacctgtagtcccagcgactcgggaggctgaggcaggagaatggtgtgaacccgggagggggaacttgcagtgagccgagatcgcgccactgcactccagcctgggcgacagagccagactccgtctcaaaaaaaaaaaaaaaaaaaaaaggaacagagagtagaatggtgttaccaggggttgagggttgtggtaggaagagtgaggagatgttgattaaaggacacaaaatttcaattagatagcagaaataagttcaagagatctattgtacaataagatgactatagctgataataatgcattgcataattgaaaatttttaagagagtataagtgctctcagcacacaccaaaaaataataagtatgtggggtaatgcatatgttaattagcttgatttactcattccacaatatatacatatttcaaaactgcatgttgtacatcataactatgtacaatttgtgtcaaaatatttaaaaaacaaaagctatgacatcctaatcattggatgcactgacttgggaattatattattatcttcattgattttagactattttattagattagttagtgtccaagataactctcaactttgcatccaaacataagattctagtatccagagtaattgggagattggtgcaggttttctgatcaaaattaagccttgaaaatgaaggttttgggattagcattgtgggtatatctaccaggtttcaaataatagcaatagcaaataatgtttagagagctcttaccatttgctggagcacttattgggtgcacattacaaatctgaattaatgaattcaaataacaaagtatggagaacttattatatgtgccccactgtaatgggatccagaaacttaaccaggaataaaatacctgtcatcaaggaaagaccaacaccatcttaaagtagaagctcacaatgaaatgctaaaccatgctttcccagtagaatccagttcagagccttaccagagtgtactctccatctacatcaccctccctctcttaatatcctagaaatcttcagaaaaatgttcaaacccttcaccccttcctcaattttccaaggcagaaactccctctcctttctggctttatttttttggttgttgttccttttagctagttcttttggagtcactc

SEQ ID NO: 1396 - DNA, 2000 bp, Homo sapiens
  misc_feature (1)..(2000): DMR8:131069701
acttggcattggtttaggagagaaaacagacattcccatctaccagtcgtaaattggctcaagcctactgaagagtagtttatgaatataaagcaaatccttaaaaatgtgcatagcattgtaccaaagatatagcttccaggtacagtatttatcctgtcaacttagagcctctgcttacatattcatattataacatacatccttgtcaccatttccaatccctatcaggacctggaaagtgggataggtccaattatgcctattttacagattaacaaaccaagaattggcaaattcaagtaactaccttgcagtcacacaactaagagcttggattcaaactcaaatctgtctccaaatcgagtactttgaagactatggtgagtgttctagagttttaaaaaattttctaatatagtttatgttaaggtttccagataaaatacaggacattcacttaaatttgtttcatataagcaataaataacttttagtttaactatgtttccatcattgcatggatgtccgtgcaataattggtacacccttatattaaaatttcatttttgcttatctcaaatttaaatttaaccaggtctcctgtacttttatttgctaaatctggcagccccattctgtgggtatcaaggacccaggcctgaagataatcagaataatgacaaggagaatggaaagtataaagctgctcagccacagtcttttttttgttttagattttaaaaaaaattttcctctttatttaaatataaaacacatttataacatgcaaattgacttaacattaaatggcgtcttcccagaccaagtatttgtgaatgtatcttcaagcactgaaaataaaccaacatattcgacaggtggactcagactcttctatcacctcatgtcaaatggagttaaacacaaattgagtagaattcttaaagggaaaaactgtcatcttttggacatacaaaaaagttgtctcatacatcaactattaaattccttggctgattaaaggacagatcttgaaaaataacataactatattttactatctgggacaagccctgtggtaattgctatataaatgagaaaataatgctgttcatatttctgactactttaaatatgttcatgacatttttttacgttatttattttataaccaaacttcatgttttcactcattactttctttttttttgttacttttttattattattatactttaagttttagggtacacgtgcacaacatgcaggtttgttacctatgtatacacatgacatgttggtgtgctgcacccatcaactcgtcatttagcattaggtatatctcccaatgctaaccctccccactcccaccaccccacaacagtccccggtgtgtgatgctcgccttcctgtgtccatgcattctcattgttcaattcccacctatgagtgagaacatgcggtgtttggttttttgtccttgtgatagtttgttgagaatgatggtttccagcttcattcatgtccctacaaaggacatgaactcatcatttttatggctgcatagtattccatggtgtatatatgccacattttcttaatccagtctatctttgttggacatttgggttggttacaagtctttgctattgtgaatagtgccgcaataaacatacatgtgcatgtgtctttatagcagcatgatttacaatcctttgggtgtatacccagtaatgggatggctgggtcaaatggtatttctagctctagatccctgaggaatcaccacactgacttctacaatggttgaagtagtttacagtcccaccaacagtgtaaaagtgttcctatttctccacatcctctccatcacctgttgtttcctgactttttaatgattgccattctaactggtgtgagatggtatctcattgtggttttgatttgcatttctctgatggccagtgagataagcattttttccatgtgttttttgg

SEQ ID NO: 1397 - DNA, 2900 bp, Homo sapiens
  misc_feature (1)..(2900): DMR8:131389501
gggatgacatttaactttctttggcttgtttccgtataaactcaaatagaagaaatagaacataatttattttatcttggcaattagtaccttatattacctagagtaacaaatttaatacagcaaaattttcctctcctgaaacttgttgactattatagggatatatttaaattatttacagtcatgaaacaatttaaataaaatatgtacttgctgtgaattttgaactgtcaaatacacttactctgttgttttttttttctgaaaaggaaaaaaaacccaaaaaaaaacacaaaacaaataaacaactagaaagatgcagttactcctgtaatcctgtaatagcttaagaggctgagttgggaggactgcttgaggccagaagtttaagattagcttggccaacttagcaaggccctgtctgtaaaaaaaattaaaaaaaaaaaatagaggaagaggttgaaaccgtatctctgttttttaattttattatttttatagacttagggggtaaagtgtagttttattacatgaatatcctgcatagtggtgaagtctggagttttacttgggtgtaaccatcactcaaataatatatacactgtgccccttaggtaatccatcatctctcaccccagttccatccactcgcctttccaagtctccaatttctattactccactctctatgtccatgtttatacatcatttagctctcacttataaatgagaatatggagtatttggctttctgtttctgagttatggcctccggatccctctatgttgctgtgaaaggcatgatctttttaataagttagtcgtattttcatctttactttcaagagttgacaatcacagttcatcatcatcatcaccatcatttctgcagtataatcactttcatacagacgatgaaaggagacaccaggctctcacagtaataaaaaatgataaatgaaaggatcagaatttgagcttatttctgatccccataactcaagcccatgctaatacatgatatgttgccttgaaaagggaaaacacactgtggttgacacacttgcaaactctatcatatgcaaattagctgagccatcttgtgttttaaaacacctctaaagattgccttttaattgctgatgcaatagggattgaattttcatcatctcttcagcaatgtgtttgtacttacaaaatagaattttatccttcagaacaacgttcggagaacagcaggatgggttagcttcatcctgttgtgcgggagaacaatttacacacaaaatgaatatctggctaaatgacttcacagagtctttctaagtttcatagccttcgattttctgaccaagatgcaattgtcacttcttactcctaaaaaaagccttcggacatcatctcaactaaacctctgacttaacagaggaaacttttggtcactcattttcagtgctgaaaaatatagcttaatccagccttgaaaatcagttagttgcttcctacacgttctggttcataaattcactgcttgagtttttgggatacagggtttctccctaagcagcagtggatggaacactgaactaggagccaagaagtgaaaaaattagcatattaacattttatggagctctctcatactgtgtgtgccagaaggccccgaactgggtgctaaaatgaggagctcagctcttattgaggtttacactcaggcatggtagaaaaacataaaataatgaccaaaagggggaatggaagttgccaatgtaatagacactacagggagagttgcctactgtgataaatgtctataacaacagagttgatttagtcatggggtcaatggattcctgggggtattaaaaattgtgctgagataatcttagcaaaatctctatgaagtccattttaaactcctacaaaactcctttttaaaaatgagaacactgaggcaggctcagtgaagttaaatgattttctgagcccctacagtaagcaacagagcttgtattcaaagccaggactgttctacacttgatattccccattatatcacagttgataccctaggactgccatctgcttgggcttctagtcctcgtcctactatcaatggatatacattttattctgtgcaacacaattgtatattgcagaaagagcgtgaattttaacatctgataaatttggattcaaattccagttcttttacctgctgaatgagcttggacaaaccactctaactgtctggacctcccattccttaataagaaagaggaaaaaaatgctatgcacattatggagtagtttataagattagaaataagaaatacatggtgctccataaaaaaataacaacaacaacaccagaaacaacaaacaaaaggctatcatttcatgagcacttgccgtgggctggacacacaaactatcacatttatttcttacaataatcctaggagataagttctattatcaccctcattttgaagaagataaaattgtggcactgagtaataaagtattttgcccaaggtcataaagataagaagtggcagaattaggataaaaattggggagcctgactccagaactctgttcacaccatatgacctccgtaattcccgtccgtaacatgtacggaagatgtggaaagttggagtgggtgttccttccagcataaggtttctgatgtgctttctttgcggacagtttgaaggctgcgagtgtgtgcacacgcacgcgcacacacacacgcacacacacacacacacacgcacacacacaccacccaaactttcccttttgggctcttggagcctaccctcgctggctgtactgtttcaaggtgttctgtggaggctgctcttggtttcacagccatctgctttgtt

SEQ ID NO: 1398 - DNA, 400 bp, Homo sapiens
  misc_feature (1)..(400): DMR8:133947401
cagggtaccgatgtttttatatgtttccttttaatgaggcaaatggcccaagatcctcaaaaatgatgttaatgggctaggcacagtggcttatacttgtaatcctagaactttgggaggctgaggcaggaggattgcttgagcccaggagttggagaccagcctggacaacatagggagaccttgtctccatgaaaaataaacaaaattagccaggtgtggttgtacacacctgtactcctggctactcaggaggctgagatgggaggatcacttgagcctgggaggtcaaggctgcagtgaggagagattgcgccactaccctccagcctgggcgacagtgcaagaccctatccaaaaaaatgaggttaataacacctttgatatcttaggttctctt

SEQ ID NO: 1399 - DNA, 2100 bp, Homo sapiens
  misc_feature (1)..(2100): DMR8:135204501
ttttgagttctcactcaaatctcatgtcaaattggaggagaggcctggcgggaggtgattggatcatgggggtggatttcccctttgtcattctcatggtagtgagtgagttctcatgccatgtgatggtataaaagtgtgtgaaacttcctcctttgctctctctctctcttctgccaccatgtgaaaaaggtccttgcttcctctttaccttccaccatgattgtaagttttctgaggcttcccagtcatgtttcctgttaagcatgtggaactgtgagtcaattaaatctcttttcttcataaattactcagtatcaggtagttttttcatagcagtgtgaaaatgggctaatacagaaaattggtacttcaagtggggcactgctataaagacacctgaaaatgtagaagtgaattaggaactggttaatgagcagaggttggaagagttggaagggctcagaagaagacaggaagatgagggaaagtttggaacttcctagagacttgttggatggttttgaccaaaatgctgatggtgacatggacaatgaagttcaggctgaggtggtctcagatggagatgaggaacttattgggaactggagcaaaggtcactcttgctatgctttcaccaagagtctggctgcattgtgcccctggtctagggatctgtggaactatgacattgagagagataatttagcgtatctagcagaaaaaaatttataagcagcaaagcattcatgatgtggcctggctgctcccaacagtgtatagtcatatgtgttcacaaagagatggtctaaaattggaacttatgtttaaaagggaagcagagcataaaagtttggaaaatttgcagcctgaccacatggcagaaaagaaaaatccattttcagggaataaattcaagctggctgcagaagtttatgtaagtaaagaggagctgaatgttaatagccaagacaatgggaaaaaagtctccagggtatgtaagagaccttcgtgacaggactggaggtctgggagggaataatggttttgttggtgagacccagggcccagcttctctgtgcagcctcaggacatggagctgctccacttccagctgtggctaaagggtgccaaggtacagctcaggtctttgcttcagagggtgcaagccccaagccttgccagtttccacatggtgttgggcctgcgggtgcatagaaggtaagagataaaatttgagcctttgcctaaatttcagagcatgtatgaaaatgcctgggtgtccaggcagaagtctgctgcagaggcagagcccttatggagaacctctactagggcagttcagaggggaagtagggttggagaccccagagagtccccactgtgacactgcctagtggagctgtgaaaagagggccaccatcctccagactcagaatgacagatccactaacagcttgcaccatgcacctggaaaagctgcaggtgctcaatgccagcctgtgaaagcagccatgggaggtataccctgcaggatggccacagggactgagctgcccaaggtcttgggagcccatctcttctattagcgtgccctggatgtgagacatggagtcaaaggagattagtttggagcattaagatttaatgactgccctgctgagtttcagagttgcatggagcctgtagcctctttgttttggctaatttctcccatttggattgggagcatttacccaaagcttataccctcattgtatcttggaactaactaacttgcttttgattccacaggctcataggtggaagggacttacttcatctcatatgagactttggattgtggacttttgagttaatgctgaaatgagttcagattggggaactgttgagaaggaataatgtgtgagaagggcatgatatttgggagttgccaggggtggaatgatatagtttagatttgagtgtcccaaatctcatatcaaattgtaggaggggcctggtgggaggtggttgaatactgggggtggatttcccccttgctgttcctgtgttaatgagttctcatgagttatgatggtttcaaagtgtgtggcactt

SEQ ID NO: 1400 - DNA, 1700 bp, Homo sapiens
  misc_feature (1)..(1700): DMR8:135233801
tacactctgagtacatagaggatcaaaaggggaagtggcatgttttagtggaaaagacaggttgtggctcagaaaattgatttaacctcgggtaaggcacttgacaattcttggcctcagcttcataattttacttacctgtaaaataagagttgttgtgggaattaaatgacagacggcatgaaaaagcttggcaccttacctaatacatcggatcggctcgagaaatggtagacttctttctgtcttctccttcctttcctgcctcccttcctcccactccttccttcctctcctcctccagccatgtctccctccctccctccctcccttccttctctccccccaagcctccatatttatttccttcctactaaaattttcttccacattccctctcatccagtcctcaatgaatcctgaggacagctatcagtggtcactctcttgggcttgaaatggaacagatcttcttgttccatctctttctgatagcgccagttcctgctgaggacagaacattgtcttcttttctccctgcctcaggcagatggcagggagtgttgtgtgttcccacaaaggagcgtgctgtccccgctcccgagtctctcagcgagccctgtcatggaaggcatccaggagaatgtggaactccgcacccgctttctcagaacagaggagcatccatgaccctcagaatcacagcattgagaggtaccacaggatgggccccatgtttgaatggtctgtgcactagggaccgagaccctgaggacaagcctgtgattggtgagaagtcctgcacattgcacactgtgcttcagctgatgggggcggcaggactgattgtcattgtccctactttacagactagaaaactgaagctcagacgggcttagcaattttccccaaattacacagtagttaggaggtagacaaagtttgcatgcctggtcatgggaatccaagttcagtgttctttcattatgatgttttgcctctgcatattaaaaaacaaaaaacaaaaaacaaaaaaaaaaaacatgaattttcaactgaatgtaggtaaataacccaggaacttaattatatttttttccttctggttctggctttggcttagcttctacctgagaatcaacctctccctacaacaactgtttcttcttttctgacattctatattcttttttttttttttttttttttttttttgtgactgggtatcaccctgtcacccaggctggagtgcaatggctcactgcaacctctgcctcctgggctcaagtgatcctcccacctcagtctcccaagtagctgggactacaggcatgcaccaccatgtctgtctaatttgtttttggtagagatggggtttcactatgttgcccaggctggtcttaaactcctgggatgaagcaatcctcctgcctcagccttccaaagtgctgagtttataggcacaagccatcacacctggtcacattctacatctttgttgggggctgcactatggacccattattcacgcaaaacctggcaatcatcctgaactcttactactcctaacccgtgccccactccccgccggtcgccaatgctctccttgccatgtacaatcaatgccaggacctgtacctttgacttaacaaatacctcttgcatctgcccctcctccctgtaccaactgtgcccccatt

SEQ ID NO: 1401 - DNA, 200 bp, Homo sapiens
  misc_feature (1)..(200): DMR8:136222001
cataaacatagagacaatagacacactgcaaactactagaggggagaaggagagaggcgtgtcataagttgaaaaactacctatttaggtactacgcttactatctaagtgcaatatatctaagttacaaatctgtacatttacctcctgtgtctaaaataaaaattgagaaacaaatcccaccaaaacatttttagatg

SEQ ID NO: 1402 - DNA, 2600 bp, Homo sapiens
  misc_feature (1)..(2600): DMR8:136730801
gagatggacatgcctcattatacctctccagcatttgcatcaacacagactttaagtctgataagacacattttacaacctattctctctgaagcctgtgagctaaaagcttcatctgtatagtaaaactgtggtctctgcaacctgttatcgcaaccccagacattcctttctgttgatcgcaggtctttagacaaactcaaccaattgttaaccagaaaatgtttaaatttacctatagcctggaagctctccccacccccctagctgcccaggctttcagttgtctcacctttttggaccaaaccatgtatttcttaaatgtatttcattgatgtctcatgtctccctaaaatgtctaaaacaaagctgcaccctgatctccttgggcccatattctcataacttcctgagggctgtgtcaagggccatggtcactcatatttggttcagaataaacctcttcaaatattttacagggttagactgttttcattgacgataatttggtttcacagagtttgactgttctcgtcggcatggttgagacattatccctggcagaaggctggactggcatggacatcatttgatgagttcgtctcctcttaacaatcaaagcctgttttccagtgcgaataaactgttgccttatatattgttttcccatttttatagttgtttactgcaaaaaagagtctggtacaagttactttgctaaaaccttgataaagttttattctacgattcttcaatcaatgtttctgttttgtttattctgttatctctgttgtgtcataccataattctctcattaatagctcatattctttttcatagctattcaattctttagcagtttctacttttatgtttgggagaaaattgaaagcttgatttcttattttgacaagttttctaaaggtttcagcatgcaatattttttttcatagccttacagtttgtaatagttcatctgattgtaaagctcttacaatctttcctgattttaagtcattttaacaacgactttctctcttttttatttttaagaaacaatgtcctccttttcatttgttgagaactctactcagcttttaaaaaacttcctgtgtatgtaccttaattcttttgacaataaaacattactctgaatattcaaagggtctttcttctttagaatggtggttccaaagagctatattttcctacatttggtgatctttcttttgtaaatttggaacttggtttatagctttttaaaaaggttttaccaactactaatatggaaccacatgctgttttctttatgagtggatttttcagacattctgttaatgcaaaccagacgttcatgactgcatcagtctatgaaagctgagagatacctggggccataggcattctctccagtacaagttgcctcttcttttcctttgccatgtttaatgaagttcacttattcatgtcaaaatacttttttttccttcacccattcactttctccttgttgtccttcagcctcatcccacctcctcctctactcacacacaaacacattccaagcctgatccctgggacttgcccaaggcaggtgggagttcatttgttctctaaatgttttaccccgcaccctacctcctaaccccctgcccctccacctggctcccccacatttccctctaagagggagttgtaagatggtttatcctcaggcacttccacttatctcctgggcatatgccctttctcagaaaaagtagtaagttggaatattacaacatcctctgatgtaatgtagccactcacttagtttacaaatcagaaatcagtggtagtttttgttgttttgtcaacatcctgaagaattaaatacggatactcctatatacaaacattttactcccatctttatattctttttttttctgtttgccattctaattgaaatcgagtggtagaaagcaacatagataggctcattgtcatcttacccaggaaataaaggaaaacttactgaatgcaaacttggtactgtacactagaatgtaaaagctcacttccagcttagtaaaggaccaagaaagctactacaaagcgaattcaagcactggagctactctactgaaccacgtagaatcctgtcctccctcaccatgtccacaaggacacagtatggggtagaaaggcaacacatgcctgtgcagaaggaaagagcaggttactgtattagaaaagccatttgtgtgaggccaaatcgtgattctgacagcccaattatgacaagtgacatatttacaaggtgccaatctgtcaaataaatggagactaaattggctctggaataatagcttataattctttctgctgctttctttgactgatgtgctttatttttaccttttttttttttcttcacatacttcagctgatttgtgagtccaggaaatggtaggtgcatctttaatccagttcaaaggggcaaaggactagcatttacagtccacatatgatcagcttcggtgctaatttaattacagaaatgacctctgttaatcattataacatttaatcatgtaggtattattcctacttcctac

SEQ ID NO: 1403 - DNA, 300 bp, Homo sapiens
  misc_feature (1)..(300): DMR8:139107101
gtgattttcttggccaggtttttgaggattttgctgtttaaggcagatgaatcatagccaaaacacttctcaaaattgactgaataaaaaccacatttggcccccttcttcctggttcttgacagccagttaccttgaagttggtttgtgttaagttgactcgacacttaacaagaaccttaaatggtggaagggacagggacgtgacttggtagttagaagaaccaggagggattaaagggaaagttcacctggaaggaagaagtgggtctcatgtttgaaatttttctggaaaaaggc

SEQ ID NO: 1404 - DNA, 2300 bp, Homo sapiens
  misc_feature (1)..(2300): DMR8:140107301
aaatggaaggctttttacggtcattcctttgtttattcgcttactaagtattcagttcagctcctccagtgcaccaggcatggtgctttatgctaagaccagaacatcaagtaaaatggaacagtccccaccctcaagacaactgcaacaaagataaaactaagtaactggagaactgtcattgtaagagaaccgaaggatgctatgaaaggggcatgtagccaagccgtccagaattggaggcaaatggtaccgtgggagtggccctcagttccagcaatgcctctcagaagtgacacctgagaatggaggaggagaaagccagtgcaagggagaagaggaatggtgcctcaggcagtaggtaagcatggccaaggcttacaggcgaaggcatggaaatcatttccttgtggccaggccacaagacagccatgagaagagctgaggcaagactggccaagggtatgggctttattgtaagggagatgggaaggcatgcatggcgcactctgactgggggtcacggaggcagcacagagactcaatctgtgcagggcagagaggagtgaaacatttaagtctggcagtttccatcttgcccacaatttaggctaggaagagcaagtatgaggctccaggttttcaaaatgtgtgtggtgggggtggggtgtagggggatgagacagacagacacgcacacatatatgcatgtagatatgaggatacgtgtgtttatacatagacaggttatcctctgggtgatatccgaactcacaattcactgattcataatctgtggaggatgaatggagaaggggtgggggcggggagttaagaatttcccagtacagtcctctgtttccaaataaggagactgagtcctagagaaggtaaatagccaactacataattatcaaacaagtctcttagttatttggaaaaccagaatcagaagccaaactgcagatgcccagccctgcacccacagccactaggggcacagcccttcatcacgtatcttagatacctggcagcctctcagagtggatgggcaacacttgctcaattctgatgagctagtttggtctttcatccctaacctagtcacacagaagctctgcacaattcccagcatagtccctgacacagagaaggcgtttaaagccaagtgtccatttgactttacagcattttggtagcacaaagctcccgctcgccccccttgcccagggcgcacctggccccgacatctacgcctaccctcacaggcctcccaggtgtgtatgaccaggaagataagttgaaaggatgaagcctgtttgaagggtggttgtcagactccccgaccttagaagagcatctttctgatggtgttttttgttgggtttgttctctgttgtgtcccagtgcctagaagcacacgtggtatgcagaaggccctcagcaagtatgcagggaattaactggccagatgttcctcatgacccgtgtagttaatatttggcttcagtcagagcagcgtgacatttatctgttatgtatttgggggatctgtgaaggtttcacttgaagcaacatcctatgactaagaatagattgaaaaccactatccagaggggagatattttttcttttccttagtttcgagaagcctttttacttactgaaaaacagtgcaatataaatggagtttccaaaaaccaaaacagaggtaatttataactacccaaaatactttacttttcctttccgattctgaaacaaatgtgattccaaaatgcctctaggtacatgtttggattttataaaaattatataatgaaagtgatgcctcacaagcaaagggaaggcgaggtcgacacaagcctctcgccatccgtgggccgagcacagagacaaatggaggcccccctacctgctgagcaccaggacaacccaagtgattccaggacattctgagatggggagggggcactaataataattactccagggcagtatgaacagggcctgtctcagacaaactggggcatagggcactctggtaataaccagcaggaggtcattaaatgcaaggtcaccactggtcaaaatggatgattatcatctaggagggtcaagtcctagcaaaatatgattgccactcaaaaatacgaagagaaaacagaccatgtggtacagtgaaactaacatatctgggtctaaattccaggcctgccatttactagctgcatgaccttgaaaaaaatactatacaatttacccctcagggttaaggattaaataagaaaaaaatatat

SEQ ID NO: 1405 - DNA, 300 bp, Homo sapiens
  misc_feature (1)..(300): DMR8:141054801
aaaaatttagctgggtatagtggcgggtgcctgtaatcccagctactcgggaggctgaggcaggagaatcgcttgaacccgggaggcggaggtttcagtgagctgagattgcaccactgcactccagccctggtgacagagtgagactccgtctcaaaaaaaaaaaaaaaaagataatgaaatccttccatgccaatgccaattggtgaagagtggctgctgggccgctctccctcgaggtccccctctgttctgattaccctgagtgccctgccaagaccaccccagaccccatttctt

SEQ ID NO: 1406 - DNA, 3100 bp, Homo sapiens
  misc_feature (1)..(3100): DMR8:142459401
ggtacagctgtgcagataccacagcagctgccccagggtggagccattgttggctcaggcctggacccctttctccaaggccgtgactgtgtgtggttctggctaaatgcaccctctggggcacaccctcctctcccagccccgtctctgtccccgctgccctcacatcccagcaagtacagcacgaagcccaggctgtcccacagccacgtggccttgtacaaatgtgccgcatgtgtgtgttcatgctcacatatgcacactcacaggcacacaggaacacatgcacacacatatgcacgggcacacacaggcacacacgtatgcacacatgcatttgtgcacacattgacacacatctgcttctccccttccacatctcagcagaggccaccagcccctcccccatttgctctctggaagtctcctgtgaccctgtccacattgaccttcctcctggcccagacactacacaggcccgcccctgcccccagcaggcagagggacccactcatcctcagggccccactcaggcgctgacgcctcctggatgccaccctgggtgccaggagggatcaggagtctcccctgcacgccccaccccatctcagctagactgtcggccaacactgcagccatgtgacctgggctgcagtgcccggctcgggcctggcgtgggggggacaggagcctgaagagatggtccctggtcacccccggccttggccagctctctgcccgcctgggcctgccttggtgtgagaaggctccggggtggccccgttggagggtggcgggcaggtggggtgcaggagacctcggctggctcagggatgggtgggtctgctgggggcagggcagggggtgagtgtggcaggtggggaggcccgtgcccactggcaggctcaggggccatcagccaagacaacggcctgggctcctgcccagcattgcccagtggcccatccagaaaaggcaggtttgggccagttctgtgggtctcaaattcatatcagctgggccggccttccggccaatatggcctctcccaaggcctgggcggggagcagctcagtccgagatgttctaggggatgctggggagccgggaagtaacctgagccctctctccccacacccccctgacttgctgatggcccctgtggtccctcctgtggaaccccagggcttcaaggtttaagaatcccagggatggacacttctgggccatctcctggccccaagacagtctgccgaggccccaggtccctgccagggcactgggcagttgcgctgcctggcccttagcccctcctccctgaaggtacctcctccctcctccctctccaggccagaagtgggccgtgtgcaccttccatgcctggctggtcctggggcctcccccttccacctcctgagcactctccttccccatggccactcctggccctcatgccactccctcgccatcaccccagggtgaccccagcactgccagggtggcccttctaaggggcggttctgataggggcactggctgcttctgatcccctctgccacctcttgcctacagggtgggcctcataccctaagagggttcaaggcgtggagtcagctggtgacaatgaggggcgaccggtgataccagggccctaggggatgccaggaggtctccactcggctcagctctcaagggcccggggacagtggcaggggtaggccctcgtccacctgctctggggccatgctgggccgtgctgtgcagagagcatgggcggtgacccgcaggcctgagctgcattccaggctcaggtgcccagtaccggctgtgagcctccaccaaggcatggcccctctgtggacctcagcatgcccatctgtcaaatggatctgtaacagggtgcctcagtgacagagtgcctggcacacatcctatctccctgtgaacctgggatggactcttccgtgttttctcaccaagctggagcctgtcctgggacacccctcccaggcctgcacagtccacacggcgttgcggacaccagccgcgtcgtggccagctgggcttatgaggctgcgctccccttccaggctgccaggctgtaccagtttccaggtgggatgaccgaggccctagactccgtgcccggccgcaggcccacagaggctggtccttgtacaccccagctcctgtgcctgctcctggcaccgcaggcccctagaacctgccccgccctgggaatgctatggggtggagctgccagggcctgggatgaggaggggaaaggtgggccttggcatcttgagctgtgcgggtccctctggggtgaaggtggtgcatctggggctgacaccaactcggggtcagggctaacaggattgcctggggcctcctttgcacttggaggggcatatggggcagtgaggctggctgacctgtggaggagtcaaggccacgtgggttcagcaccaggtgggactggcactctgccaggctctgccgacactcagccaggactgggctcaccccgggactgtagcgcaaggtgaggctggggaggccttctggctgtgggacctgcccacagccgctccctctccatgagatggtgagggggcgcccaggacagcccggcttttccatgccttgtccaagcccacccagccaagcgtgtctgggggcaggactggaggagggcttccaggaggcaggggacatggcagcatcttcccaggtctgccacgaatgcgccaggatgggaagattgttttgtaggtttgtccctttctaaaaaaattttctcttgggagcccggaatgtttgccaggaatgagaccacagagggccaggttgggccatgtctgttcccagatccagaagccccagccagcttcctccccctgctggaagcacttcctgcagccccctggctaaaattcccccacccagctcttaatctcttgttgagagcagtggggtgcccatcccactttacagatggagaaaccgaggctttgtggtgagagatgtgtccgaggccactgtgcagtcaggagcacagcccaagtccagcctccggcctcctggctcccatgggctc

SEQ ID NO: 1407 - DNA, 7500 bp, Homo sapiens
  misc_feature (1)..(7500): DMR8:142662201
caagaacgggaagagctcaggtcctgaagagctacagtctgacagggacaagccatgtccagaggactcaggagagccagccaggagctcggccagctggcctgcccatgccctccccagctccacccacccaggatgtcctactgtttcagagccctcgggacatgttctaacctcctgtgttgcctcaagcagctgcaatccagcagtcttggttaagaggctctattaggagtgacacgtgagcccagaaatggcacaaagtacatgatgtgcagaagttccccagacaatgaagcaaacagtgcgggtgacaccacaaagacaatgggacacaaatgggaactgggactgtcgttcagcaccgagatctttaaaaactatttggcttttataatcttcacacatgcattcaaagcaagaaacacacacttccaggacatagatagggctctgtcagcaatgacttttgcccctgtatctacagagatgtgaaagtacgagaaaccacagcgagccaaatcctctccttcatgagaacagaggtttcagtggaatcaacagcagacgctggaatgcaaactacgtgctgactcggccaaatgatatgaatttaagagaggaaaagaattcaagggcaaagcactgaaaataacatagcaagaaaaacctatttaggccgagtgctgtggctcacacctgtaatcccagcactttagaaggatgaggaaggaggatcgcttgaggccaagagttcaagaccagcctgggcaacacagtgagaccctgtctctacaaaaaaaataaaaaggcgcggtggtgcgtgcctctagtcccagctactcaggaggctggggcgggaggatcactcaagccagggaggtcgaggctgcagtgagctgggatcacaccacttcactccagcctggtcaacagagtgagaccctgcctcaagaaaagaaaaggacaatgcacctattttatgctcgctgaaagacgaggctaatcactgtggacacagggcgttctggaatctcagctgcaggcagtgagtgttgcccgtgaaatggagatgccgcaaagcaactacagacatggagaaaataaccacatcctcttacaaccgcctctgtgaaaactgaccaggacagacaactcctccccaaaagtattactaacgtgctaacagctggggataagagcacacatactgctagaaatctaagcagcctgttttactgttttcagtgacttacgtgcaaacctaagactaatctctgaatgtctgatcaagacgtattcatgtaaaggccataagtatgaaattctgggcaacatggtacattggactctgagccaaaatgccaaaataccacacagggtccgtgtcctctatccgggtgatgagcagggcctggtcagccactcctactttcttcccagaaaggaactctaccaagtcaactctccgtggggccccccaacatcttggggccagagcccatgggacaggatctgcgggtaacagaggatggttccagagtcattctgctgaatgaggccacaactgaagtgagatgtgcggcctgttcagccgctagcaggccaagaactgagtcccagctctcgggccatcggacctcaggcaaccgtgctcggggtccacccaacacggggatggccgccagcccagcagatagagccttctgagacgaagcctgtccaggggcggtgggcatggcctcctgtcggcctggagggcaacttctctccacgtggacagactgacatctccaccctctgatactgcaatgatcagccagcgaacacgagaccagatcggctcagcctggcccccattccagccagggtgcggctctggcttgttctaggctagggtggacccttccaaaacatttcctcactttcggatgacacggcaagtgataaaataaaacctgtattgacaggaacctcgggcacagaccgtcctgggcacccgagccacacccgtgggcgacccactcctggaagggctcttgagtgtctgcacatgccctcctgcctcaggtggggtcggggcacaggaccatgccactccagggtgtggggagaaacagggccagtggccagggcagggcagagaagccatcagttgtcacctgctgtggatgagcagggcaagggagactgagctgtggccccacagccaccagggccctcctggagggcttcaaccttgaccacagccccgagggcaccacgccgcctcctcacctgctgctggctccggaacacggcacgcagcgcccgcagctgccccacttcctgcgcactgaagcatggctgccgctccgcaaagcgcaggactgcgtcaaaggccacggccgcctgctcccaggccacctcctcgccctcaccaggatctcctctgccgtcctggtcagctttcggagtcttttctgaactccacacaacctctgctggcgacgtggcagcagggggccgtcccccttctgcctcccttcccgctaccccccagctggcggcctggcgctggcgaagctggcccgggcaggaggagccttccttcacaagctccaggatgtgtgcaaaggacttgttgtggggcttcactgggaagcactctgcctccaactcctcctcagaggaggagccttcggcaaacgcaaccgacggccacagcttcctccaggcccgcctgaagacgtggctagggactgcgttccaggcacaggccacgctgaatatggcatcgttcatgttgtagcgggcgtgggggccctgcagggggaccggagggttaatgaagttcctcatgaaatctctccgaatgccctgctccatgggctgcaccaatgaggccacgctggcaggcaggaagatggtgaaaacgttactggacaccagctcggcctcctgcgggtgagcccgggagctgtccagcaagagaacggctttgctgtcttccggcaaacctatggttctgaagtgctctctcaccgagggcacaaagatatgatggaaccaatcggaaaaaatctccttgtccacccaggcgttcccctgggccttataggcgacgggcaggtgctggatgcctttgaaagccctgggaccgctgcacttcccgatggccaagggcttgagcctgtgggagcccgtggcgttggcacacatcagcacggtcagccggtccttgccctgcttggggccaggcacagccccgccttccggagtgggatttggcaggcaccgccagaaaaggccggtctcatcagcgttgtaaacctgctcggcggacagcccgtgctcagcagccaagctcctgaaaaacgcacagaactgctccgcggcctggtggtcggctgactgcttttcactggatgcatctagctttttaatgccgtgtctggccttaaagcgccaaagccaccctccggagaacacgcagggctcagtgagctgcatctgctcgtagaagtccttggccttctcgatgagcatggggcctgacacggggacgccctcggagcgcttccccaggaaccactcgtacaggacgcggtccaggtgctccagcttgggcgtgtgcagcgtgcgccgctgctccagcgccttgttggagtcggagctggcgaagaaccggagcagctgcgccttgtgggccctgatgtcgtagagggtggacatgcccacattgtactcctgcatcagtgccttccggctctcgcccttctccaggcgcgtgcagatgtcaatcttctccttcagtgtcagcaccaccctcttccgcttctcccctctgctcttcccggcagccggcttggaggccatggggaggggtggctggtcctagcacttgcaggacacacgcctggcctgggctgctgccactacttccctctcctcctgctccccttctggggctccgtctctccctctccactctgcctgcctgctctgctgatcctgagcacaggccccagtccctctcgggtttctcactccacacgctgcacctcctgcctcaggtatccctggtcttccaggctccacacacctaggccttggctcctggcagtgcagtcagctgccaattctctctgtggaggaggtgaccctgtcagactcccctctgctgctccacacggctggaactccggccttctctgtggatactatggcagcggctcccctcaaactgaccaggtttggggtggtagaggttttaccgcataagcagcaggtgcctctccagggtccacaatggtatctccaggcacagcacttcaggggctggaaagcagagggaacagagaggaaagtgatggggcgcgcccaggacacacatggcgtcctcacgactctcctcaccgggacactccagctgaaactcaagggctgttgagaggacccatgcaagtgctggcatgcactgtggggagagggtggccccgggagcagcccagcctgcccagcccctgcacgtgctgctcaggtggactctgcccaactcccaccaagcaaactgaagccattcgctagggctggaaacgagacgtggctctcataggagcagcccggcctttcctggggaagcgctcaggcagaagccatcagaggaagccaggaagtccgatgctgggcggacccaagaacaaacctcccacccgcccagcctaagcttcttgctgtaactgctcgctgggctacctgagcttctcaaatcccttattcctccctgaggagcagaggcaggggtggagggatgcagggaggaggaactcctcactaccctccccgccaaagatcttacaaaccccatctggagcaggtctctaaactcctctctccgacacagagcgccaaactgcctctagaaaacaaggcattagaagtttctctagaacagcaggcctcaagctcctccaagggctaggaggtgctgccagtttctcaatcaccctctgacctccctgactgccacacactcagatgcgtctacaaggagccgcagcagacagacagctgtgaccattccaggcctcttccagaggggacccctcaagctcagctcagggtaccctgccccaggcagccacactgagccgctggtctctgaaaccccaggctctagtgctgcccgcccacctggctccacaaccacggcagggccgcagagcctgccagacatggacggacacggagacacacacacacacacacacacacacacacacacacacacagccacccaacctcactcacacatacacgctcagaggacacaggaacaagctagcccagagcaggaacttctttagcatttgctaatttgggaggctctatgaacaaatgactaatttacgccagaagcaaatgccaggaaacctgatagccccctgggagcaagggttcttcctgggccagctgtgcaccctacgaaaagcttgcttttaagtttcacacacacctttgaccaataggaagaaaaatgacatagaaatgtcacagctctaaccaaacacatctttctgttggagttttgaactaacttctcacccttctcctatataaagacaatgcgggtcattctcatcccttctaggtggacaatttcaccctctcataacaactctgcgaaacaccccacaaccctccctacacccgagccgactggcagggcacagagggcgcacccctgtgaggccagggcagcctatggagtcagggcctgcaatgcacttcacccagttaagacactgctgagggtggtgagggctgaaaagctgtttgcccaaacaccgggcagctcagctggccgcctcagtgtggcgtgcgtgctatgggcaggggtctccctgccctcactcctccgcaggccagcagtacttgaggatggactcctggagttcccacctccctcccgcgtccttaccatagctgcttctgccaactccatgcagagcgtgtggccaaaggcctacttacatgtggagcgcagaaacgcagccctttgaggccagagctcaagggaaaggaggagtgcaatcaaatgcagcaaaagctccaaagaaaaattataggcttgttggctgccacctctgggtgagtactgtcctcttccggagtcagtttcctggtctgcaaaatgtgggctggtcccttaaggatcctgcattgttcgctgagggtgacggtgtgacgtgtgtgcggtctggcacagcacagtgagctatgtgcatctcaccatggggaacaggagggaaggcaaggccacaaaccaccctccagatttttaatatgaacccgctgtagaaaaactgggggagacacggaatcccacagtagcttatgagggactaactggggactgggatgcagagaaaagcttcctggaggagactcaacaccagacacagctcctcgcggacacgtctccatgcctgacatgcaggtgtagcaggatgacacaaagtggctgaacttgtttcataaggaatatctgaattttatttttaaaggaagtttttggtcttgcaagtgggacaacagtgtgttctgccagtttgtgtcatcctgccacacctgcacgtcaggcatggagacgtgtccacaaggagcccgtgtctggtgctgagtctcctccaggacgcttttcccggcatcccagtccccagtcagcccctcacaagctactgtgggattccctgtctccccgaaattagggtggtttcttgccttgcgactggagaggaagcactgatccccaaggccacgtgaacacgggatgaaacgtgcaattctcctgtgcccaaggcacagacaagaaacgggaggcctgaggggccagcgctggggctgactccgtcctgtgtgaggctaagaggccctgagaaacgcggggggaaagcgggaaacaaccttcgcaggggcatagtgtgtgtgtgtgtgtgtgtgtgtgtgtgtgtgtgtgcgtgtgtgtgttggggggtatggaggatatgaaggagaaatactcaaaaaacaagtcgcattctggagctgggggaagaggtgagctgggggtcagaaggagagtatgggacagagaaggaggggacagaaagcctggggccgtgcgccccgcagagagcgcccgagagccggcgccgagttccgctaggagccctccacgctgggggatcctggcgcagagacagcgctgggctactggcgaggctcgcttaaaaagcgtccgtaccccagggtccccgtttgtgggtagaaattcagtctgggacaagaacaagaacaaaaacagaaatggagaaaaaaaagtctcggtctggttttttaagggcaagcggacctcgtgaccaagcctctctgagagtggaagcgcaggaagggtccgggctggggcgtcaaggccaggcctggcggcaaggggtgggtgcggctcgggggccgcgcgctcaggccgcgggggtcgcg

SEQ ID NO: 1408 - DNA, 1400 bp, Homo sapiens
  misc_feature (1)..(1400): DMR8:142938801
gctgccctgggagagagcaccgggatgcagttccctcctgaccaggccccgcctcttccaggaggccgccccgggctgctttgcagctgcaggagtcggtggtccagcctggattcgggtgcgggaggcttgacacaaaggtgggcagctgttcctgggggcctgtgggcgcccctgaggctgcggggctggtgcttgttctcccagaaggccccggggtcagggactcccagtgtcctctccacaaatcacttctcagcatggcggctcctggacccctgggtcccagcacccgctgtgtgctccaggtcagccacagtgaccaaggggagagtcacacagtctggaaagggaggcgaagatgcttcgcctggcggctgaggcgggacacagcaagtccccggactcttcctgcaggctccccacaaggatgtccccagggcctggcctcccaggaggccagcaggggcaggggctccagaggagcgggtggcggggtctgcagtcggggcaggccaggaggcgccggcgggccgttgagctttgcttcgctgggagggtgctgtccttgcccccacgggtggggctggcagtcaagttccacccaggaaaacaaggatgagtcaccagaaggacccagtttgccacagtgacagcccccaggcaggtgaggcctatcctgagcacacgtggctttcagcgtttcccttcgcccaccctggatgcttctgaggcctttcaccccaggggcacatccttccgccttcatttcacgcaaacacctttggctggacggtgagctcacgcaggaggctataagcgcagtgggcgggacaggaccagcgtgctcctccacccgactgtgctcctccatcccacatcccaccatccggaccactgtgctcctccacccacctgtgctcctccaccccacatcccaccatccggaccagcgtgctcctccacccacctgtgctcctccaccccacatcccaccatccggaccagcgtgctcctccacccacctgtgctcctccaccccacatcccaccatccggaccactgtgctcctccaccccacaccccaccatccggaccagcgtgctcctccacccgactgtgctcctccaccttacaccccaccattcggcccatggaagagcaagcacaggccctggacaggcacagtcgggcagcgctgtcctggagagagacgcatgtccccgtgccctgtccaggcttggtccttgctggaccttgtggacgtgataggctgggactgaggggaggaagcgtgaggcagaggccaacgcccccccagccaggcttcccccgcctcccttgaagcctgtggcaactgaatgttatcaggacccagagggatcaaagagttcagtgga

SEQ ID NO: 1409 - DNA, 1100 bp, Homo sapiens
  misc_feature (1)..(1100): DMR8:142968301
ttgattagagctgacgggaagggggtaggctgtttatggtaactaggggcaaggaagaaccagaaagttgagtttgagaacaaaggataaggaagttaacaggctaaaccctttaaagagaaactcagaaaaatttattgtatcttgtatcattaacttctactctttaatttccattctattattttttgtactttcctgtttcttctgtaacttcttgaggtgcatacttagttcattaaaattcgacatttttggttttctaatatatgaggtctacacggttccctctacgtgtgcccgagacgcaccctgtgaactttgacatagagcccgtttctcatcgtttagtttgttttctgattttccttttaatttttgaagggggtctgcccctccacacctgtgggtatttctcgtcaggtggagacaagagactgagaaaagaaataagacagagagacaatgtatagagaaggaacagtgggcccaggggaccggcacactcagcatgcgaggacctgcaccggcgctggtctctgagttcctttagtatttattgattactattttatttttactatctcggcacagagagtgtggcaagagaacagagtgatggtggggagaaggtcagcaggaaaacatatgagcaaaggaatctgcgtcataaataagttcaagggaaggtactgtgcccggatgtgcacataggctagatttatgtttctctttacccaaacatctcagtgcagcaaagagtaacagagcagtatcaccaccagcatatctcgcctccagccgtagggtggttttctcctatctcagaatagaatgaatggtcggctttacaccgagacatttcattcccagggacatgcaggaaacagaggccttcctcttatctccaccgcaaagaggctttcctcttttactaatcctcctcagcacagacccctgtgggtgtcaggctgggggacggtcaggtctttcccttcccacgaggccacatctcaggctgtctcagtggggggaaaccttggacaatacccaggctttctcggccagaggtccctggggctttccacagtgcattgtgt

SEQ ID NO: 1410 - DNA, 1300 bp, Homo sapiens
  misc_feature (1)..(1300): DMR8:143468501
cgcctgccggatgatggccaggctgcgctgcactgcccggctgcagacggggagagaggtgcgtgagcctgagggcgagcagggagcccacccactgcccagcccaaaggcattacctggccagggaacggctacagctgcctgcaggatccagccggcctgtgggggagagaggcacgggtcatagcaggccacagcctggcccgcacgccctttccctgctgacccccttagtcgaggccctcaggggtcccaacactcagctcaggcacagcctcccctccaggaaactgcccagagctcccctccccacagtggttcagatgccctgggccctgccaggcccctctggggacacagcacctgagagtggggagctgctgggccctgtgtctagctcctctccagggcagggtccgggcagggctcctgtccctgccctcagagccagcaaagccaggcagcacccgcggagggcttggccacgtgggctggagacgcccgcctgtccctgctgcctccctggccaggctccccagggccacgctttgctggctggaacccccctgctggcttcctcatgtccctgggtgcccaccctgggccaaggcagtgactggcctatggacactgctcctggctctctcctcagccctggccacccaggaagctgccctgtaaacagaacagctgctaacagcagcacctccctctgccagggcctgggctggcaggacccgcggggtcacttagaccagggggtgaatatggcccatggggcacacatggtctggccttttgggagcaagaatggcttctgacttttagagggctataaaactaaagacatgcagcagagaaggtgtgggggcaaagcccgcttggcggaggcatctgcccagctgcccactgcagctgtggaggtctgggggaagggcacctgtccctgaagccctgggctggcgctggcagatcctggctagtgtctgttactctaaattttagaggtgcctcatcagatgctcctcaaaaccccaagcataagcaccacccccgcctttctgaaaccgcacaccacggcctgggagggcggcctgggagtgcggtggtggcaggaaggaaatggaccttggggctggacatggccgagtgctgccaggcctgagagccaaggggatgaggcggggagggggtgccatctggaggaggagggtctgctccggtgacacagccctgcctgccttttacagacagaggtcacccaggatcacggggtgggcagggcaggaccagcctgctg

SEQ ID NO: 1411 - DNA, 400 bp, Homo sapiens
  misc_feature (1)..(400): DMR8:144064301
agccacagcctccaggcctggccatgccaggacatagttttaggcaaccaggtgtggtatgtcggcagtcacggttggcacagcttctgaagggatcaggaagggtgggtgcgtggctgccctgcaggatggggcccagcaacagcaggagctggacagcagcaaccagggcaggccagggctacaggggcagagccagccgagagcacgctaggacagcatgggagggggctgcaggccaagggatgcaccaggcagtgctagagccaccacaagggaggctgggcctgtttctgggggcacagggccttggcattgtcacatggaggttgcagcgagcaggcaggtgccctggaagaggcaccacatctgggccataacctcaaggaaggggatgggc

SEQ ID NO: 1412 - DNA, 300 bp, Homo sapiens
  misc_feature (1)..(300): DMR8:144307701
gcacgagaatcgcttgaactgggatgcagaggctgcagtgagccatgttggtgctggtgcactccagcctgagcaagaccttgtctcagaaaaaaaaaaagttcacaaagcccactgttcttactaagattcagctgtttttcttgaataaatgctccccgtgctactgtaattctttggttaactttcagagttctggaaagttggcttggcgcttttcgccgtctctctcctgctgccttggggtcctttccgtgaccgtttccctccctgacacgtgtacatccctgtgtatttcac

SEQ ID NO: 1413 - DNA, 200 bp, Homo sapiens
  misc_feature (1)..(200): DMR8:144492101
ggcaggtggtgtgggggcactgggccagcccgtcactgccggggctcccgtgctgaccgcccagatgccacccgctgcactgtggcactcgggctttcaccctgcgatgtgcggccagagggcaggcaggctcacttccctctggctccccagcactgtgagtccctctagctgacctgctctgggggttttagtagggt

SEQ ID NO: 1414 - DNA, 400 bp, Homo sapiens
  misc_feature (1)..(400): DMR9:58401
tttgggccacttccatcacggaagatgcagcactttgtccttactagaatacacacaaagaagaggagatatgaagacagatgcaaagattggagtgatgcagccacacccgggaagccaaggaatgtattctgctgccagaagctggaagaggcagggagcagattctccctagagcatctacagagtctggccacgctgataccttgattttgacttctggcctccggaactgtgagagaataaatttctgtgattttaaaccaccaaatatgtggtaatttgttatgggagtcctaggaaatgaatacaaagtttgtaatgtaatacaaagtttgtatgagcttcacaaggctgctataacaaattgccataaacttggtggctaaaagtgattaaa

SEQ ID NO: 1415 - DNA, 2700 bp, Homo sapiens
  misc_feature (1)..(2700): DMR9:96501
aaataatacagcaggtggtgaggggtgctataaagaaggatgagcagggtaagtgggtgagaaaatgtgctactttgtcctctagaggccagggaaagcctctctgtttaggtgatatttgacagagatttgaagacactgaaggagtgagccatttggatctctagggaaagagcattcttccccagacagagaacagcaagtgcaaaggccatgatgaagaagggagcttggccagagtgagggacacaaacggcagcctacggtgcatgcacgtcttaagagatgaggttcctggtgccctttgactgcctcagagatcccgtgctcacaagacacagccccaatcattctaaaatacatctatgctatagaaacttgtcccaaaatatcctttcacaatgatttaccttctggtatcccacccatgaaagcagaaatttcctgctttctcctaataattactaataattctcctaataattactaatctgtctcctcccccaaaatgtaaggccaagaagagcagggacttggcctattcattcactgctctatgttcggctcctagttcagtgctaaaaaacaagtgggccctcaataaatatttttgtgaatttatttatttatttattttattttttgagacggaatctctctcttccgcccaggctggagtgcagtggtgcgatcttggctcgctgcaccctccgtctcctgggttcaagggatttctggctaatttttgtatttttagtagaaacagggtttcaccatgttggccaggctggtctcgaactcctgacctcaaatgatccgtccaccttggcctcccaaaatgcggggattacaggcgtgagccaccgcacttggccagccctcaataaatatttattttctaggtgaaatggggaatctaactatgctacatggtaatgaggcagctgactttcttggaagcagaagacctaattctagatgtggtgacataaaagcaataaaggaaggacctctataaatcactcgtggagctgagcctcagctctcaaagtgttggattagaactagggatggcaaaatcctgttacaggcacaacaactcaccccctcccttccatgcccactagactctctaatgaagcgtggctgtctctctctggaaaaaactacggaattcttcccacccagtgctcctagcagccacaaccaaagggtcagaggtgacccttacaatgaacccaatttgccatccctcaattagatgtttaagattcctttccactttaacatcctgtggtgcaaatctaagcaagcctgcttgtttggccacatggaggtacatgttcctgcaaaatcaaccccaagaaatcctattgctcacaggtaagcaggtaacccctgcttccatagcagaggcagtcactagtagtacttgcttcaattgggacaaatatttttcacccggaaactaattcaaggctacctttttcagactctttcgaaggctgctagaattggtcccttgagtaagctgagtgttgtggtgcccctcagttcccatgccatagaagctcgaacctcattcattaatacactagccctaaggcttgaaaccggtctggcctggcttggagtctttagatcactctctagcttctggccaataagaatgagcttctaggccaggcatggcagctcacgcctgtaatcccagcactttgggaggccgaggcaagtggatcacttgcatccaggagttcaagaccagtctaggcaacatagtgaaaccccatctctacaaaaaaatacaaaaaattaactgggcgtggtggcacgggcctgtagtctcaactattcaggaggctgaagtgggaggatcgcttgtgtggggaggtcaaggctgcaataagctgtgatgacaccactgtactccagcctgcatgacagactaaggctggagtgcagtctccaaaaacaaaacaaaacaaaaccaaaaacctgcagcctgcaccactcctactggtaggcttgctctgatagcagcacttcaagcaggtgataacagtatgaggtttatttttaattgctaggtgtggtggttgtatttcctcagagtaaaaatgcacttccttcctccctttgaagtgagatgtggacctgtgatttgatctggccaaggaagtgtgaccgaaaatgacctggacacttccaatgggagctttaaaagccagtgcacaatttatcactgatcctttttctgcttcagtcatcgtagaagcccaggtcaggatggaactcccaccagcctggattgctgattaaggatgctccatgttagagcaaaaatataagttgttttaaaccacagaaatttggagacataactagtctctattgactgatactccatggtgtaagattactcatgggatttttctagctcagagtttctcaattttggtaggattgacgtttggggttagttattgctttcttgtggggaccatcctgtgcattgcaggatgttaagtggcctccgtagcctttacccactagacaccagcagcaccccatcccaagttgtgaccatcaaaaatccctcaacagtatgattccacttatttgaggtacctagagtagtcaaaatcgtggagacagaaagtcaaatgatggttgtcaggggctgggagaagagggaaa

SEQ ID NO: 1416 - DNA, 900 bp, Homo sapiens
  misc_feature (1)..(900): DMR9:1682001
aaactgttggaaaaagaaatagatgtggttgagggaaaaaggtgaaataataattcctgtggtagatgaattgaaaaagataaaaatataatgattttcgctttcaagcttggtgactaggtgagtagcaggaatatttccagcagcaagtgccaaaaaattcaacgaacggttatttaagccataacagaatttgttattttcttaatgggaaacatggaatgagatggttttggaagataaagcttctttttggaatcagtgttttcatcatgatccagaaggccttattcatgtttgaagctatgttttgggtgcatactgattaagaatcgtatatctacctggtagactgacttccatattattatgacatgctactctctattgttattcttgccttagttctatatttattcttgccttagagaataattgtgaaatattagtgcagttacattggctttctttttctcttgctagagtttgcatgatatatgcttttattttgaatttttctgtgtatttacaatcaagacatttctagtaagcatcatataactgggtttcattattttatccaggtgataacatttatattttacatagattagttaatttaaaggtaatttcagacatatttaagatttttctctacaatcttacgatttttttctttttgatcctcctgctttatgttattgtcttttgttgatttcttttagaataatcaaatattttaagcatttaatttctcccttcaagatgggtagttatatattcttttccaattttgggggaaggttacaatagagattacatttaccactgaccgactatagtctaaaacaaattattaccacttctttttgttatttaacatttactatttatagcctt

SEQ ID NO: 1417 - DNA, 300 bp, Homo sapiens
  misc_feature (1)..(300): DMR9:3786601
ataaagacatacctgagactgggtaatttataaaggaaagaggtttaattggctcacagttcagcatggctggggaggcctcaggaaacttcttatggtggaaggggaagaaaacatgtccttttcacatggtggcaggaaggagaagaatgagagccaaatgaagggggaagccccttataaaaccatcagatctcatgagaacttactatcacaaggctagcatggggaaactgcccccatgtctcatttaccgcccaccaggtccctcctaccacacgtggagattatgggaactac

SEQ ID NO: 1418 - DNA, 1000 bp, Homo sapiens
  misc_feature (1)..(1000): DMR9:4945101
tgaatgacagtcttatccatggagtcaccgttgtcaaacgttacaaaggcaaagccccttttcttgccaatgcctcggtcagtcatgatttcaatcacttcaattttttccatactgttcaaaatgatcccttaggtgatgttcttcagtgtcttctttaatgccaccaacaaatatatttttcacagttaactgggcacctggtctttgagaattttctcttgagacaactctctttgcttctacaactcttttttttttttttttttttttttttttttttgagatggagtcttgctctgtcgcccaggctggagtgcagtggtgccatctcagctcactgcaagctccgcctctcgggttcatgccattctcctgcctcagcctcctgtgtggctgggactacaggcgcctgccaccacatctggctaagtttttgtatttttagtagagacgggtttcaccgtgttagccaggatggtctcgatctcctgacctcgtgatccgcctgccttagccccccaaagtgctgggattataggcgtgaggttctacaactcttccatctaccttgtgtggccttgcattcatggctgcatccacctcctccacagtggcacacatgacaaacccacaggccctggagcgcttggtgtttggatctctcattaccacacagtccgtgagcgttccccattgctcaaaatggctcctcaggctctcattggttgtttcaaagctcaaccctccaatgaagagcttccttagctgtttgggctctttaggagactcttgacttagacatgactgacagggagaagagagactttaaccatgcttccttggtggcctccacgggcaggtaggtttgttttgttttgttttgttttgttttgttttggtaaatagttttcccaccattttattataagcattatcaaatatactgaataattgaaataatcagaaacaacaaatttgcatatatccaccatctttt

SEQ ID NO: 1419 - DNA, 600 bp, Homo sapiens
  misc_feature (1)..(600): DMR9:6153401
gtttaggagaagggagaggggctcctcatagtgaagttgtcctttttcattggagggtacaacacaaagattggctgcaaagtatgacatacagggcaacatacaggttaaaattctatgcacaagacaatcagtgaaacttcatgattcagaaacaaatcaccaaaacattatgattcagaaacaaatcagcagcctttttgatgtcagtaggttataaattaatcattatacgtcaataatttgagaaactcagataagattctttactcatgaacaggatgttgccatgaatcacaagactgccccaagataggttaatttaagaagccctgtttacttttaaagtaaactgccaaatatgaactgtaggttatcaccccacattttattttctacttttttttttttttttgagatcgcatcttgcgctgttgcccaggctggagtgcagtggtgcaatctcggctcactgcaacctctgtctcctgggttcaagagattctcatgcctctgcctccccagtagttgagattacaggtgcccgtcaccatgcccagctaatttttgtatttttagtagagacagggtttcaccttg

SEQ ID NO: 1420 - DNA, 500 bp, Homo sapiens
  misc_feature (1)..(500): DMR9:7260501
aagaaagaatttaaatggcatccctgtgtgttactctcatttcaaatcctctggagcagataaacattatcatgaaactggccaaggatgaaatttaaataagtagtgattggaaacgatgacagtaagagtttccaacccacaaaaacagacaaattagtttaattaactgcaaaatttggaggacaaagatacggggaaaattatttatgtcgatgtgtaatgcatgctcaatatttttgtaaacaaacgtgttaggaaaaagaaatcctaccagtataattaatccttaaaaatgtaccaccaaagagcgacttggagccaagaacatgtttttgtccttgtaagttactgtccctttaaatggcaatacaaatggaagacctgtcctcaccaaagagggtcttcctctgttgtgccatcacactacactgccagactgtgattcaaccatcgtgtgtattcgtttggggatcatgatggtttctcatgtggttgaa

SEQ ID NO: 1421 - DNA, 3300 bp, Homo sapiens
  misc_feature (1)..(3300): DMR9:8119901
gagttatgtttagcatagactactgttaaaatgcatttgccttctctgagcatatataagctgtcaggtggccagctttcccatgtttgtgcctgtgttcagtctactccttttgcttcacatactgtactcactgcttcctccactcccatcttattctttcttagagatctagcttcaagtcccatatcttctacaagtctatctgactctcacagactttgatatttccccaatcaacatttatttaacactacttaccactcatttggtttctaatattttctaccttacattgctatctgccatttacaaatgtatcccagatgttaggaaggatctcttggtagttttagatataagtagcattaatttaaaacctaaccatttaaacacctagtgaaaattcaaagccctcccagaaagttcctcaaagttctctaggggcttacatttaatatggtcacctctgactataggtttataccccttttgaaatgtttcaggttgtagatcatcttactgcccgagagtgatatacctgttttggatacacctaaatataaaactcaccccttctccattcccagagcccccctccctcatgggaagcattcacaatacagcagccattgctgaagaattgaggataccatagagggcttctgcttcacagccacacaaacaacttcaaattgagtatggatgatcctagttccatcgcttctctcacctacagggtctttttattggttatatcatgcctcagccttatatcatttgtttggtatctttggtctcctgtcactctttctcccattcttttcaaaaaacagaacaaactttctcttattttctcatgcagagtacctaagccatttcttttgtcatttggctcatagatatttatgccaccagagtctcaccttacatcccaaagtatcaagattctttccccaaaagatggtttcttctcaagggtaatttcatatcagctgttgagatggcattcttccaccactgcatgtgtgctgtccctatacaattatattttcagcttttcgaagctggatcacttctcattcttatattcttaatgctcagtacaatttagggtctattaaggctgactaatgatggtgatgactactgtatgcaaagccctatgcttggcactgtggggagcacagaagtcaatgtggtatggattctcacctcaggaagttcatggtctaatataagagttgagaatttaggcatgatgatgatgatgatactgatggcaactaacattagggtagaggagatgggatatgaaccacgtgctgttaagttgtgaggaatcaaaagttgtcttggctaaatcgtccattacatgaatatttatacattgataattaggagaaaattatacttggtcgtagatatatatgaattgtcttgaacgttgaagatttcacataatgaacaaatgctaagcaattgattattttcttctttaaagtttatcatagagtttgattaataggcacaaataaacagacaaagaaaaagacctagtgttctatagatcagtggtgtagctacagttgacagtaatttagtgtacatttcaaaatagctagaagagaataattcgaatgctcctagcataaagaaaagataattatttaaagtgatggatatgccaattaccctcatttgatttttagatatgaatgtatcaaaatatcacatgtactgtaaaaatttgtacatctattttgtatcaactgaatacccaagaaattacatttatgtcaatatttttatattgacttaattaacattttttaaatatttgaaattcagaaagacacctaaagagtaatatgaccaactcctaagtatcactctacttaataaataaaacattaatgacacatttgaagggtcttggtgcctttccctcatcctattatccttcctccctatcagagataactaatctataatactttaattttctatttgcactttcccagatcatactctgataaaaacttcttccacagtcctacttcaagacagacatgtgattacaaattttcagagcctttatttaacttccattacccaggacaagatgagatcctagttgtctttcttttccattgggcagattttttactagtccaccttttaactgaggatgtaacccttcatgggttctggctttccaatgagttatcagttccaactcccgccatatgtgggctgaaagcctgccttatctcctagaatagatgaggccatgaaaacataaactccacagttactcaccctccccaacctcagctccctttctccctacacaggtagacagaagcttctctgtagtttatatttctgatttccagtttcctttcaacttctggtctctggaagtttcctttcttaattataaatttaaaagtatgtattctatttttattcagagtttttagtctttcttattgtcagaaatgtaagtgtccctgtcgatatttccagttcaatggtccaccctatgattcccaagacaaacaagcttgtttggtactctggccctatcattcaccaagctgcagccgtttgccttctacacatttctcagttgtacccagcactttgctgttctatctgggacactagttcccaaatacttccttcttatcatagtttaggtctcagctcaaatgttttctcattagagaggcccttgctgatcactctatccaaagtgatctatcagtgagttatccctagttgcttcctattgcatcagcttattttattgtttttgcaatacattatttgaaattatcttcccaatttttctgattacttgttgaatattatttccacctttcatagtaaggggtctttgagaccaggaaccttgatgatctgatttactatggtattatatatgcctggaacagtaatcagcacagagctgtctttcaagacatagttattatctttgatatactaatttcaatataggtaagacacaaaaaactagccatgaatgattttatatctatttctgtgtttcttaacatctttctagaagatggaattttggaataattataaattgacaagtaaccagcaccatagcaaacaaatacaatccaactgaataaatgagtagaatcgtcagcttaagcaggttaaaaggactgctaccttatactattccacagtggttaatctgcctgattcagtctttctcaagaaattaatttggaacaattctagatcatcaagtcctga

SEQ ID NO: 1422 - DNA, 1200 bp, Homo sapiens
  misc_feature (1)..(1200): DMR9:8643701
ttggggcagcactgagacaccagccccttgctgcctcagcacccccagactttaggtactgaccagggtggaagggaagccaagtggggagctgagggcaactcagggcctgcagatgccccttggcgtgagcagcctgggtgccacagttggtggcaggaggcagacaggctcctgggcagaaggggatggatccggtgaggtcccaccttcaggccagggagggcctgaagtctgagtgctgggctgtcagccccacagaccatagtgggaactggtggtgccttttctgggaccgcccatggctgtccatggaccagctggcatgcacttcatcccctctgaggcccataaaagttccaggctcagccaaagcaaagcagatgggacaaccagctgcaaaaaggcacgactctctctgttgttagctgaacacctgctgggatgaccagctgcagagaggagctaccctctctgatgagaactgaggacttgcttaacagagaggagctaccctctctgctgggaggtgaacactccggacgacctgcctaacagagaggagctaccctctctgacaggagctgaacattcatcaggacaccctgagacggagagaagatgcccactatgggtctcctctgagctttcctattgctcaataaagctcttcttcgtcttgctcatcctccacttgtctgcatacctcattcttcctggtcacaggacaagaactcaggaccagccaactggcaaggctaaaagagctgtaacacaaacagggctgaaacatgccccttgctcaccacgttgcagatgaagagaaggagagaagggctgtggccctttgaggaccccagacctgggagctccccaagccagggctgtgactcactctttggggcctagtggttcctgttgtttccaagtttccaggtgccactgcattcaccagtgccagccagggaagctgctgtggtgctcctggtccaaccgctgcctcacggagaactggcagccatactagcacccggaaccgcccaccccgtggcagcggccaacatgtctgactgtgcagtgaccaaaccccacgttcactcacacaccccttgccattccatgcctgactcgcagtctcccttgaagacatgggatccaggccggtagtgtgagctgagtgcagcctgccaggccaggtgg

SEQ ID NO: 1423 - DNA, 1100 bp, Homo sapiens
  misc_feature (1)..(1100): DMR9:8740201
agtggttgagtatataactggaaaatatccaagtagaaatagtgttaacgaatgttcctttaatattaaaggaaaaattatgttaaagatggcgtttcatacttcattgtatttctcactacttctggcagcaaagaactgccacattctatagacataaaggacaagcatacttctaaacatcctcatgaaataatttgtatagttgtatagtttttataaaatggccacattcgattaatattagcgagggatacgggaaacacattcttaaatgtatgcagggcaccaaaagctttaatgtcaattacggaaaatattactgagaaaaggggccattgaacaaggttattgaatttaataaaactatgaaaaacaaccacaaaccaagcacctctgaataaaatagtcaaacctaaaaatataagaaattatttgtatgaaacttgtaacacctcaaaattatactccacataatcagcacatcaaatcaaaaactccaaatttttctgttttgccctaaacatgtttttatgacaatcagttaggaaaaacaacaagaggtagtttaagagctattacatataaacacaaagtgataattcaatcatctcatttttggcttaggctatgacttaatatgaagaccccaggggactataagcacacaatgattctttgaagaaatcaactgaattttaagaatacccgaagagtaaaacaattcctatcaatatagacacttaaaagatcccttatatgcctaactctaatacacagagaaaaaaaagtcaatagctattattctgagctttttctatagtttatgattcactttccaaattattattgatgcatccctgtaagatatcaagtggctttacattggaagcacatataaatattagttattttcaaggatggcaaaatgacattattaactttgattgtttctttctcctttgggaagaaaaaaatgaggtatgccgtgagaaatgaacagatagaaaggaaaaaaaaacctcatctccctttgtatctattgttcccctacaaatagaactataattctgatttgaaaagaaggatagctttagaaa

SEQ ID NO: 1424 - DNA, 1000 bp, Homo sapiens
  misc_feature (1)..(1000): DMR9:10097701
tcctcttttcctaattgaatgccctttatttccttctcctgcctgattgccctggccagaacttccaacactatgttgaataggagtggtgagagagggcatccctgtgttgtgccagttttcaaagggaatgcttccagcttttgtccattcagtatgatattggctgtaggaacactttcacactgttggcgagactgcaaactagttcaaccattgtggaagtcggtgtagcgattcctcagggatctagaacttgaaataccatttgacccagccatcccattacggggtacatacccaaaggattataaatcatgctgctataaagacacatgcacacgtatgtttattgcggcactattcacaatagcaaagacttggaaccaatccaaatgtccaacaatgatagactggattaagaaaatgtggcatatatacaccatggaatactatggagccataaaaaatgatgagttcatgtcctttgtagggacatggatgaagctggaaaccgtcattctcagcaaactatcgcaaggacaaaaaaccaaacaccgcgtgttctcactcacaggtgggaattgaacaatgagaacacatggacacaggaaggggaacatcacacaccagggatggttgtggggttgggggaggggggagggatagcattaggagatatacctaatgctaaatgacgagttaatgtgtgcagcacaccaacatggcacatgtatacgtatgtaacaaacctgcacgttgtgcacatgtaccctaaaacttaaagtataataataataaaataaaataaaaataaaaataaaaaatgctacttctttcctacttgagcgcacactctcatatttcagtggaaagaggtagaggtatctttctgagccatatttttctcagactagcagagtaaaagagcagaacacagttttgtttttggagaaaaacattagttacttcaagtaactttcctacttcagtcagtttt

SEQ ID NO: 1425 - DNA, 300 bp, Homo sapiens
  misc_feature (1)..(300): DMR9:11076201
catgttggtatcatgctgtttgggttgatatagcactgaagtataattttgagtcaggtaatgtggtgcccccagcttcgctctttttgctcagaatgactttggttattctgggtctttgatggttccataaaatgatataatttttttttctatttccatgaaaatgtcattggtattttgaaagatattgcattgaatcggtagattgctttacatactagggatattttaacaacattgattctttcaatccataagcctggaaactttttctatttttttttttttttgccttct

SEQ ID NO: 1426 - DNA, 200 bp, Homo sapiens
  misc_feature (1)..(200): DMR9:13033401
tttccaaagccattaagaaagctatgcttgtttaaactctcagtgtaacctgaaatagtttgaaacaactgtttagaaaaagtggggaataaacgctatagagggaaagtaggaaataataacatagataaacaggcaataaacaagaaaatggcttttgtatcaaagacagacagaaaacatttttttcttgatggttc

SEQ ID NO: 1427 - DNA, 300 bp, Homo sapiens
  misc_feature (1)..(300): DMR9:14463501
atggtgatgttgttaatagcaaaggaaatctctaattcctcccctccttgcagagtggcatcgttaagtgaattttccccacattttattaaaatctgcattttctgggatgtaagatgctattcggatcatttacatgactgaagtcatttgattttctttttttttttttttttttttttgagacggagtctctgtcacccaggctggagtgcagtggcgcaatctcggctcaccgcaagctccgcctcccgggttcacgccattctcctgcctcagcctcccgagtagctgggacta

SEQ ID NO: 1428 - DNA, 100 bp, Homo sapiens
  misc_feature (1)..(100): DMR9:14466901
tttgcctgaaaacaagccaaggctggggttaggaaattaagatctagagtcccaaagattcaccattccaggaccacagctgaggcttcactgctatgct

SEQ ID NO: 1429 - DNA, 300 bp, Homo sapiens
  misc_feature (1)..(300): DMR9:14588401
aacccgggaggcggaggttgcagtgagccaagattgcgccactgcactccagcctgggcgacaagagcgaaactctgtctcaaaaaaaaaaaaaaaaaaagattaaaattaaacatgagcaaggcttaactatcagaataaatgttttgataaagaaaagtgactgaaaaacattacagaatctaagcaaaatgtcattaagggagccatcatccagtagcacaaatgggagttaacagggcacaattatttacaaaaacagctttatatctttgctccaatgggttgagattcctcaat

SEQ ID NO: 1430 - DNA, 200 bp, Homo sapiens
  misc_feature (1)..(200): DMR9:15527601
tccaggttgatctggcggttgatggcggcctctgagtcctggtggtagttctggcgcacctgcgaggtggacgcggtcgtcatggcagtgactaaggagaggcggcggcggcggctgctgcgcggcgctggagctgcggcgggggccttggggcagtcccagggcgcggtgaagaggtgacggagggctggctatgggcg

SEQ ID NO: 1431 - DNA, 200 bp, Homo sapiens
  misc_feature (1)..(200): DMR9:16344101
gcatagtttttgaaataatgaatgaatgaatgggtgggtgactgtgtgaatgaggatggttcccagaataaatcctcaagaaaatcttctttggaaagggtgaagtgtggagaagcccgtgacctgtgttagttacattataacagatatcaatgtttcccaccctattgagtgtcccagccttcaaatcaaatcagaaa

SEQ ID NO: 1432 - DNA, 100 bp, Homo sapiens
  misc_feature (1)..(100): DMR9:17116801
aaggccaataacactctatcaacttttctccctcttcctcttgctctcacgtagctacactcacctagctacattttctcccaaaacaccatcccagaaa

SEQ ID NO: 1433 - DNA, 300 bp, Homo sapiens
  misc_feature (1)..(300): DMR9:18830301
agctcctatatctcctctcctcttgctaaccattccccagtactcctccatgatcccctgccacctaaactagagcaataatcaactttcgaggagaaagtcaaatatcagcaccctccaaaaggaagactatactatttagaccagctttctgtagatatagcctaaagccaacccagatagactcctcaaggcaagtgctgaactaatttcactaagtacaacctccctgtcatctagtgttggaaaccttcaccaagttatttcccacatgggtagtgccctctggtagcaaggagt

SEQ ID NO: 1434 - DNA, 100 bp, Homo sapiens
  misc_feature (1)..(100): DMR9:19226101
gcacgatcttggctcattgcaacctccgccttccaggctcaagtgatcctcacacctcagccttccgagtagctgggactaccggcatgcactaccacac

SEQ ID NO: 1435 - DNA, 1100 bp, Homo sapiens
  misc_feature (1)..(1100): DMR9:28333101
acatccacaggaaacatcacactagaagctttctaacaagttgtgagtcacacaaaaagaagaacaattaagttaggcaaacatcgtgcccatgtctttgtgttttaacaattgaaggcagatacttacatttgggaacacagttgattaaacaggaagaacacttgattcaataaaaaatatctacagttgctgtaaagcttctttaaaagaaagagacctttcagtgtaagggtaatgtaggtcaactagtaattgtctaaggacacatcagacatttttaaaggacagatttgtataaggttaatctaggtgggaggctaaggtacattcaaatgtaaatacaaagatatttaggacaactgcatggcaaagtcaagccacaatggtaacttgatggagctgataagggaagatacatttttcttcttcttctaatccagtgataactacttagttttcaaaatacctcaaatgaaaaatgtacattgttattcaggaaattaaaccaaattgaaaaccagtcaatcctcaagtgtgcatattaaagctgtgacgtactcttaagatatttttaatgaactttcaaaatataatcacgtcagggccgtgccatatcctctgatttatgcatacacagttctttaaaagtcatacaactactatgtaagatattcgaacggggtatcatcattgctccaaatgacttaaaaactgtacatgagcagacattctctcagtgcattaaatctaacattatattcatttgaaaagcgcaaaggaaatgaaaatattgcttacaaatgaccttattatacttttgtcagtctgctgtttcataaaagaaagggaaccatgatactggggcacagtaacattagcaaaattatcaagaatttatctaacgctgatttatatttcagatttgaaaattagattacaggcttccccttgtgctgcagtttgcttctttgtaaaagcaggagctgtttctgctctgaagccttctctgaacatagagtagcttccctggtgggtgaatgttgtggacacatacatgttacctactgtaagaaatttaatgaaatataagaaagaag

SEQ ID NO: 1436 - DNA, 3400 bp, Homo sapiens
  misc_feature (1)..(3400): DMR9:29449901
atcttagattttcctgccaaccatacccacagcatttagtatcatccttcccccaggtaactaagctctaatcccaaagcctgatttctgtatccagatgggctaagctctttgctgcttcagtgactttgtactaactcacttttcccttggcccttcacatggctgaatccgttttttctgtcagctctcagttcaagtatcactttctaaggactgcttattaccgaactttctctgtaaattccacactttcttctgcccttgttgctttctatcacattatcacgatagttttttaatagcacttgccataatcagaaattatgtattaatttttgttctaaatattgcatatacatttttgtctagaatgaaagatctatgatgaaaagggatgtatggtttacattagcaaacacggcaaataatacaacatctctaagcctcagtttcctaagatataaaatacggattataagacataccttagaggaggagccaagatggccgaataggaacagctccggtctacagctctcagcgtgagcgacgcagaagaccggtgatttctgcatttccatctgaggtaccgggttcatctcactagggagtgccagacagtgggcgcgggtcagtgggtgcagcgcactgtgcgggagccgaagcagggtgaggcattgcctcactcgggaagtgcaaggggtcagggagttccctttcctagtcaaagaaaggggtgacggagggtacctggaaaatcgggccactcccacgcgaatactgcgcttttccgacgggcttaaaaaacggcgcatcaggagattatatcctacacgtggctctgagggtcctacacccaccgagtctcgctgactgctagcacagcagtctgagatcaaactgcaaggcggcagcgaggctgggggaggggcgcctgccattgcccaggcttgcttaggtaaacaaagcagccgggaagctcgaactgggtggagcccaccacagctcaaggaggcctgctggcctctgcaggctccacctctgggggcaaggcacagacaaacaaaagacagcagtaatctctgcagacttaaatgtccctgtctgacagctttgaagagagcagtggttctcctagcacgcagctggagatctgagaacgggcagactgcctcctcaagtgggtccctgacccctgacccctgagcggcctaactgggaggcaccctccagtaggggcagactgacacctcacaggaccgggtactcctctgagacaaaacttccagaggaacgatcagacagcagcattcgcggttcacgaaacaccactgttctgcagacacccctgctgatacccaggcaaacagagtctggagtggacctctagcaaactccaacagacctgcagctgagggtcctgtctgttagaaggaaaactaacaaacagaaaggacatccacaccaaaaacctatctgtacatcaccatcatcaaagaccaaaagtagataaaaccacaaagatggggaaaaaaacagagcagaaaaactggaaactctaaaaagcagagcacctctcctcctccaaaggaacacagttcctcaccagcaatggaacaaagctggatggagaatgactttgacgagttgagagaagaaggcttcagacgatcaaactacgagctacaggaggaaattcaaaccaaaggcagagaagttaaaaactttgaaaaaaattcagatgaatgtataactagaataaccaatacagagaagtgcttaaaggagatgatggagctgaaagccaaggcttgagaactacgtgaagaatgcagaagactcaggagccgatgcgatcaactggaagaaagggtatcagtgatggaagatgaaatgaatgaaatgaagcgagaagggaagtttagagaaaaaagaataaaagaaatgaacaaagcctccaagaaatatgggactatgtaaaaagaccaaatctacgtctgattggtgtacctgaaagaatgcagaagcctcaggagccgatgcgatcaactggaagaaagggtatcagtgatggaagatgaaatgaatgaaatgaagcgagaagggaagtttagagaaaaaagaataaaaagaaatgaacaaagcctccaagaaatatgggactatgtaaaaagaccaaatctacgtctgattggtgtacctgaaagtgacggggagaatggaaccaagttggaaaacactctgcaggatattatccaggagaacttccccaatctagcaaggcaggccaacattcaaattcaggaaatacagagaacgccacaaagatactcctcaagaggagcaactccaagacacataattgttaggttcaccaaagttgaaatgaaggaaaaaatgttaagggcagccagagagaaaggttgggttacccacaaagggaagcccatcagactaacagcagatctctcggcagaaactctacaagccggaagagattaggggccaatattcaacattcttaaagaaaagaattttcaacccagaatttcatatccagccaaactaagcttcataagtgaagaagaaataaaatcctttacagacaagcaaatgctgagagattttgtcaccaccaggcctgccctacaagagctcctgaaggaagcactaaacatggaaaggaacaaccggtaccagctgctgcaacatcatgccaaaatgtaaagaccatcgagactaggtacaaactgcatcaactaacgagcaaaataaccagctaacatcataatgacaggttcaaattcacacataacaatattaacattaaatgtaaatggactaaatgctccaattaaaagacacagactggcaaattggataaagggtcaagacccatcagtgtgttgtattcaggaaacccatctcacatgcagacacacataggctcaaaataaaaggatggaggaagatccaccaagcaaatggaaaacaaaaaaaggcaggggttgcaatcctagtctctgataaaacagactttaaaccaacaaagatcaaaagagacaaagaaggccattacataatggtaaagggatcaattcaacaagaagagctaactatcctaaatatatatgcacccaatacaggagcacccagattcataaagcaagtcctgagtgacctacaaagagacttagactcccacacattaataatgggagactttaacaccccactgtcaacattagacagatcaacgagacagaaagtcaacaaggatacccaggaattgaactcagttctgcaccaagcagacctaatagacatctacagaactctccaccccaaatcaatggaatatacatttttttcagcaccacacctcacctattccaaa

SEQ ID NO: 1437 - DNA, 200 bp, Homo sapiens
  misc_feature (1)..(200): DMR9:29578001
cagtaacacagattttccagaattagttcagaaaagccagcaaacaaataacaatgactgcagaaaacagtaaaaacaaaccccaaggagggggagacgcatcataatcaaactgtcaaaagccaaaggcaaagacagaatattgaaagctgtaaaagagaagtaactcaggtacaaaacatcttcaatagctgattttt

SEQ ID NO: 1438 - DNA, 900 bp, Homo sapiens
  misc_feature (1)..(900): DMR9:30984701
tgtacccaacacaggagtgctcatagtcatgaagcttgcacttagagacttacaaagagacatacgctaccaaataataatagtgggagacttcaacactccactaagtatccaaaacagtgtggtactggtacaaaaacaggcacatagaacaatggaacagaatagagggcccagaaataaagctgcacatctacaactgtccgatcttcaacaaagatgacaaaaagaagccatggggaaaacactccctattcattacatgttctggggtaactggctagccatttgtgaaagattaaagctagaccccttccttataccttatgcaaaaatcaactcaagatggattaaaaacttaaatgtaaaacccaaacctatgaaaaccctagaatacaacctagacaatagcatcctgcacatagaaacaggcaacgatttcatgacaaaggcccctaaattaatctcagcaaaagcaaaaattgacaagtgggatctaattaaacttaagagattcttcacagtaaaaggacttaccaacagaataaacaacctacagattgggaaaaaaatctttttgcaaactatgtatatgacaaaggtttaatatccagtatctataaggaacttaaaaaaatttacaagagaaaaccaaccaaccccattaaaagtggacagaggacacgaacagatgcttcgcaaaagaagacatacatgtggccaaaaagcatatgaaaaatatttcaacatcactgataattagaaaaatgaaaatcaaaaccacaatgagataacacctcacactggcaagaatggctattattaaaagtaaaaaaattatagattctggcaaatctgtagagaagtgggaacacttatacactactggtgcaagtgtaa

SEQ ID NO: 1439 - DNA, 200 bp, Homo sapiens
  misc_feature (1)..(200): DMR9:32269601
caggagaattgcttgaaaccgggagtcggaggttgcagtgagccgagattgccactgcactccagcttggcgacagaacgagactccatctcacaaaaaaaaaaaaaaaaaaagtaagctaaggttaatttattatcaaagaaaaaatatttttataaattagagtagcctaagtgtacagtgtttataaagtctacagt

SEQ ID NO: 1440 - DNA, 1000 bp, Homo sapiens
  misc_feature (1)..(1000): DMR9:32447801
ttttccttctaacaagcagactcctctgctgcaggtctgctggagtttgctagaggcctacttcagaccctgtttgcctgggtatcaccagcggaagctgcagaacagcaacgattgctgcctcttccttcctctggaagctttgtcccagaggcggacccaccagctgccagccagagctctcctgtatgagatgtcttccagtcaggatacatgggggtcggggacccacttgaggaggcaatctggctttatcagagctcaaatgctgtgctgggaggaccactactctattcagagctgtcaagcagggacatttaagtgtgctgaagctgcacctacagccaccccttcccctaggtgctctgtcccagggagatgggggtgttatctataagtacctgactggggctgctgcctttttttcagagatgccctgcccagagaggaggaatctagagaggcagtaggccttgctgagctgcggtgggctccacccagtttaagactttgtttacactgtgagggtaaaaccacctactcaagcctcagcaatggccgatgcccctctgcccaccaagctcgagcatcccaggtcaacctcagactgctgtgctagcagcaagaatttcaagccagtggatcttagctttctgggctccttgtgggtgggacccaccaagccaggcactggagggaatctcctggtctgctggttgtgaaggccatgggaaaagcgcagtatctgggccagagtgcactgttcctcctggtacagtctctcatggcttcccttggctaggagaggaagtttcctgaccctttgtgcttcccaggtgaggtgacgccccaccccacttgagcgcatcctccatgggctgcacccactgtccaaccagtcccaatgagatgaaccgggtacctcagttggaaatgcagaaatcactcgccttctgtgtcagtctcactgggagctgcagactggagctgttcctattcg

SEQ ID NO: 1441 - DNA, 3100 bp, Homo sapiens
  misc_feature (1)..(3100): DMR9:33322201
gaaaaaaaaaaaaaaaagtctctagaaattgccctaagagcatacctcaaatgaagacatatttattcaacaaaatcttctaaaactctggtaaacaacagcaagagtctgtggcattgagccctagctagttccttcctcctcccctcagctcagcttgacagatctccactcaggataagtgtggacaagaagatggggcttcttctcccctcagctcccagtcaggtttaccatatctcactgggaaggccacattgtcaacatttctctacccctccaactccaagttgaagaggctgaaattctggtgagtgcagctgagcagttagggctccctttctccaccaagctcccacttacagaatggaggcttcatcccatttgcagcagaatactggagccctaatcgtcctcaccccagctcactcgtagggcagaggttccactgagagaagcaagccaagaaggcaagaggctactatcccacccagcacccagagtagtgcctcagagacctttcccagggcgagagacagttcataacaaaagagagctccgaggtactctccaaaggaactgactttatttgaaacagtgtggggaagtacaggcctaaggacactttagaaaatgataacataccttaaagaacagtaactaaactgtaggccatctagttcatcagagagaatcagggaaaggtagctaagaggagccctcttcaggtcagaacaaatctcaaagacttacagcaaagactattccttcccaaatttaattggatcagactgctgagcaattgatgccctggaacattgtcaaaaacaatagaactgcaattaatggatccttgagactgagcgtaatccaaataaggcacacagtttaacagagagatcgggaatcaagacaaagagagccctgcttgaaacgactgtcattccagggtcagtttgtacccctaaggttgtgccatccaaagagtgacaccagcggctacatactgtagggaaaatagacttcactgaaatagtctagccaagtcacaaaacaaataaataagcaaccacaacaaaaacaagctgtggagaggggaagcagtatccagagttgctatatagctaaaatgtctagtttccaagaaaaagtatgaaatgtgcaaagaaacagggaaaaaaacaggcaacagaaactgccttgtgagagtgaccagatgtcagatttcacaaagactgtaggataatcataataaatatgttcaaagaactgggccaggcatggtggctcacgcctgtaatcccagcactttgggaggctgaggcaggaggatcacgaggtcaggagttcaagaccagcctggccgacatggtgaaaccccatctctactaaaaatacaaaaattagctgggcatgttggtatgcgcctgtggtcccagctgctccggcggctgaggcaggagaatcccttgaacccaggaggcagaggttgcagtgagccgcgattgcgccactgcactacagcctgggcaacagagcaagacttcatctcaaaaaaaaaaacaaacaaaaaaaaacaaataaataaatatcttcaaagaattgaagggaaaccatacttaaagaggtaaagaaagatgtgaagatgatgtcttatcaaatagagaatattgataaagagatagaaactagttttaaaagaggcccaaatggaaattctgaagtttaaaagtaggataaccgaaatgcaaaattcattaggctgggtaccgtggcttatgcctgaatctcagtgctttgagagatggaggcaggagaattgcttaagcccaggagttcaagaccagcctgagcacgtagtgagaccctatctctacaaaaaattttaaaaacttaggccaggcacagtggctcatgcctgtaatcccagcactttgggaggctgaggcaggcagatcacttgggatcaggagtttgagatcagcctggccaacatggtgaaatctcgtctctactaaaaatataaaaattagctgggtgtggcggcacacgcctgtaatcctggctatttggaaggctaaggcaggagaatcgcttgaacccagtaggcggaggttgcagtgagccgagatcgcaccactgtactccagcctggacgagggagtaagactccatctcaaaaaaaataataataattaaatttagctgggcatggtggcacacacctgtgatcccagctactcaggaggctgaggtgggaagattgcttgagtccaagaggttgaggttgcagcaagccatgatcatgccactgcgcttcaggtgggcaagaaagcaagaccctttctcaaaggaagaagaaaacttcattaaaggggctcaatagtagatttgagctggcagaagaaacgatcagtgaacatgaaaatagattgaaagagatttggtcaggcacagtggctcatgcctgtaatcccagcattttgggaggctgaggcaggcgaatcacgaggtcaggagatcgagaccatcctggctaacatggtgaaaccccgtctctactatatacaaaaaaaaaattagccaggtgtggtggcgggcacctgtagtcccagctactcgggaggctgaggcaggagaatggtgtgaacctgggaggcggaggttgcagtgagctgagattgtgccactgcactccagcctgggcaacagagtgagattccatctcaaaaaaaaaaaaaaagaaagagattatataacccaacggacagagagaaaatataatgaagagaaatgaacaaagcctcagaaatgtgggacacctttaactgtatcagtgtacatgtaattggaatatgaggaggagagtagaaagaagtggaaaaatatttaatgaaataatagataaaaactttcaaatgtattgaaaaacactacacatccaggaaactcagtaaactccaggtaggaaagagatccacatctagacatataataaaaatgctaaaagttaatgataaggagaaagtcttgaaagcagcaagagaaaaatgacttatcacatacaagggaacctctgtaagcttaacagtggacttct

SEQ ID NO: 1442 - DNA, 900 bp, Homo sapiens
  misc_feature (1)..(900): DMR9:33755101
aaatctccattccggacgggcacgccaggtcatctgagggcaggtggttgcgggaatacattttgagaaacaccgaatgtcgggtagtttagcagaagtgcctttattttatttccgttagctttttgcctcactcctcttgaggatattactttattttttaattttctactttggtcaacataaatcaatgtatagccttagaagtcgttcattgtagaaggtttttattgagtttatactgagtatagaaccctagtggcaattactttcaatgctttgggttgtgtttttctgatattaccatatcctaaatagcatgcaaatacgggccatttcttcttctcttttccagttctgggtaacatctattgacatcctaccaagaaggatgacggtttgctcctttacacccccaccctccctctcaccttcacatccctttcttttaagttcccaatacggttatatcctaaatttttgatatgtcaatgtttggtgtgtatattattcccaactaaggcacatgacacaccatgatctttacattccccttcttgaccagtctttccccccaccccatggaatggggtgtaggaattgctacattttctttagttgtttgtttgagaactcatctccaagaactcatttcctggagccaaggaaactcatgggggccctctgagtgctactaattgcatggagctgttgagtggggaggaaaagccaggctgccatcaagaagcatttggggtaaattttctaagcacatctgaaaagacagagtctagaacctccacggtccctgtctgttgtgatttattttctcattctaaatacatacatacatacgcacttttttttctgtctaggccatctcttgtggaatacatatgt

SEQ ID NO: 1443 - DNA, 100 bp, Homo sapiens
  misc_feature (1)..(100): DMR9:33759001
tcctttgaaaacacacaggtggggcacttagcccagcctggagactcacagaggcttcctgcaggagataaggcctaaaaacagaaaccaagtaagagga

SEQ ID NO: 1444 - DNA, 1400 bp, Homo sapiens
  misc_feature (1)..(1400): DMR9:33875801
atcatgccagggctacaacacagggctactgattctagtaccttcccttcttcttttaaaatcattatattgttctgtgaatataactgaaatggtatgagatcttatattcatatgttaatagcaagttatatcttatttcataaaatttcaaaaagggaagaaatttcagtgacaagttggctgaagtaggagtattaaatatgtgtatgaggtaatacataggtaactataggtcaccatatacatgtgaaatagtatgtttaaatttttaataagggctgggcatggtgactcacacctgtaatcccagcactttgggaggccaaggcaggtggatcacctgaggtcaggagttcgagaccagcctgaccaacatggtgaaaccctgtctctactaaaaatacaaaaattagccaggtgtggtggcatgcgcctgtagctactcgagagactgaaacaggagaattgcttgaacccgggaggcggaggttgcagtgagccaagattgcgccaatgcactctagcctgggcgacagagcaagactccatctcaaaaataaataagtaaataaacagttaataaggttctgaaaaataagtaaagtaatagagatagagataaaattgtataattgctcagggaagcattacagcaggatattccccctgaatgttaacttcagctgaatagttgaggattgtaaactccgctgaaggagttcttagtacaatttaaatagccttaccagaagcacaccaaccaatgttacctcttctagtggtaatgtaagcatactttaggcatgatgctttaaaaaaatcaatcataaggccgggggcggtggctcacgcctgtaatcccagcactttgagaggccgaggtgggcggatcacgaggtcaggagatcgagaccatcctggctaacatggtgaaaccccgtctctactaaaaatacaaaaaatgtagccgggcatggtggagggcgcctctagtcccagctactcaggaggctgaggcaggagaatggcatgaactcgggaggcggagcttgcagtgagccgagatcgtgccactgcactccagcctgggcaatagcgagactccatctaaaaaacaaataaaataaataagagttcgagaccagcctgaccaacatggtgaaaccccaagtgtactaaaaataacaaaaattagccaggcatgttggcacatgcctgtaatcccagctactccagaggctgaggcaagagaacagcttgaatttgggaagtggaggttgcagtgagctggacaacagagcgaaactccatcttaaaaaaaaaaactacttctagaataaagtcaaaagggtcacattaaaactacttatgattgaatttttttttttttttttttg

SEQ ID NO: 1445 - DNA, 1400 bp, Homo sapiens
  misc_feature (1)..(1400): DMR9:34987301
aggcaccaatccccatttacaaaggagatgaggcatgagtgtggcgtgtaagctcacaaggtgcatagactccagaccacactgtcacagtccatgccacactgagcactacacacacgtgacacccaggacaatgggactgagggcgggaaccgaggactaggcaaacagtggagtctgtgccaccaacacctgaaggcacagttctgcaccctcaaaggtccgagcctacactttagcattagcaggggccaggtaaaggctggtgactaaactctctgcctccgtgttggcacaggcaaggctgggggaggcaaaagagacagaactggaataggaagaagtagagccacccacagcctgggccccacaggtgtggaggtggaagagtgagagcccccagatctgaggagccagcagcggtgcagggcccctcaccccaccttacccatctctgtgtcacacagagatgtccatccctcctccctcccctcccccttcctcactcctcctcaccccatctctgtgcctcatcctttcattactcaccccttctttcctcatccctcaccctgccttcctgcccctccccagcccttctttccttatcccccaccctgccttccctcccctccccagccctcctttcctctgccctccttactcccaccctatggctcatctgccccatgcccctcccctcctcatccccctcaccccatctcaccatcctctcaccaccccctctccctacctccccccctcaaccccatttcctcaaattcctcatgctcatttccccacattcatcacccatctctgctcccctcctggcccccaaccccacttcctttccatcctcctttcaccccaagtctctttcttccttcacacctcatgcccctttacccttgggagccccatagtgactcctggcatgaaggtaggtagtgaagaatctacagacatgactccaggaccctggcaccccccccccgccttgctctgctcttggcccaggtactcaagctgcagtttctagcaagacctcatgggtgtccaaactctgtctctggaaaataggaaagaaagaagtaaaggggagcttccggcctgacccttctatcatcatcaaccccccagcactcccctcccccacttcacccccaaattactccctccccacccccgctccctcgagcacagatgggcctgggagacagtgacgtgggcgccaggcaccgtgtctgctggagtggcggcttccgctggcgaccgcctccgcagccccgcctgctccctgcatcggggacactggggctgagatctaatgacttaatggggggtgggggagactagagattctgagggtgttaaggaaggggatcttggggagtgag

SEQ ID NO: 1446 - DNA, 1100 bp, Homo sapiens
  misc_feature (1)..(1100): DMR9:37637601
taaataaatggaatcatagagtatgtagcttttgagtctggcttctttcacttagcataagcatagactagaaaagttccagggccatcacttaatctctccaggcccaggattgctcatccgtaagacaggagctatatcatctgtcctttctgcctttcagaatgattgtgagggtaaaaggacatgctaggtgggaaggtgcattgagaagtgtaaagtgttacacaaggacaaatggttgcgcggatagtgagtgaaaaaagtgtgcaagagagaaaagagatcactgagtgttagcttttgaataacccacaacaacggtgggattttaattctgatttcaaaggaaaatggtgtatgctttctttctttctttctttctttctttctttctttctttctttctttctttctttctttctctctctttcttcctttctttctttcctttctttctttccttcttttcttttcttttcttttctttcgagacggagtcttgctctgtcgcccagcctggagtgcactggcgttatctcggctcgctgcaacctctgcctcctaggttcaagtgattcttctgcctcagcctcccgagtagctgggattacaggcatgggccaccacgcctggataatttttgtatttttagtagagacaggtttcaccatgttggccaggctggtctcgaactcctgacctcaggtgatctgcccgcttcggccttccaaagtgctgggaatacaggtgtgagccactgcgtctggcctggtttatggtttttaatgaaaggacttgcgttatgggtagtccatgtctctgtggcctggagagcagcctgacaatgccagggaggtggctgcccacctgtctgattataaaactctgcccacagattttcaggaactgatcccattttagtaaatctttgctgtattaaacaacttttgtttatgtatcatcccagagaggggggtcttatcttgggaccatggtgcagaaagtcgaggatgtctcctgcttgcaacctcatgggagatattttctaaatcctttactcttcaaagttgataagaaaaggaggccttttcaactgg

SEQ ID NO: 1447 - DNA, 1600 bp, Homo sapiens
  misc_feature (1)..(1600): DMR9:38815301
catgagccaccatgcccagccaataattactctttttgtattccagcacaaaagttgggatcatggataaacgacttgccccaactctggacaatggagcagtggcaacctgttaacacatattaattttgggtatttcttaaagttttctaccctcctgcttttcccgtgagaatgggtgtggttactcatttgcttacacaaatctcattcttgtatccagtttgataactggatactactgaagctgatcttcagtagtctcgggtggtcctagtgaaccagcttctccagacgcagctgttcgccttctgttcattcagcatccaaggtgagtcttcagcactgtctgatgctccagcagttcattctggcagtgctcttacgagagggatagcgggagcaggctggcggcacaggccagatacagtcagggtcagatgaccacctgatggggagggtcttcatccacagactgttctcattgtttgggggattcttcctccttttttattcctgtatttaatctggcttcagtcattaggtgtttctttcatagaggaattttcatcatataagggtaagatttgttttaagattcatgaaagtggcatatgtgctgaggtggcctaggcaatcagggtttttaggtcttattttcatagggacccagtaatcatcccccggccagggctggaaatccccaggccaggttacatcatactgctaagtgaaacatagtgtagaccccatgagatgtttgagtgggctttatggccatcattaatcttacaggcatgggatgtttcttattgtaccatacaacagctatccacacttctcatccacattcttgcagcaatctaatcttctcatacaacagtgaggtaagattaccactcagcctttgttgtgatgactgcccacctgctactttaagtttagctgtgtgtggtactatgattactcttcctttcaagaacagcattttctttcctttgggattaatgattgcttgtttggggggctatactttatttttatacattattactaatatttaaaccaaatttctcttaacctgggttttctctaaaaacagagcctagtacaaaggtatgtaggcattttattttatttgggaagtgactgtaggaaacagtaatgtgagggcctggagaacatgacagagagaaggaaaagccaattaaaaaatacatagggtcaggagatcaagaccatcctggccaacatggtgaagcccagtctttactaaaaatacaaaaattagccgggtgtagtggcaggtgactgtaatcccagctacttgggaggctgaggcaggagaattgcttgacccaggaggagaagattacagtgagccaagatcgtgccactgcactccagcctggcgacagagcaagactctgtctcaaaaaaaaaaaaaaaaaaattacataggggctcacctctgcagatagggctgaatactgctggaactgtttgaggaactacatgaaatgcatcctcttgatggctattgtcctccaacagaagcaggttgtttctttggagttaatgcctctccactcccaggtta

SEQ ID NO: 1448 - DNA, 1400 bp, Homo sapiens
  misc_feature (1)..(1400): DMR9:38818301
gtatacaaaatttgggtaatccgtaagtaactgatgttacaatctgttgtgctcattcagtacttttccctaagcccaatcacacattaaacaaacacagagttccttttagttcctgcctaagcactgagtttttataatgaaaggtgggaagatatgttctataagaaaaggttttttaaaaaaacagttttattgagatataattttacattccataatattcacccatttaaagtatgtaatttaatgttttttactatattcacagttttgtaaaaccattaccattattcaactttagaatacttctatttcccttaaaagaaaccccatgctcgttagcagtcacttgctattctcctctccttccccacttcaccaactcctcacctctctacccgaagtaaccactaatctacctgcttattctgggcatttaatagaattggaaccatgcaatatatggtcttttgtggctggcttcttttacttagtataatgctttcaaggttcatctatgttgtagcctatatcaatacttcatttctttttaagacagaataatctttcattgtatttatgtaccacattttacttatccattcatcaggataaatgggcattttggacattgggttgtttccacttctggctattaggaataatgctgctatgaacattcatgtgcacttttttttttttgagagagtcttgctctgtcgcccaggctggagtgcagtggcatgatctctgctcactgcaaacctctgcctcctgggttcaagtgattcttctgcctcagcctcccaaatagctgggactacaggcacgtgccaccatgcctggctaatttttgtatttttagtagagatggggtttcaccatattggccaggctgctctcacactcctgacctcatgatctgcctgtctcggcctcccaaagtgctaggattacaggcgtgagccaccgcgcctggcccatgtacacatttgtgtctgtgtgtgtgtgaacatgtttcacacctaatggtggaattattgaatcgtattgtaattctatgtttaattttttgaggaattgtcagttttccacaatggctgcatcatttcacatatttatcaacagtgtgtgagggtttaaatgtcttcaaatccttgccaaaagtttttactgtctgccttttcgattatagctgtctttgtagacgtgattttgatttgcatttccataatgaatagtgatgttgagccaattttcatatgtttgtggatatttgtacatcttctttggagagatgcctatttaaatcctttgcctatattgtatttggtttatttgccttgctactattgagagtggtatgattcctttatattctggatataagaccctta

SEQ ID NO: 1449 - DNA, 1500 bp, Homo sapiens
  misc_feature (1)..(1500): DMR9:39453001
ttttgatctatatggatacctcaagatcctttcctcattgttctccagtgtcatctatctaagatgtctatcaagtatatgttttttcttttctcttttttttttttttttttttgagatggggtcttgctctgtcgcccaggctggagtgcagtggtgcaatctcggctcaatgcaagctctgcctcctgggttcacgccattctcctgcctcagcttcccaagtagctgggactacaggcacctgccatcacgcctggctgatttttttgtattttcagtagagacgggtctccatctcctgaccttgtgatccacccaccttggcctcccaaagtgctgggattacaggcatgagccaccacgcctggcctcatgtttttttctttaactttctactctgtttcactaatttactaaatcatcccaccccccagctccatgctacttagctacacagcactttacataaagcctcaatatctggtagagcagcaaatcctcctgtatcactcgtttttatgaatgggattgtgtttggtatagcgttacctctttacagatgtatcctgacttgaatttattatataggtgtttcctctcttttttctttgatagagttagctgaagtttaattcattttatttttcttgtaagaaacattccatttctgttttccattttatttttaattttacttttaaattcttctgttttcactattgtatttttgatgctgttcttgcttaattaatgagactacgaacttccttctgtccactactttagctatacctgatggtttctaacttgcagttacaattatttcattacagaaatcaaatccaaaattgcattacacttttttgtatattgtttaaaagagatactaaaattttttcaagtggatttttttcattttattattaatttctagatttatcaaactaggttcagagaatactgtttgtgtttattctaatttgttagatttattgaggttttctctttagactaatagtatactctattttatcattattcaattaaaacatgaaagttttgttttttgcattagcatacatatacacaaatgtatggttcactttaatacaaatgtaatttatagcctctctaggcatatttatttaatgtccactgtacctactgtttaatcagatgagacattatgatgtcctaattctaatgagttttaagttcttagaactccattattttatgttttagaaacattgatattatattatttggtgcactcattcaaatccttaaaggttttcatttccctgtgctcttgaatgagagcttttcctactttaatgaatttcttgcctgaattcaaatctgaatgatatagaacatgaaacctacattattttatctttattgactcaacaactttactgatttttttttttttttaattttttgggactgagtctcgctcttttgcccaggccggagtgcagtggtgctatc

SEQ ID NO: 1450 - DNA, 800 bp, Homo sapiens
  misc_feature (1)..(800): DMR9:40570001
ttaagctgcaaggtataaactcaacatataaaaatcagttgcatttctgtatacaaataacctagctgatgaagcaatcaagaaaataatctcatttacgatagcatcaaagaaaaacaaaaacttaggaataaatttaaccaagaaggtgagagatgtgtacacttaaaaaccataaaacattgatgaaagaaatctagacatgaacaaatggaaagacatcctatgtttatggatcagaagaattaatattgttaaaatgttcacactacccaaagcaaatatacagatttaacacaatcctcatcaaagttctgatgacattcttcacagaacagaataaaacaatcctggccaggcacagtggctcacgcctgtaattccagcactttgggagactgcagcgggtggatcatgaggtcaggagttggagacgagcccggccaacatagtgaaaccctgtctctactaaaactacaaaaattggccgggcatagtggcatgtgcctgtagtcccagctacctgggaggctgaggcagaagaattgcttgaatccaggaggcagaggttttagtgagccgagattatgccactgcactccagcttgggtgacagagtgagacttcacctcaaaaaaaaaaaaaaaaaaaaaaaagaaaagaaaagaaaaaacaatcctgaaactcctatggaaccacaaaaaaccccaaacagccaacagataactgtgaaagaaaaagttggaggcatcacacctcttgatttaaaattgtattacaaagctatagtaatcaaaaca

SEQ ID NO: 1451 - DNA, 500 bp, Homo sapiens
  misc_feature (1)..(500): DMR9:40951901
agtgacctcatgggataagggactaccaggttgcctaaggaggggcgaaccggcatggattggagacaaagcagggcacaactcccagtttgaccagcagggggtcatgcctgtggacagccccgcagcagggagatcctgcctgtggacagccccgcagcagggaaatcgtgcctgtggacagcccctcagcagggggtcatgcctgtggacagccccgcagcagggggtcgtgcctgtggacagccccgcagcagtgggtcgtgcctgtggacagccctgcagcaggggtccgtgcctgtggacagctccgcagcagggggatcatgcctataaacagcctcgcagcaggggttcatgccggtggacagccccgcagcagggggtcgtgcctataaacagcccctgcactccggcctgggaaacacagtgagagcccatttattaaaaaaaaaagggggggtggggagagaacacaggtgtacaagtatctgagtaac

SEQ ID NO: 1452 - DNA, 2700 bp, Homo sapiens
  misc_feature (1)..(2700): DMR9:41024201
ccgatgttatattagtaacaaaggagtccactttcacaaatctctcctctgtcctctcatgccagtgcacaggtatatcaaagagcaattctttttgctcaggatgtttctcttatttcacttttgttgcttttggctgaactactaaacaggttataaaatgaacaaatgctcacaatatgcgcacaaatcacattatatgttttaatgggatgtgtgggcaatacaaagtcaaacccctattatcagaagtagtggtagggataaacatttcaggtctgttcgggggtttgaggcttttggccagcatacagagacacagatgtgttataaaagaaactctgtattttcccagaaagataatttttctaaagagatgggacttctagggtcctatatgtgttctatggaagcacctaacagagggaacaatgaattttcatgtgttttagaggatattaatcaaaaagtacggatcaaaaggcaataggggctgggcatggtggctcacgcctataatcccagcactttgagaggctgaggcaggaggattgcttgagtccaggagtttgagaccagcctaggcagcatagtgagaccttgtctctacaaaaaataaaaataaaaaattagccaggtagggtggtgcatgtctgtgttcccagctacttgggaggctgagatgggaggatcacttgagcctggaagttcattgtagtgagctgtgattgtgccactgccctccagcctaggcaacagacagaccccttccccaccccaaaaaaacgtaggtctattcctaggtcataactgaaaggctcaatatattaatacatatttttaaaaagctaaagaaaattaacaataattatttacaaagtaatctgaaaaactataaaatagagatatgtgaggttcacacagcagagtcctctggaagctctgagggactctgaaatgtgaatatacacagcaagaaagcacccctgcctcactagcatccacatgtggaagacggggcctgagcacagccactggccaacatttagtccttaatgtggaagcacgggagactactcatgagaatccactgcctatgcttcactctcttatccataaagccccatcgccatgacaataatagctaacttcattgaacgcatactgtggactggcactgctctaagcactatatatatatatatatatatatatatatatatatatatatatatatatatatataacctaatttaatcctcagtacgagaccccatgctatggtttgaatgtttatccccttcaaaatttctgttgaaacttcatccctagtgtggcagtatcgagaggtgggggctttaagaagggatttggtcatgaggactctgacctcatgaatggattaactcattcatggattagtggattaatgagttaccatgggagtgggtctggtggctttataagaggaggaagagagacctgagctagcatgctcagccccctcaccccctgtactaccttgggactctgcagagtcctcgacagtaagaaggctctcacctgttatgcccctggaccttggacttctcagcctccataactgtaagaaatgaattccttttcttcataaattaccaagtttcaggtattctgttataagaaaccaaaaatagactaagacaccctgagaagttaggtaaacagcccaagctcataaagtcagaaggcagaggagttagaattcaaccccaggtagtctgaatgcagaggccaataaaggtcagcgagttccatgtcccacttcatacatgagctcatttgagaacactggcagacataaatgcttgcttttcttaaactacattccctgtctctccctcccaccccaaaatataggtagtagaatctgtgtgacacaatctttatgaacaatgtcatcatgatttaaaaacactccccagctctatccttcagattcacgctgaagccacggacctccctgaatctagcagaacaccttacacagagaatattaacacattttgttggcagtgaagtttgctaaaggaaaagggaacatggaagggaagatgagctccatcaggaatatccagtaccatgcagtgtgcttggcacacaaaaggggctaaaaaaggttttttggaaaatggaaatgtgagaggtaggcaaggtggggaggaagggaagataagaaaagaaggaaggaaggagggagaagggaaggagaagcgaagggaaggagggaggaatagagatggagggaaaggggaagaaggaagaaaggaataaagaggagaggatgagaaagaaggacagatgactacttgagcatatgcaaaggtcagaggcaagaaccactgttccaatttgaataccactgtcagttattagtgagtctcagactatttgcaggggtaggaggaggtaagaagaaggtcctgaattccccctccagaactgcaccccaatggactcacctagatcatatccctttgccatcaattgggtcctaattactgcagttactctttctggaaggaaaaaagaaagatcttgctttggaggacaaacgtatccattcttagtcacttagtttgggaaggaatgaccctcctcctagctctacctaatgaggggaaggaggcttaagactgtcagtctatcccatcgtctata

SEQ ID NO: 1453 - DNA, 600 bp, Homo sapiens
  misc_feature (1)..(600): DMR9:41424201
tccgagtgtagtttatgttatatgttcctgtaattatttgtcatctgtggctcaaatcccttttactaaaatactttgcacttcaccataaacaaacttgtgcaaacaaacaagacacagaagcgatataaaactcccaaaatcaagttactaagtttcagtaacaaataaacctgaatgtgtaattaaatagattataataatgctgaaaattctgtattttaggttctttatgatctagagttcttcacatgtatttagtaaaccattccaagtgctatatttcttgctaataaaaccaaataacaatgttcagggtaaattttaatgaattaatgcttataatgcaaactatgctttcatcaattttattcagaagcacacgattaattatacaacagatattttatatgattgctcagagtaaagactatttttatttgcttgaatgacaacataatttattaaatgaataaatacacggattcgtcttctccatcaccattttaggcatgtttttgtgacatataccttcttcaccatgaactccttcctaaccaaccattatatctaaaataaattatcagcaaacataaatat

SEQ ID NO: 1454 - DNA, 300 bp, Homo sapiens
  misc_feature (1)..(300): DMR9:65194301
tcctcccatatccagccttatcagagctctgacctgccccatagaggagctatgtgtggctatttaaattaaaattaattacaattacataatatttaaaatgcagttcctcaatcacactagtcacactggaagtggtccatatcaacctgtggccagtgttacaatattgggaagcacagatgtgcatctccatgatcacagaaagttctacgggcagctcaggcacagatgatttgtccatgcctctactcagggccacacatcacttgctcactagacaccatccactcttcctgg

SEQ ID NO: 1455 - DNA, 3000 bp, Homo sapiens
  misc_feature (1)..(3000): DMR9:65503501
ttttgtatttttagcaggggagcagtcgggctctggactacatttcccggaggattctgcgggccaataccatgtctcgcgagattttggcttcctcttagccaggtggcagaatctttcgctgtgcccaattagctgctgccacgccttggagtccggagtaacttggccaggccggccccgagcggaactagagaaagctgaggatgaggaatccggctctggtccttttgtgtgtggagggctgaggagaggagtttgcgtgtgtgattgccatggttgccgtgggtcttcgtggtctgtgactgtggctgtgtggtgctgactctgggtgatcaggtgggcgcttgtgactgtgcgcgctcggagtggatgtgtgtgtcctggacgagccgcgctgtgtgtgcggatgtggacaaccggtgactgtgtagtgggggctgcgtgtcccaaggtgggtgtgtgactttgcgtgtgtgtgcagtactgtgtgtgcatgagttgcaggtctgtggctgtgcaggtgcaacttgtgtggccccgtggtctgtgtgagagaggagagtgtgattggctgtgaggcagagggtaagtggatatagggaggcatgtgtgcgattggaaatttgtgtgtccccttgagagaaaaaaccctttagggagttagagcgggtccttggtaaaactcctttcaacagagaaacagcctgaaaaatcaggctgcaggcacagagaaggaaaactagcaaagggggttgtcctaaagacattcctcagctgcattgataggggaccgaggcccaacatagaaatgcctttgtcctttgtgtgaccagtgggcttccaggaaatagtcgcttttttgtgggcatgtatatggtgggctctgttagattttgaagggaaggtgaaggttaaagaaagagagagagttggcagctctatggaggggaccaactaaatgccagagcccactgccgcttacaggctggagtaattataggcctgggcaggagggatctgggcagtatagcttgttgcctgggagcatgttgataaggatgtttcttgggcctttccccagcaggatgtgataaggaagtcaggcggttggggaggatgtttctcgcagcccaaaccccagtggaatgtttccctctgaccagggtctgtgaaatggtgggggcttacaaatcggtgcagcttggactaacaggctctggtgaccactttccttttctggacatgctttggactgtgagccgagcctctatgaatcatcacttcagcccctgattggtcctgggccaaactttcacttcagcccctgcttggtcttgggccaaaatttcacttcagcctctggttggtcccaagctaaggtcccgggccaagcgaagttgtgctttctccaagacaggtcacagactagtgagcacattcttccccttcccagttcacaaaacccccagattcagccttctagttggcaaccctctttcgggtcccctctccgctggggagagctttcttcttttgcatattaaacttctgttccaacctcatcctttgtgtccacgttccttaacattcttggctgtgagggaaagaaggcaaagacaagagcctttatcctaacaactcaattgctggagagaagattcatgcatattctatgtggcatcacatgccatagccctgggattgaaagacatgcagtttaagggatggtgttaatctcagtccaaataggtaataagatctttccctttgctatattttaggggtaggaatgagattgggggtttgatcaataatttgtacccataggaccagtgatttgcccagtcatctgtgagtaaatgcttggaccagtttccatgtctgtattgaattaaaaactcatacggttctgtgatttttgtcaaatacagatttggtctttgtccctgtttcctggtatacaactcctaaaatccttggaatgtcctaagggcttgcttttttttttttttttttttttgaaacggagtcttgctctgtaacccaggctgcagtgcagtggtgcaatctccactcactgcaacctctgcctcctgggttcaagcaattcttctgcctcagcctcccaagtagactacaggcatgtgccaccatggccggctaatttttgtctttgttttcttttttagtagagatggggtttcaccatattggccagtctggtctcgaactcctgacctcaactgatctgcctgcctcgggctcccaaagtgttgggattacaggcatgagccactgcacccagactttggctttttatatgttagggattgaccaatagcttcaggatgtgggctggtcatcagaaagaccaaggcaggattagagggctgggactttcagcccctaacctcccacccctggggagtggaggggactgaggattaagttgatggcaagtggctaatggtttaatcaatcatgcctatgtaatgaggccaccttacaaacccaaaaggagtggattcggagagcttccagagagctgaacacatggaggttcctggagggtcgtgcccagggaggggatggaagctctgtgccccttcccccatacctcacgctaggcatctcttcatctatatcctttggaatatccttgtaatcaaacagtaaatgtgtttccctgaggtttgtgagccattttattctagcaaattaatcaaacccaaagagggggtcgtaggaaccctaaattaaatctgtcagtcagaagttccagaggctgggacttgtgactggtgtctgaaaggggggcagttttgggggctgagctctcaatcgatggggtgacactatctcatggtagatagtgtcagaatcgaattggtggatacccagctggtgtctgttgcagaactgattccttgcttgctgataggaagaaatctcatattttgaggccacagaagtcttctgggtagattgttgtggttt

SEQ ID NO: 1456 - DNA, 500 bp, Homo sapiens
  misc_feature (1)..(500): DMR9:67083501
aggaatcatcctggcattttctgagcacaaactcagatagaacttctttgaataaattctcagaggaaattaaatttacactattaataaaatgtatttgtaggcatatattaaaaagattcaaaagtgtctactgtattttatataattgtgctttcctattttcttattgcccttgttcttttttttttttttgagacggagtctcgctctgtcacccaggctggagtgcggtggtgcaatctcagctcactgcaagctctgcctcctgggttcacaccattctcctgcctcagcctcccaagtggctaggactacaggcacccgccaccaggcctgactaattttttgtttttttttttttttttttttagcagggacggggtttcaccatgttagccaaggtggtctggatctcctcacctcctgatccacccacctcagcctcctgaagtgataggattataggcgtgagcctgtaaccgcgcccagcctttttt

SEQ ID NO: 1457 - DNA, 400 bp, Homo sapiens
  misc_feature (1)..(400): DMR9:67209501
aattcggccaggcacagtggctcacgcctgtaatcccagcactttgggaggcctaggcagctggatcacaaggtcaggagatcgagaccatcctggctaacacggtgaaaccccgtctctactaaaaatacaaaaaaaaaaaaattagctgggcatggtggtgggcgcctgtagtcccagcttcccaggaggctgaggcaggagaatggcatgaacctgggaggcagagcttatacagtgagctgagactgcgccactgcactccagcctgggtgacagagtgagacgccgtctcaaaaaaaaaaaaaaggtaaaattcatccctaaaattggctgtcagcatggaaattataaaactcattttctaaactctaacagtccttcagagcaaactttccaa

SEQ ID NO: 1458 - DNA, 1300 bp, Homo sapiens
  misc_feature (1)..(1300): DMR9:67555301
ctttgagagatgagatgagaggtgaagcagagaggtgctaatggctccagtcactgaggggcagtgagaaagcagttcgaagggaggaggatgagtgtgacggttactgtcatgtgtcagcttgactgggccacaggatgcccagatagtgggttaaacatttctgggcatgtctgtgagggtgttttcaaaagaggtatatatctcattaactttttaattggcgtactgagtaaggcagattgccctcctcaatgtgagtgggccccatccaatccactgaggacttgaatagaacaaaaatgtcagaggaagtgagaattctgtctctgcctttccctgcctgactgcttgatccaggacattgcttggtttctgtccttgaactcagacttacaccatcagtgctcctgattctcaggctttcggactcagactggaactataccaccagctttcctgggtctctgtcttacagacacaagacagaagattctcagcctccacaatttcagaaatgcccccagtgagtgctggaaatctctgatcaagtgatttcggagtggtatactgcctaagacttcattgtgttggaaaaccactcaccattacccctagcaactcagtagcaaatgttgacttcctgttttcacaatcttatgctctactatagaggatatagtaactacctagaggttatagtaacagagggatgaatgctcccaccaggagacgcaacaacgactctactgaactggaggttaagaaagtcacctggccactttgggttactcatgcctctgaatcaactggcaaagaagggagttattgtgctggttggggtgattaatcctgactaccaagagaaaattggactactattccacaatggagataaagaagagtatgtctggaacataggaggtccctcgaggcacctttcaatattatcatgcctggtggttaaggttgatggaaaactacaacaaaccaatccaggcaggaacactcatggcctagacccttcaggaatgaaggtttgggccaccacgtaaagcaaagagccatgtagtgctagagggcttaccggaggaaacagcaatagtgaactgttaaaggaagaagctaattataaacactaactacagccacaagacaaattatagaaatgagaactttgtcacatatatatctttctttctttctttttttttttttccgagacggaatctctctctgtcgcccaggctggagtgcagtggtgtgatctcggctcactgcaagctctgcctcccgggtt

SEQ ID NO: 1459 - DNA, 300 bp, Homo sapiens
  misc_feature (1)..(300): DMR9:67651701
aaagaaagaagaaagaaagaagaaagaaagaaagaaagaaagaaagagaaagaaaggaagaaagaaagaaaaagagagaagtcgtgtgctcaggttgctaagatcgatggtaagaacaaatcctctagcggtgaaaatgtaagaaggaaaaagaaatttctgttagtcttgtttgttgcaccccaagctctaaaaagtacagccatatgtgtgataagtgcttagttaagatgaaaaaggcattaaatttgtgagtggaaatcaaacagaaatgtgttctgattgaaagcaattgggtca

SEQ ID NO: 1460 - DNA, 1400 bp, Homo sapiens
  misc_feature (1)..(1400): DMR9:68564601
ttagcaactcaagacatagcaacccaagatgtggaatctgatgcagatgggtgccctctgaaaagatgagtcattctatcatggtccatgacacataacctggacaattcagaatgggaaaggggtgcagctggaacacaagcgaggagagagagaggagagagggtagtggtaagggggtcacttgcttcggtgaggctatttgtcaggaagccaggctgggtgcctaatcagtgtggccgtattctctctcttcatggctctgcaacctgttcattggatgaacctggctttgttccttcccacctctgggtattaatatattaagaaaacaaattacagcccaatcccacaaaggctagggaacctgcctttcttcttcttcattgtgtccccagagcctagcagattgcctgctacgtagttgataaatatttgaaaaaaatcagtgaggctggaggtagagtttgttctcaaggtgagaggtagggcaggatttcctcccttaagtaaccaggcaggaaaagaacagagtgtcacttgttatagggtaccatggtcaaaccaaggaaatcaggattaatttgaaagtccaaaaggaagtagcacagatgaaaactggatatagtcagaggtcaggacttgggcagacctgaacttaaatgggatcaaagaaaggaaatgaggtaaggatagccctgctgtccacaaattgccccatgcataagtagattaggttggtgtaaagctatgttaactaatattcaacaaatatttattcagtccctattatgtgacaggtactactctaagaggcactcgcaattctgcagtaaacgaaacaaacaaaaatctctacagccacgaagtagagagcactgaccccaaaaggaataataataatagccatttgatgatttaataatcgtaataaataattgcttaccaggtgccaggcattgtcatcgttatcatacatagaccacccaatcagttgatgtggaagtaagttctatgcttatgctaactttcacttttccaaaggactttcttcttcagaccatcacctctgggtgcagaaacgacaggaggaagtaaagtctgaacttacgacctgggatattacatttcagtttggttctggccaggcaccatggctcacacctgtaatcccagcactttgggaggctgaggcaggcagatgacaaggtcaggagttcgagaccaggagttctggccaatatggtaaaaccccatctctactaaaaatacaataattagccgggcgtggtagcaggcacctgtagtcccagctacttgagaggccgagacaggcgaatcgcttgaacccggggggcggagcttgcagtgagccgagatcacgccactgcactctagcc

SEQ ID NO: 1461 - DNA, 2100 bp, Homo sapiens
  misc_feature (1)..(2100): DMR9:68608901
ccgaggctgcagcagcgcatccccgggcgcggcgcccaccaacactcacagtgcaagggcttggctccgagggggctgggagcccgggcgccctggagtgaggggggccaggagcgggctctggaggctgcagaggcgactctggagaggacggagcctcggcggggagcggatgttttgaagatgctttggctgccttggagatttggagatctgatgccacgatgaggactcacacacaggggtgctcccagtgtgtttttcatatatttgctttgcattgtgtcagcctacatcaccgacgagaacccagaagtcatgattcccttcaccaatgccagccacaacagccaccccatgctgtacttcagggcagaggtggcggagctgcagctcagggcggccagctggcaggagcacattgcagcccgcctcacggaggatgtgcacacgatgctgtgcagccccttggaatacctccctccctgggatcccaaggattacagtgcccgctagaacgaaatctatggaaacaacttgggtgtcttggcaatgttctgtgtgctgtatcctgaggacactgaagcccaagacatggccaaagtctacatggagaggatggcagtgcagcctatttggttggtgaaagatgctccttgggatgaggtcccgcttgctcactccctggttggttttgccactgcttatgacttcttgcacaactacctgagcaagacacaacagaagaagtttcttgaagtgattgccagtgcctcagggtatatgtatgaaaattcatacaggagaggacggggatttcaatacctgcacaatcatcagcccaccaactgcatggctttgctcacaggaagcctagtactgacgaatcaaggatatcttcaagaatcctgcttatggaccaaacaagttctgaccatcatggagaaatctctggtcttgctcagggagatgatggatggctccctctatgaaagagttgtgtatggaagctacaccactagatcactcttccaatacatgtttctcatccagaggcacttcatgttggccatccgtggcttaaacaacactttgcatttatgtatagaaccatcctgccagggtttcaaaggactgtggctattgaggactcaaattacaactgattttatggtccagaaagccaattagttttccttgataaatttatcatgcgtaacagcagtggtaactggctagctgaccaaatcagaaggaactgtgtggtggaaggtccaggaacactgtccaaagggcagcgccggtgcactctgcacacagaatttctctggtatgatgccagcttgaaatcagttcctcctccagactttggcacccctacgctgcattattttgaagactgggtgtcgtgacttgaagtgcactacctgctgaaatcaataaatctttcctctctttcaagtctggaaaaccggggggacatgcaatatgtgacattgtccacagaaacaaatacaaagattggatcaaaggatggagaaattttaggacagggcatgaacattatgatcaaaactcatttacttttgctcccagttgtgtgcctttcgttattgaggctctgtacaggccaaagtacaccttcttcaacaatgttttgatgttttccgcagctgtgtcgaagagctgcttttctccctggaagggtcaagtcacagaacactgttcatcaaaatggtctaaataccagcatgacctggcagctagctgtcaggggagagtggttgcagcagaggagaaaaatggggtggttttcatctgaggagaaggtgtgggagcttataacctccagctcaacctgaagaatgttcagaggaatctgatcctcctacatccacagctgcttctccttgtagaccaaatacacctgggagaggagagtcccctggagacagcagcgagcttcttccacaatgtggatgttccttttgaggagactgtggtagatggtgtccatggggctttcatcaggtagagaaatggtctctataaaaagtactggatggacaatactggctacggcaagaaagcaatatttgc

SEQ ID NO: 1462 - DNA, 200 bp, Homo sapiens
  misc_feature (1)..(200): DMR9:69832501
tcctgctggactttcaggcacaaatatgaattttttttccctactagtactgttttggggaataactcttagctctgtgataattttctttatttcttctatagaaatagtctattcggattttttttttttttttttttttttttgcccttaacagtaccttttttttttctcagctggccttaggcctaaactttttt

SEQ ID NO: 1463 - DNA, 1500 bp, Homo sapiens
  misc_feature (1)..(1500): DMR9:71471501
ttcttatttcaccttcacttttgaaagacagttttcgggacttaagtttctttgttaacagaggtttcttggttctgaaggattttttttggttttgggagttttttggggggtttttttgttttggagcactttcatgttacctccctgtctctggccttcactgtttctgatgagaaatcaggtgttaatcatgttgtgtatagtcatttttctcttgttgctttcaagatgttctctttgcttttctatatttttactatgctgtttctgggccatctaacttttagtatgtgtagattaaagtttttaaattaaatttgtaaactttttagtcaatatttcttcaaatatgttttcctcttctttctgagttttgttcttctggtagttccactgtatctatattggtgtgctaataatttcctacatgtctttgaggatttgcttattttctttattttattctgtttttcttcagattgtataatttcaattaatctatattcaagttctctgcttctttcttgtaccagctcaaatctactattgagcctctttagtgagttttttatttaatttagtgtattattaaactccaggattttcatttagttcttcatatcatttgtctttatcagtattccctttttaatgacattgttatactattacttctttaagcatggtttcctttcatttctttagttctttgagcatatacatatgctcatagctgttttgaagtgtttgtctactaagtctgatacctatcaaaggtagtttctgttgcctgcttttctttaatgtgtacgagtcacacttgcctatttttttgcatgtctcataaagcttttctgaaaactacttattttagataatatattgtagcaactctaatatcaactgaagcgagatttaaggaagcagagagacagtgcagaagggtgtttattttaaggtgtaccctggcccagcagacatgtgtcctacaggctgagcccagaacaaacaaaatgagtcctttttaagcattttgaggtgggaactacatgaagcaggcttacagaagcgagaacaaaaggctgctgtgacacttctgctacatgtcttacatctctgtgagaactcggtttgcagcttatgcttatctgtcttgtgaccttgcagctatgcagggaagaaagaaacaggagtttacagagcctacaaaatatgcagaggatagatatggttaatgtttcttgggacagacagttaatactctcttctaactttaacttcaaggggggctacttaaattcttttcagccttggttaatacagcaattcatcctatgagctattgttatttctctattattacttatgctattattctgttattttctcaatttcccacttcacagctacccctatcaagtccatattttggctaatttttcagtgacttggctggactacttaatgaaatctattcccccacaacgtgcagtctct

SEQ ID NO: 1464 - DNA, 100 bp, Homo sapiens
  misc_feature (1)..(100): DMR9:71878701
tgggaggccaagatgggaggaccacttaagcaacataggaaaacattgtctctatcaaaaaaaacaaagagagagagagatctgcaggcccacaaaaact

SEQ ID NO: 1465 - DNA, 800 bp, Homo sapiens
  misc_feature (1)..(800): DMR9:71943301
gttttacctttggcaattctgaaagaattatgtacaaaaaaaacctaaggaaaaattattttagttgcttttgaatggtattcaaatttcttttcaactaccgtagtatcttccttctgttaaatgatactttataaaatatttttcagcatcagcatgttgatacagatataatatttacaatttgctcttgctaccttcttgggagttgaagtcctttctcgcccagcttcttttttttgttttttgttttttttttgagaaggagtttcgctcttgttgcccaggctggagtgcaatggcacgatctcagctcactgcaacctccaaatgccaggttcaaaggattctcctgcctcagcctccagcgtagctaggattacaggcatgcgccagcaccccggctaattttgtacttttagtagagacggggtttctccatgttggtcaggctgttcttgaactcccaatctcaggtgatctgcctgcctcggcctcccaaagtgctgggattacaggtgtgagccaccgcacccggccctttctcacccaacttctgtatggcattactgtgttaaagatatattgtttgacaacaaatagaatgcttaaagcagcaataacaacactgactctaaaatatatgttgtataggccgggtgcggtggctcacgcctataatcccagcactttgggaggccaaggcaagtggatcacttgaggccaggagttcgagaccagcctggccaaatggcgaaaccccatctctactaaaaatacaaaaattagctggcatgctg

SEQ ID NO: 1466 - DNA, 500 bp, Homo sapiens
  misc_feature (1)..(500): DMR9:72157301
aaagtgttgggattacaggcgtgagccacggtagccagcccagacttcttttgtgagatatgaaatgtctttattgtctaaatctctgttagttgggtactgttcattgcagcccaatgcaccctcattactacactgcttttcaatgaacaatattttacactttacaagaataactaccttctccttcttctccttactggcctttccaggcacccatatcaatagtcaagcccagccaattttcctctgggatttctgtgtgcatattcacttccattgcccccatctaccctttagtgtctctgagctaaaatataacaggagacccttaactgttttctctcattctagtatttcccccacattactgaaaactcttttcttggaccatgggtagtatcatgtatctactcttctataaccatctatggctcactattgcctctaagtttcaaatgtcctggaagatgttctaggcatgacattatttggcccca

SEQ ID NO: 1467 - DNA, 2900 bp, Homo sapiens
  misc_feature (1)..(2900): DMR9:76527101
atttttgggtaagaggaaaatctttcttttgcccaactatccctaccttgcaagacttttagcattctttgaccttgcccactaaaagacaacagtttaaataaaatttttaaaagatcattagatattttgaaatgcctccaaatggaaaaaaattggcctgcttaagaactgctgtactaatggtctcccaactgtttcacaggtctcagggaaggccacagaaggcttcagtggctgaatagaaaagtaggtggttgaggggtcagcctcctatccttgcctcagaacacagaacatgcctcagggcaaagtgactgacttcgcaggctgtgatgatagctgttatattcttttcgagagaggggatttcactgtcacccaggcttaagtgtagtggtgggaatcatagctcactacagcctcgacctcccaggctcaagcgatcctcctacctcagcctcccaagtacctgggaccaccacatgtggctaagtttttaatttttattttcgtagacatgaggtctcgctaagctgcccaggtaactcctgggctcaagtgattctcccacttttgcctccctaagtgctgggattacaagcatgagccactatactgggccccccattatattcttcataagtaaaagcatatccagaaattttcatttccagttgatctttacgctgctttcttgaccatttctctgaaggtgcctggagcaaaaatgtgtccagaattggtgggttgttggtctcgctgacctcaagaacggagccgtggaccctcgcggtaagtgttgtgtcccgagtttgttccttctgatgttcagatgtgtccagagtttcttccttctggggggttgctggtcttgctgacttcaggagtgaagctgcagaccttcgcagtgagtgggcggcgcatctggagttgttcgttccttccagtgggttcgtggtctcactggcctcaggagtgaaactgcagacctttgctgtgagtgttacagttcataaaggtggcacgtccagagttgttcgttcctcccatctggaattgttcattcctcccatctggaattgttcattcctcccatctggaattgttcattcctcccatctggaattgttcatccctccccgtgggttcatggtctccctggctggcttcaggagtgaagctgcagaccttcgcactgagtgttacagctcattgttacagctcataaaggcagcgtggacccaaagggtgagcagcaacaacatttacttctaagaggcaaagaacaaagccttggcagagtagaaggggacacagttaaccaagtagccactgctgcctcaggtggcgtggcttttattcccttatctggccccacccacatcctattgattggtccattttacagagagctgattggtccattttacagagagctgattggtccgttttacagagagttgattggtctgtcttgacagagtgctgattggtgtgtttacaaacctttagttagacacagagtgctgattggtgcgtttacaatcctttagccagagggaaaagttctccaggtctccacccaacccaaaagcccagctggcttcacctctcaatggcactggccgccaggacttttgggcacctaccccgggcattccggcaacccagagggagctcgtacctggatcaagcccagcaggcgccgagtgtgggacccgctcccagcccgcgcccacctggaacccgtgctggcccactagcgccacagccccagctgccgccctcgcctctgcctccacacctccctgtgagcagagggagccggctcccgcctcggccagccccagagaggggcccccacagcacagctgcgggctgaagggctcctggagtgtggccagagcagatgctgaggccaaggaggcaccgggagtgagcaagggctgctagcacgttgtcacctctcaaaaccacttgagctttaccatccaacataatatcctttcgttatctcctcactatagttctagaactatcatttgcacattttatgttagatatgatggatcaaaattgtttaccagaacttaaatggtaaaaagaggccatattaattacatactgcattgacaatattgatgatgctttgtttcagatatactatatatcgatgttaactgcttttgaaatatttgaaaattagccaggtgggatggctcacatctgtaatcccaatactttgggaagccaagatggcaggatcgcttgagcgcaggagttggagaccaacctgggcaacacagtgacaccctgtctctatatttaaaaaaaaaattgaaaattgatacttgtttttgaaatacttggctttatacatgtgtgtataataaaaaacaagtatctgctttgtgtagggcagcaccaaagtggtatgtgtacattttcctggaagaacggaacattggaggaaaaagtgtttggatgccgtgggacaagagacaggattgaatgggagagtggaagataggatgttgtctgttcctcagcccaggctcagagaccagtaattcactggagttactatttacatgaaggactttgggaggctccaggtacaagcacagatgtttcaggacttcagtgaaacatattaccctgatttatagacggagaagcttcccccttcctgggtgcctgcagcacagcttttaacactgggttgggatggaaggttctccagtgctgtgtgggcaccatgaggaactgaaagtttggaaacagcacctagataaaaaggctgaagtagacaccagctaaagtaatactaacgaggcatctcctaacagggcttcttggcagtggaaaggagcagcacagaaaaatctgactggggc

SEQ ID NO: 1468 - DNA, 1700 bp, Homo sapiens
  misc_feature (1)..(1700): DMR9:77343501
aggctggttcttcattctttttcttttagctctgtttccagattcttttgtccagtcttctctgtagtaccttgactatctcctattcttttagtttggtttccagatcactcacgttgaagttatttcgtacaattctgagcttctttcctactctgaactttgaatactacttttacttttttacccttatttgacaaccagatgctagatttaatacttgttttgcgtactttgatttctgcctaatttccagataatgttcatacctgattttgatttttagtaactgaatgtacacttgttttaagcctgatcatctgtgtcccagttctcagctcaggtttcttgctgatttttcaacccttctctgtaagatcatgaccacattaaagtctcttttctcgccagcagttcacttaccatagctcttcaatttgctatccactgcttcttgaatgcatagtgctgacaagtgacaatccatcttcaagttgaaagtttacagctgtttaaacaacccaataactagagcagtgttaaaacaggtttttttatagtttaagtctattctgatgggaatattaagatgatttatatatttatggtgaaatctgtttatttttataaacatatataatgtatattttagtgtatccccttttggcctgagtatgcttctagtaaacttcttattcaagtcgaaaggagtgaagatcctcccaaaaggatatattttaacaagcaggaaaattgtattctattgcgtctagataacgaggtaagtttttttttcttttttgcatgtgtcattaggaaagctaaaatatactgactagtattgtatttattttttgtatcaaataattacttctgttgatttttcccctttccccaaaaacgaacaaacatttctttttgtagaaggaaacagagatctaagataatttaattgttaaataaaaagttagttggggccgggtgcggtggctcacgcctgtaacaccagcactttgggaggccgaggcaggcggatcaggaggtcaggagattgagaccatcctggctaacacggtgaaaccctgtctctactaaagaaatagaaaaaattagccgggcgtggtggcgggtgcctgtagtcccagctactcgggaggctgaggcaggagaatggtgtgaacccgggaggtggagcttgcagtgagccgagatcgcgccactgcactccagcctaggcgacagagcaagactccgtctcaagaaaaaaaaaaaaaagttagttggaatgcctggaatactagaatataccacatctggaatgtcacctatctgtaatacagtgattgagattatagatttccagaaatgcagtacaaaattctgaattgttttctcagtcatcccaaaaattaaattatcaagttatgaatagtctgttcttaaatgttattagttaatattcttgggaaaatgattacattaaaatgttttctttttctttcttctagcttggaggtattatagcagaagtgaatttggccgagcattctacagttattacatttttagattatcatgatggagcagctacattcctcttaataaatcacacaaagaatgaacttgttcaatacaatcaaaggtaagattatcacaaatacagtaactcttgatggtgtaagtctagatgatgaggcaca

SEQ ID NO: 1469 - DNA, 600 bp, Homo sapiens
  misc_feature (1)..(600): DMR9:78142101
tgcaagtaggaaagatattgctaaattcttttcctagcaaagaatattaatattaataccctcggaaaggaatgtgttcctggagggaggtctataaacggccgctctgggaatgtctgtcttgtgcagttgagacaaggactgagataagccctggtctcctgcagaaccctcaggcttcctagggttgggaaaactccaccctggtaaatttgtggtcagactggttctctgctcttgaaccctgttttctgttgtttaagatgtttatcaagacaatacgtgcaccgctgaacacagacccttttcagtggttctccttttgccctttgccctgtgatctttgttggacccttatcagtggttctgcttttgccctttgtcctgttccctcagaagcatgcgatctttgttagatgcttattagtggttctactgtttgctctttgaagcatatgatctttgtacctactccctgttcttacaccccctccccttttgaaacccttaataaaaacttgctgttctgagactcaggcaggcatcatggtcctaccaatatgtgatgtcacccctggtggcccagctgtaaaattcctg

SEQ ID NO: 1470 - DNA, 1600 bp, Homo sapiens
  misc_feature (1)..(1600): DMR9:81815201
aaaccaaagaacaacaggaaagtccaggctgaaaacagaacaggaaatcctacccacaggtaacactgggactccagctctaactattaggtccaataagctgcattagtaaaatgaaatttgaatatgacattgattgatagcattctctaaatgctgtaatcagtctgtggtttctaaaccaacggcaacacacatgtagggcatcctcaaagcttctcctggtcagggcagttggaatgcacaatcccagaggcagaattcacatgtattgtaacaggagtggtgccattggattactgaaaaaaggtggcactacttccattccttagtgggaggcaaaagagcatttttttgtaactttttgttttttttgagacagagtcttgctctgtcaccaggctggagtgcagtggcacgatctcggctcactgcaacctctgcctcccaggttcaagcgattctcctgcctcagcctcctgagtagctgggactacaggcacgcaccaccacgcccagctaatatttgtatttttactagagacagggtttcaccatgttggccaggatgatctcgatctcttgaccttgtgatccgcccacctcggcctcccagggtgctgggattacaggcttgagccactgcgctgggccttttttgcaactcttatccttgtctaccccattcttcacttttttgaaatttatctcctcaggattacccactatgcaaaatgtgcccaccacccactgctaattcagccttcaagtcacaggcctgtgattacttgactgatttctggccactgaaaatagaggctgcagtactctgcaattaaaatgccttcaggtacattatctcacttgagcctctcttaagataagcagatgaagagactgagtttcaaagaatttaagtatcttgagtttatacagttggtgatttcttcccttcttttgttcccttcttgtcttcttgcttttcttctttcctttcccctccaaacacatattattaagaatgtagactctggccaggcgcagtggctcacgcctataatcccagcactttgggaggccaaggcaggcggatcacgaggtcaggagatcaagaccatcctggccaacatggtgaaaccccatctctactaaaaatacaaaaattagccaggtgtggcagcgcgcgactgtagtcccagctactcaggaggctgaggcaggagaatcgcttgaacctgggaggaggaggctgcagtgagccgagatcgcaccattgcactccaacctgggcaacagagcaagatttcatctcaaaaaaaaaaaaaaaaaaaagaatgtagactcttgaagccaaaggcctggttttaaatccctggttctacatgaccttgggcaagtttcttatcttagtatgtccgccctcagcagtaaaatgaggataacaatattatctacttcatacggtgattgagaagataataataatacaaatatactaattctcacagttagaacagcgtctggcacataacaaagatggagtaagtcttattattattattgttgttgttgtttccttccattcttccctcatcaaata

SEQ ID NO: 1471 - DNA, 200 bp, Homo sapiens
  misc_feature (1)..(200): DMR9:81851801
ggcagatttaggagcataggaagaagactgctagattttgactgtgaacagaacctgtgttttattattctttgtatcccaagcatatccacagtgcttctcatttagtagatgcccccaaaatattggttggataaaagattcgttgatgttttctttccttttctttttctttttcttttcttttttttttttttttg

SEQ ID NO: 1472 - DNA, 1000 bp, Homo sapiens
  misc_feature (1)..(1000): DMR9:82922801
cagcaaaactttgtggcaaacccagatctatgctaccctacatattagtcactttcatctgtttcccaagacacttcacgctaacccccattccgacacttaccacgttctgcatagttgttaaatttgcaacaaactgcctgctactagaggtcagtgtcaagtctgagtcttcatgcttttctcccagtaatgtagggtaactgtcttaggctgccaggggctagatgaaggatccaatgatcctattggccaacatttatgtttgcgaatttcacgtccctcattttcaggctgggcagagagtgcaccccctagtctctatcctagcttgatgatgagattctctggaggaagtttttgcctaaggaaagtctcccagcagccaagagtctgtgcggccccttcccacagtcaaatcatcacatgacctgcagctttcagccagtcctgctagttctcatgcacgtttcccccaccctcctggttctgtgcagggagggaggcacatgtgcatacatgtatgttttattctgcttcattttgctgccaatggtctgtgttaaaacaaaagtattccttcccacccccaccccctccattccttgtacccaccatttgacccgcaggcaaatgaagccattcaaatatttattcatcatatcatctgttcccatctgaccttgcaattcctgtcatgccccgcgtgtcagtttaaagcataacgtcattaatacctccagtgcactaatggatgcttcacccatgaacgcattaatgaaatgtgttattgttttccctcacaggacattaacaatctacctcacgctgtgtctccgaagccccgcggagctgctgaaaaccactagctatcaaatgaaccctcagttccgcctcagtaactttaagttcaagtttatcactgaagcgtcactcatgtgagaagaagatacaagcctctgagggctttggggcccagcttcaattaccataaagagta

SEQ ID NO: 1473 - DNA, 200 bp, Homo sapiens
  misc_feature (1)..(200): DMR9:83603501
tttctcaagatacagcctgacacgttcagcctgtggcccacatgggcctgttctaactttcctggatgccttaaatttgtgtcagggaggaccctggtatagcacgagaggctctggacaaggcagcaggggatggggtttgggtcccagctctggataagtcacttcactcagttgaataacaagtttcctcattcaaa

SEQ ID NO: 1474 - DNA, 800 bp, Homo sapiens
  misc_feature (1)..(800): DMR9:85456501
agtgaatttcatgttggtgctcttgggaataacatctcagagggggcaaaaggaatgtgattgagccgcgagagaagtgggctctgaggcagtcacaacaaaggcctctgccaatcccactgagggcttccgagctatgataactctgctgaattgtcccttttgggggaaagaggccacagtttatacctctgcgttggccagtcatggagatgtgggccctgaatagggagtgtgagcttggtggggaggcatccctcttcaggcatgggcaatccctggaaacgggaagcccatgaaaaccgtaagctgttgggagtgtaagtactgcatactaaatgggagtgggtggggttagataagggtagggcaacatggcatccactgtgatttcaaaatcgtgttccaactggaccatttatgtattcattcaataaatttgtatggaacaccaaaaaaaatagttccaaggcatgaactttggggacacattcaaaccatagtacataaaattgagtaatatacataatatactgcaatgaaaatgagaaactactgctatatgacatagattgaaaatttttttaattcaatagctagaaaagaatatgtgtgtgcttgaatatatatatccaaagtaaataaagacaaaaaataaatgcaaaggacactttcacatccttagacctaaagaaaacctctttagagcagttttagaattgccattatgttccaactttaaccatgaagccttctgaaaactgaggccaagaaattttgaaatgatgaagacaaatatt

SEQ ID NO: 1475 - DNA, 500 bp, Homo sapiens
  misc_feature (1)..(500): DMR9:86004001
gggagttcaaaaatattttgaactgaatgaaaattaaaatgtacccaaatctgtgagatacaaataaagcagcgcttagagggaaatttgtagcattgaatgtttttttgttttgtttttgttttgagataatctcactcgttgcccaggctggagtgcagtggcatgctcttggctaactgcaatctccgcctcccgggttcaagtgattcttgtgcctcagcctatcaagtagctgggattacaggcgcacaccatcatgcctagctaatttttgtatttttggtagagacggggtttcaccatgttggccaggctggtctcaaacccctgacctcaggtgatccacccgtctcagcctcccaaagtgctaggattacaggttggaggatcgcttgaacctgggaaatccaggctgcagtgagctgtgatcccaccaactgcattccagcttgggcaacagagtgagaccctgtcaaaaaaaaaaagtctacggttag

SEQ ID NO: 1476 - DNA, 2100 bp, Homo sapiens
  misc_feature (1)..(2100): DMR9:86337701
tgcagcaaccacatattgtggttttaagtgatagtttcaattttgaatatttaatcctgttaaccatactcacttgtggatggccctaaaatattatttcctattttattttttgatatccatggtcaattcattcatttgtttagaatacatgttaatgaattaaaaacgattgttcagttacacattaagccagttcaatggtcctcttaccctaacccatagcgtcttgcatatgcatgctttggtcacaaagattggcgtggggagagaacgtggacaaactcatcaccactaatggaaataacaactaaaagggcatgttctacttagtgatgaagcaggcggtggttttcaaaggatagcatattataattataatttagccagtgaagagtgggaaatccgttgttcattcaggatccaagaaacgggaagtatctattgttattgatatacctgaatcagtaaagcttttgattttctctaaaagcacatacatggaatctctttttttttttttttttttgagacagagtcttgctctgtcacccagggtggagtgcagtggcacgatcttggcttactgcaacctgtacctcccaggttcaagcgacagaatctcaattttataatcatgactcaacctcacattttgggggaacgttaaatcttctactgtttgagtattttaattgaaatatatttaaaacattatggaaatgtaaacaagatcagagagtatcttctattttttgccgtctctgtgtatgttattggacatgatatgagaagctttatctcaacgttcctgtgcctaacaaccactgtggtaaactagttaaaatgtaaattcctgggccttatcctctgagatttaactcacaaatctgatttttaataagccctataaatcattttgatcttttgagcaataccgttaaagtgaaacagaaacactgaatcttccgtctgtacgtttctgttgcaaaattcagatgtctttctcttttgatgtctataaatttgcatttaaacactgaagattaaattaagtaaaaatcaaagcatactgcttatacatatgtagaatgtattcatgcataaagacctcaagcctacctttgcccagtacctaaatgcaatcaccaaaggaaccagctttggttctagttttccaagggcagttaaatgctttgttgtcagacaagcattttcatttcctgcgctcactttacacagaagaccactggtgagaggtgggggaggaggatgggaaagaaaaaaagaaaaaagtgttacacaggtctcaaagtgtcttttatgccaacaactaatatacatgcataataaatacttcaaaaataaaaagcttaaaagtgaaaaaaactacatctttatgagtaatttaataaattttctttacaaaaaagatatcgtggctattttctgagtaaactttatttttcggattaataattttgttttcaaatattattttttggggggaaatgcaaataaggaaaatattatcaaatgtttcgggccaggcatggtggctcacgcctgtaatcccagcactttgggaggccaaggcgggcagatcatgaggtcaggagatcgagaccatcctgggtgaaaccctgactctactaaaaatataaaaaattagccaggcgtggtggtgggcacctgtactcccaactactcggaagtctgaggcaggagaatggtgtgaacccaggaggcggaggttgcaatgagccaagattgcgccactgcactccagcctgggcaacagagcgagactccgtctcaaaaaaaaaagtttcaaatgggagcatgattcatctctgtaacaataaaagagtgttttcccaagagttggaggaatgtacctaatgaagaatcattacagcctataaaccacccatttacagtagtgacagtaatgctttcacacagaggcagagagagataaaccagagaggtcacactgttactcagcactgccataaatgctgccaaaaagggtggcaaaatacaggtgattacagcaagtaactatttaataaggctgttttttaacgagttgaaatg

SEQ ID NO: 1477 - DNA, 200 bp, Homo sapiens
  misc_feature (1)..(200): DMR9:88487501
tgagctctacttccatggaaaaaataccagctttatctttccgatgggcatattgtgggatttaatggatttcaaaaatgttcataaaattttgggaaagaaactattaaaatgggactttaaagttccttttataactaaccataatatcaactgcctttgcactttgtaaaaaccggaatgtcttaaagtaaaattgt

SEQ ID NO: 1478 - DNA, 1200 bp, Homo sapiens
  misc_feature (1)..(1200): DMR9:90299301
ctcaggaggcagaggttgcagtgagccaagatcgtgccattgcactccagcttgggcaacaagagcgaaactccatctcaacaacaataacaaaaaaaaaaaaaaaaaaaaaaaaaaggaggcaaaacatttacagctatagcttcactttttatagatgctatgaaaatttgaacatgaaagtgaaaacagctatttgatctaaatgaaaagccttccttcatagcatgctatgttaacacatttctgaagatgtgttcaattttcactttcaggtatggtcttcttacaataactcttaacctttgaattatttatgtcttctgattcccatgttgtcacttctcattttcatgtgttcaccatgaaccccacggcgggaggtctgtgccactgaatattctgtgcaaggtaactaactatccatcatcaatcttcttgaggaatagaatttctgtatatattttttaattgaacataaacgtttggagttgttagctcattgttgcaaaacaaagtacttaattgcaaaaggagatagtgttgccaaacaatataataaataattatagatttaccctacataagatgagaagaatgccataacaagcatgttcaggctatttacactctataaaagaattggtttacttctatttcccatgtatatttcacatacacctgacccttaatttcccatgtttaatgattgtcctcactaggaagcagcctggtgtaccaactagctggtacaccaaatgtgtggcaaaagtggcagggccaagcatgtccccaccatcaggagaagttatctgtccctaactgtttgtgtctcggcacacacgattgatcagctaaccctgcaggcatgctgttcctctaggggaggtgctaatcatgtcctctctggaaaagattgtaaaaagagaggcagtttatcacaggtcgtctctcagacttaaaaacacatgttacaatgagatttctgcttaattgcacacactgcgagatgagaccacgaaacaagctagaaatacaaaagagaggtttatcaaattcatcctggataagcagaattcaactattaataatatttcaataacaaataatccacaaggtaagctaattggaacatgacgccagatggcagggaaactagggctatcctgggcaagtcagaacagacaattacttttttga

SEQ ID NO: 1479 - DNA, 1100 bp, Homo sapiens
  misc_feature (1)..(1100): DMR9:90928601
agagacgaggtttcaccatgttagccaggatggtctcaatctcctgacctcgtgatccgcctgcctcggcctcccaaagtgctgggattacaggcgtgagccaccgcgcccggccctaaagcatttttttttaaaaacttgtgtgtgaccctatgaggcccataaagtctgatagattcaccatctggtcttttccagcaagagtttgccaatgtctgttctagagcatcattagttataacagtctgataatggaacagaattagaccacacatcaaggaaataatacgcaatacagaaataaacagaaaccaatgacaactaagtgtatagactaagctgccatttaaaaatcaccagcctggccaacatggtgaaaccctgtctctactaaaaaaacaaaaattagccaggtgtggtggtgcacacctgtagtcccagctactcgggagactgaggcaggagaattgcttgaacccaggagacggagattgcagtgagctgagatcactccactgcactgcagcctggccaacagagcaagactctgtctcaaaaaagaaaacaaaaaacaaatcacttagaaaagatggcttatcagtatctcatcttggctcacctagatagccatttggaagaaaaaacaaaactggttccctgttctactactaactttggagaaatggagccttttcttagttccacacgaaaaacattaaaagaaagcattaacaactctgactacataaaaaccagtaccttttgagaaagaaaaatgccttaagcaaatgtaaaagtcaaataaccaactggtatttgaactgaaagatatatagaagaaataggacaaatgatttctttaatataaataagttcctgtgaataaataaaaagaaacaactccataaaaatgatctaaaagtacgaacgagctgtttatgaggaaacaaaaatgggcaagaaacatgttcaactcaaacacaaataaatgtagataaaattattgtatgtagtttttcttttatcaaaatgacaaaaattttggtaatgccagtatatgccatgaaaggcattctgaagaaacagtgttcaggctggga

SEQ ID NO: 1480 - DNA, 1900 bp, Homo sapiens
  misc_feature (1)..(1900): DMR9:91036701
catttccagaaatgccagcacggccttctgaataagagtgaggcaaaattcaaaccacgtttaaattgtttgaggatcacatccaccaccagttagcatgggtgaagagtccgtggagagggtactgcagggcttccgtggaagcaactgtatttttacacagccgtagtgctcggctcaccaggttcggctcacagcccccgatacctggctgtgtccagcagaggggaagtctcctgggaagaggcctttgagaggtttatacacatgtgcgatgtgggccagcgggcggccccgggagccagcaaaggtcagacatttgtccttccagacacagctcccgcgaggtagaacacggcaccaagatgcagcgtggaccccacgaccaccattggggtacccaggcgcccagagaacacatgccacgcggcagcgtttgtaccacggagggcaatgcaaacagctgacacctggcagcgctccagaactgccgctggggcgttttgcttctgaaaaaaccaccctcctgtatcctctgttcacacaattccctccgccccagggctcccctcccgctgcaacggctgcatcctgcacacccctttgcactcctctctcataccaggacactggggggcagtcatccgacacaccacacaactccgtcctctgctccagcttccgctcagcggagaatggctcccttatctgatggttccaggatgctctgtggcaacactgagtgtaaagcaaacaaggccatcgggtgctgcagcctgcacaccagcgtggtcctgggccacacaccgggcagccggagagaatctctgcagctcccaggcggcagggtgcacaaatcacagcctttccttgaccccgcgagctgagagagcaaagtcacagacagactgttttaagtggattcagggaaacaccccccactgctgtcccccctcccgccccaacgcacacatacatgcacacacagctttgtttccttgtcattcctctcattccctcaataacccctgataggcttctaggaatacttcctctctcagcaaaggaaaagtgtatggttctgtgttacaagatgattgggctttaagcaaatgaaattgaaggcctacagcactggggtaaacctcctccaggcagcagcaggcattgaaacagtgctcattagagcttaggattcttcctccttctcactacagcattttaattaactggaaacaatacctcaaggcagtattgcaatacctttggactgaaacattaataaacagagaaaatttgcttacaaaatggcaagttagaggaaatggaggccgactaataaataaatgagccaaagttcaaaggctgcaggatgactcacacgtgccgtgcctgcctcgcagccaggactttcaaaaacaaaggggtggtggacggattccacaagaacggctgttaaagtccacgaggctgacccaggctgggacttcctggaaactccaaggagaggaactgcccacagagccagggactcaggactggcacaagaaatggcacagcgcctgtgctgcacgtttgcaagtgacctgctcttctgaccgcagaagcgccactgaaggtggtcggctcgagtcaccaggcaacctggtatgattctcagtgcacggtccgccttcagaaggcaaagctggttgtgtggaagagaaaccagagtcctgctgaggctggacagagtttcttcatcaagatcatgaactattttcagattcgtgtccaaatgaaagacagaaaggatgtgtgaatgttttcatgtgcacgtgtatggtggatgcatatgtggtatgtgcaagtatgtgcatacacatgcatgtgtggtgtgtgactgtgttcatgtgtgcta

SEQ ID NO: 1481 - DNA, 200 bp, Homo sapiens
  misc_feature (1)..(200): DMR9:91531501
tcgggagagccctcatcaggcagagagaaagcatatatagggtggggtctgtaaggtgggggggtctgggagggtgggagtgtgggagcctcttgtgctcatgtgctttctttgctgcttagtgtgcaatatttatttacttatttttatttttatcttttttgagacaaagtctggctctcttgcccaggcttgagcac

SEQ ID NO: 1482 - DNA, 1600 bp, Homo sapiens
  misc_feature (1)..(1600): DMR9:91533501
tggccctgcctcccaccccacagatgttctgtctgtttcacacccgcctgtacttactctgcaccaggaactgtctgacatgcctcataaatactgactcatttaatcctcaaaacgaccttatgagtcagtcccattattagtgccattttacagatacggaaactgaggcacagaatattaagttacttgctctccattcccctactactaagcagcaggggtgggattcagactcaggcagtgtggctttagagtctccttcctaacaatggaactatgctgccttgagcggaaggccaacacgagggtggagaattaggtaggcgatagcaacacagcgtgtttggcccacgcttcacctggttgtcattgcagaggggcgaggggagtggtcaggaaaaactagctgggcgaagcagcactgtcgtgtgctctgaaatacattaaagcctgatgggcatttcctaaagtgtgaatgagactcaattcttgacttctccgtgcctcgtgtccccccggtaatgagagcagccgccttacaggttgtgaggtctgagtgagaaataaacggtgccatgggaagacagccacactcgctagctgtgatgaggagcgtaaggaccaggtcctgacttcctgcaggctctcacttggcccttgtctgagtccttgggctggtgtccactgctggggaagaaggcagagtaggggaaagaaggaagctcagaaacaaggtacagggggctgcctgcagactacttaagagcatcagtttgcttcttaaactgatacactggctctgaagtcagtgccagaagagctccagaatggtttctagtggtggtatcctaaacacacacacttccagggggcagttttgatgcagaaccctcatttggactttttcttttttttttttttttttttttaagcaaacctctctttgctttataccagattgcatagacagccttttagaaatcactcagaaaatgtgtcttcctccagtcactgtagttcaccataataatgtgaaatgtaggacctgtggattgactttatgagtccaggacctatgttagcactgcattcctttgagtctggtcatcttcaagccaaagccagtaacagtgcaggcttgctcacccacctgagcctgcagctggtcctgagctttctcccaacaatcccctcagatctgtgtctgaaaatgcatctgtaacagtgatggcattccctcatcatatgacactttgtattttatttgtataaaataaagccagagttactgtattaggcagggttctccaaagaactagaaccaatggagatatataaatatatgtatgtgtgtatatatgtgaatttatatctgtgtgtgtatatatatattatattatatacaatacctgatgtcacaccattcagaattcagtaaatgtgttaacttttgtcactcctataaagtcaggcattgggtcctaaacatgtattagaacatgtcaattacctttttgtgttatgctctgtattaacagcctgaaccaaggagcgctataaaggctttgctttcccctcattagtggctgactttgca

SEQ ID NO: 1483 - DNA, 5300 bp, Homo sapiens
  misc_feature (1)..(5300): DMR9:93033601
tattctggggggttgcaggacagctgaaaaagaaaacgtgagtttccagaaaagcacatcgccctttctctccactcgacacagcctgcggtttgcagtgccagctgcacgttggagtctcctgggaagcttctagtgttgatctccctcctagaggctcagtgaggtgatcggggggtcagtgtgttttcagagtcccagctgctctgacttacagctgtggttggagccctgacctaggtccttggtctaagaagtcaaggatgtaagtctattaggactgagtgttgaatggtcttgatggtgaagaaggaccttgcactgcctaccgagctccctcatgcctgcaatttaaataccgaggtgtgttctgagagccccaggtccttggggcacgggcctccagggccctgtaaggtggactctggcctcgaaggggggcccaggtctgaggggtccagctctggcagggggtgtctaagccacgtccaaatggtggacagtagctccaacagtgacatgacagagggagggcctgtgtgtgtggtgtgtgtgtgtgtgctgtgtgtgcacgcacgtgcatgtatatggtgtgtgtagaactgacacgcttgaagtccctgtcccgtgacccaccctcaggtacttgctgttgggttttcctatgattttgatgtgtcctgacccagcatatggatgccctccccttggagggcccagcctgcaaaccccatctgataccacacatgcctatgtcctgcaggcttctagtgacccttgcaagccgggtgaggctggtcccagtctctgtgcagatcttggccatgtctccacagccagctccccccaagcagtggccctggccctaccccagcctcctcagaacaggggtgaccactgcaggggagactgcccctaacctgtgtctttgtgtccccagaagacacccactgcagacccccagcccagcctgctctgcggccccctgcggctgtcagagagcggtgagacctggagcgaggtgtgggccgccatccccatgtcagatccccaggtgctgcacctgcagggaggcagccaggtacgtgtccccaccccaccaggccctcaggccagcagcccagagcctcaggcctgaggcacccacagcaggcctgtgccaccagctggggtccacctgcttgagcagtgttacctggggcctcagtttccccggcagcgcaggattccctctgcttgccagtcacaggagacagaacctactggcacctgggtggaccccagagccagccagggtgcaaggaggggtgggccaagggggcacaaagggtggccaggagccacagaacctgtcaggggagactcaggaacccacacagccctggcccggccccttggagccccagttgctactctgtcacaggggctggcctgtcctgcctcgcctccccaggggccagacagcccaaagaaggccatggagtctgggggtctggtgaggtgggcaaggcatccccctccctatatctccctcgggaagaaccagtggatgcccccaccgaccgtcctcctgttgacaaaaggcagtgcaggcacagccaccagacccctcgggctcagcacctgccttgcgttgcaagggtctgggagtggcctcctgggagaggcccccatcactgaggtgagcccgaggccgggaagctgtggccccgctgaccatctgctcctctgctgcaggacggccggctgccccgcaccatccctctccccagctgcaaactgagtgtgccggaccctgaggagaggctggactcggggcatgtgtggaagctgcagtgggccaagcagtcctggtacctgagcgcctcctccgcagagctgcagcagcagtggctggaaaccctaagcactgctgcccatggggacacggcccaggacagcccgggggccctgcagcttcaggtccctatgggcgcagctgctccgtgagctgagtctcccactgccctgcacaccaccacattggacctgtgctgtcctgggaggtggtgttggaggccccatgaagagcgccctggactgctgagggtgggccaacagcccagagctcaggacacttggctttggggggaaggaaactgaggcccagagaggggcaaccactggccaagggtcacccagcaagttttggctaagagcctggcctccagccccagcagtgtggcccagagcaggggccgactgccaaagtaaccatcatccatatgggccgtgtggtgatgctggcccggaaggcagaaagaggcagcatgggcactgccagggacagccacatcctgctggtctgcagcgtggtccaccccgcctctgcccagcctgtctacaccgtgtgagctgaatcgtgacttgcttcccacctcctttctctgtcctctcctgaggttctgcctgcagcccccaggaggtgggcctgccccatcctagctggactcatggttcctaaataaccacgctcagaagctctgctaggacttaccccagccactgagtggcaggcgcatgagatttgtggctgttcctgatgctagtggcacacagtgcttatctgcataaataaacactggccaccagcagtgggcgcagcctcggtgatctctccccagcccctcagcagcgtccccccacaaggtgggctggctgataaagggttgagggacaagggtgatggaatcacatcggccacacaccacctggaaagcagttctgcatctgttgtcctgccagggggtgggcaggtggcaggtgaagatggccaggctcagagatggggagggtggggtgcagggcactcaagatggtgccagtggggaccttgcaaaggctacttggggtgggggtgctgtttgcatcagagccctgagggcctctgggagagagtgggggaatttagggaccagtgattgggggtgctcactggtcaggacccccgcccctctaatatccatatagcaccatgtggagacacctgggaagacaagcagggcacctacctgggggactgagagggcaggaggaagagccagaaatgggagactggtcacaggtgatgggggggacaggtgagatgagaacacaggtgaggcggagacagctgagatgggggcacaggtgagggcacaggtgagctcccacgagctctagctgggccacgcttgggatgctgctgcagccactgcacacggagcccctgctggctacctgggcctctgccacagcttcccatgctatgctggatgttctggtcccacttcacactaaggaaactgaggctcagggatgctaaacaacctgcatacttccacattggacagtgcccaccagggggagatggaatcagaccctttcagctgcacagcagcgtctcaatcggctccagctgctgcccaaggaagcagcaaagcccctcacccagctcaggctggagcagggacggggtggaggaggcctcgaggggaccccagcccgttggccctgccttctcccctgcagagctgagctctgactcacattcatcccctacagagcagtgccggagccgctccctcacacacgtctactaagcatcggctgcagccctaatgaggcccttctttgaagggtcaggactccgtcctctgcctgcttcagtagttctatttctgccatctcaccacaaccccaggaaatccccacttgacagctgaggaaactgagtcatagagaggccacccccagagccccacagctccggaaccgagcaggcacctggaattggcctgccggccatggtgaatccagcagggcaggtgtctgctggggccaaagactgtgctgtggggtcgccatggagagtcccctagcctcgagccctctctcttgcacccaccaacctggctagtccgctgggaggcagagacaaggtctgtcaccgcaggcctgggggcagggcgtgcccccagactctgccgcctgctgcgaggccagtgctgatgggagcttgtttgctgtcatactggtggctgtagtctgttcccactttttccaaaagaggaagctgaggctcagacaggggcagtgagaggcctccagcatgcagagcctgcgtgctgtgcccttacagagctggccttcctagggtctgttcccagagacccctcctgcgggacaccccagcaaggatgctgctggggagctggctgcctgggcctggcctctcgccacacactgccccgcccccagctccagccctcccatcccacagcccagggcctgggcacactccactgcccgtccatggagtggcagagcctggacacatgctggctggtcgcatgctggcttttggcctctttaccatcctccctcccctttctccccaaggccacccccctccagaggcataggagaccaccccctgggtggggggaagggaggcctgtggctgagtaggaggtggctcccggggtctcgggcctgaagaacgtcgaatggggcagcacagagtctggggtgtgggattaccacacctgggattaccatgggtgtcagggagggactgggctgggggcccttccgaggctcccctgcaccacagcctgcaggatgggggctcctggtaccagcctagggcctgaggttggagcacactggacaccagagcagaaaggctttcacaggtgcaagagcgggggcggggaggagagagcaaaccagggcggaggggagggagtgtgcttctgccatgggcaggttccccacccggcacaccccacctctctaggcccagagcagggtgctggctgcagcctggcagacctggagaagatgaatgagcctccaggagggcctgctgcaagcccagtactccccagctgcctgagaggagaattatgactgagaaggcgtcttggcaatagtgaaacagacccagagaaggaagtgcactttcccaaggtcatacagtgagttggggactgttcaggattccctcgttcacttttttttttttttttgagacggagtctcactctgtcacccagccttggagtgcagtggtgcgatctcagctcagtgcaccctccgcctcagcctcctgagtaattgggattacaggtgtgcaccaccacaccacacctagctaatttttgtatttttagtagagacggggtttcaccatgttggccaggctggtccggaactcctgacctcaggtgatctacccacttcagcctcccaaagtgctaggattacaggcatgaacc

SEQ ID NO: 1484 - DNA, 800 bp, Homo sapiens
  misc_feature (1)..(800): DMR9:94385601
ctctaacagcatttgttcaagagaccattcttttatggcacccttgctcaaaatcagttggccatacatggcttatttctggagtttgcattctgttccattggtgtatgtctatccttaagcaagtcccacactgttttgatcactgtggctttgtagttttgaaatcaggaagtgtgtgttttccaattttgtaatttttcaagactgttttggctgtttggtgttctttgcaattccatatgaatttgaggtgatcctgaattctgaataaggacctccttttttttctttacttatttttttgagagaaggtcttgctgtgttgcccaggctggagtgcagtggtgtggtcgtggctcactgtaatcttaaactcctgggcttttccatttctgcaagaaagtctttgggaatttgatagggattgtattgaatctgtaaatcacattgaatagtattgatagcttagtgatagtaagtcttccttcctgtggacataaatgtctttatttaggtgaaatttgttttcggtaacgatttgtagttttcagtgtataagtctttcacttcctgggttaaatttatttttaggtatttttttttcttttagatgctgttataaatgaaatcactttcttaatttcatgtatgtatagaacatatcgtgtttgtatcgtttttctgcattgtctaatctgcagttatcttattaggcacatttggagcagtgctcagtgtaggactaattattctccactactcaggcaaggttttcctgattttgtactcagcactat

SEQ ID NO: 1485 - DNA, 1100 bp, Homo sapiens
  misc_feature (1)..(1100): DMR9:95044801
gggctggtgtgcccctagggcctgcactagagaggcgctggcagtgggggaagggggagagtggagagcttacttggcacctgtagtttacatttgagggttacatttggtaggatcatgggttgcgtcagtccctctcggcacacatctcaggctgtgcagagttggtgttgaaggaacgtggggaagagggtggcccattttatattcatgctcagaaacaggggtctttagccagaaagggcgcgccaaggacggtgctgtttcctgacaccctggagagttgggcgtcacagcgcttgtgcccaaggtcacaaggtgagtagccaggcaggattagaccctggtccgggttactctccagccaacggcgcccctagcgtctgcgaaatcactgtgcttggaggaaaggacgacaggttttaaagagggagtgtcatcgcctgcagcgggcggacccgtgtcccggcagtgcagctccgcaggcgcaggagggatgcgggctggggacgccttggggcggctgcaggctggggcgcgcccctgcacccggcgggcctccgctgcgtccactgcggacaggggtcggtgagaggccccaggtccagcgcgacttgcttttgttaaaacctccttgtgttaggtgtgctcccagctttggagccaggcttttggacacgcctgagtttttctaaagccttcttgttccggtcttcccgcaccttccagtgcggtcaaggatgctggtggctgggtcctctccgcggagggctctgggtcgggacccttgcacccaccctggggccttggcttcagaaccagttactcgtgtcaaggattgctgtacagcagctgccctctcctaagggccaggtgttttcttttttttctatggatgattgtggtcctcgtgcttctaatttaaataggtcatgctttaagccttcacagaggtgctccagggacagatagatgtccatgtaacgtagctcccctaaccctcattaaacgaacttgaggccagttgagaggggagcagtaccagtagatttcaggcagcatcacgctgccggcccctgcggaatggagagtggtgttcg

SEQ ID NO: 1486 - DNA, 300 bp, Homo sapiens
  misc_feature (1)..(300): DMR9:95329501
ttaaagtggatttaattgccaattaaacataaaattatagaaatcataaaggtcttttaaatacacacacacaccgacacacacacacacacacacacaccctatagcttttacttcagaacttttggccatgagttaaatacaaattcactggcttgcaaacaaaaaacctgttggattcaaacagtggttttattttattttttgagatagagtctcgctctgtcccccaggctgcagtgcagtggcgcagtcttggctcactgcaagctctgcctcctgggttcatgccattctcct

SEQ ID NO: 1487 - DNA, 600 bp, Homo sapiens
  misc_feature (1)..(600): DMR9:97318301
ggtcctagagaagaggcaaagtctggggaggaaggggctgggggtggtgttagggaaggagtgctgaggctctgaatgctgtcaccatggttctctttccctctctcactcctgccctgctcctcctctcccctttatggtgccaacatgtctggccaccagtgagttcatggccagtgagagtatccatactcccccggctgtgacgaaggagctagaggtcatgctgaagacccagaacgtcctgcagcaaaggcggctgaagcatctctgcaccatctggtatgggcaggaggggcggcccaggaggggtgcttcttggggtgcagtgagggaggcagaagtggcctgcagtctgtcccccaaggcatccttcagactaagcagaccaactcccagctctctggccctgggctggccacctggaccatttcagccccactcacaagaaaggccatggcccatttgctgcaggaagaaacttagtgtagctgccaagcaacttgaaagaaacaatgaacgggggtgaggaaggagcaggcacagatcagagcacgcaggaactgtggccaggtggagggatttggacctttttctgag

SEQ ID NO: 1488 - DNA, 500 bp, Homo sapiens
  misc_feature (1)..(500): DMR9:97415701
gagaatcacttgaacccggcaggcggaggttgcagtgagccaagattgcgccactgcactccagttgaaattcctatgatatactttcttttatgcttctaatggatgatgtctaagatattaaactttatttttatagttagaacaaagtattcttatataccttgagagtataattgccatcttccgaaagtttcaaaaaaaagtcatcatgagccacgtaacaaaactcagagcatttccaaagtgatatagtttagaaaataatgacgattttttttaaagcttacactttctttttcgttcactgcctgaagtgatgttgctaatgtgggaattgaaatcagactggcaagtcgtgcatttgaatacaatcacatttagccttccaggttttactgcatttaactgcttctcaccagcttggagacccacagtcttatactccaagggattccccttcccttcaaaaagttgtttgcaaatagagagttatagtc

SEQ ID NO: 1489 - DNA, 1100 bp, Homo sapiens
  misc_feature (1)..(1100): DMR9:98644001
ttccctcctgaaattagctagaactgagtttctgtcacttacaacccagaataccatccagtgccacctgttgtctctccctcactgcactgtcacctggaaagcggagcgatgacccatccggatcttcacattgcccaacacacagcagggaaagatggtgtctacacagatagttgtggtgcagacgccacccaaacacacttgcagccctgaccactggcaaacatagacacatgatcactgaccagtcataatcatgacctccaaagcagatgtggtggataattacacacattgtgggcagcaaagagcagaaaggataagacagtgggaaaggagtcagggaactgaaacagatcttggttgcctgtgtcaatctaaaaggaaccctgggtttaacatggggaccttggaatttgccagcatgttaacccagattcagccccagagaggcctctagtgcaggacagttctccaggtggccttgggccaacccggttctcctggctttctcacttgtagttctcaagaataactgcagaagatactgggaatgggctgggcgtggtggctcatgcctgtaatcccagcacttcgggaggctgaggtgggtggatcacctgaggttgagagttcgagaccagcttggccaacatagcgaaaccccatctctactaaaaacacaaaaattagctgggcatagtggcagccacagctactcaggaggctgaggcaggaaaattgcttgaaccttggagacagaggctgcagtaagccaagatcatgccactgcactccaacctgggtgacagagcaagacactatctcaaaaatgaaaaaataaaaaacaaaagaagatactgggaatgtaacattctgatataaggttggactggccagaacaactaggtcctgctcctgtccctgctacaaagaggatatccttcagcactttagcccagcaatatatgttaccccaaggtataaaacccagggcgggctgttttctggggtccctcagcttcggaccaagtgaggcacacgctgacaagactccattcattctggacagctttcctgagccttgagagactggc

SEQ ID NO: 1490 - DNA, 2500 bp, Homo sapiens
  misc_feature (1)..(2500): DMR9:100342901
actttgggaggctgagacaggtagatcacgaggtcaggagatcgagaccatcctggctgacacggtgaaactccgtctctactaaaaatacaaaaaaaattagctgggcatagtggcaggcgcctgtagtcccagatacttgggaggctgaggcaggagaatggcgtgaactcgggaggtgagccaggatcgcgccactgcactccagcctgggcgactgagtgagactccgtctccaaaaaaaaataaataaaaataaataaaaactagttatatcaaggatatagctagctaactattaagaatacatacagtagtagttcaacatgtgcacaaaatgttagaaattgctgcaactagatgggggtaggcaagtgcttattgtattccttctgaaggtttgactttaaaataaaaaagataggtaagggaatgcaaaaaaaaaaaagaaagaaagaaaagaaaaatagtgccaaggtaatcaaatgtaaaacaacaatcttttcaacaaatagtgctggaataaatggctgtttatatgaacaggaaaaaaaaaagatacacacagtatttcagaaataaacaacttcagttgattattacagaatctgactattcagccactgcatgtaagacttaatgtaccctgagacttcttttcaaagtaaggatcaaagcttcaaattactaaaaagtttaaaaaaaaaaaaaaactacctgaatacaagtgaaatttcttgactttttgtaaatactagcaaactaaatgcattaagctgcagcaccaacatgtaaaagcaaacagtcagtagtcctaagactatatctaaccgagacatcaatttaccaatagaaaaatctatacagtttctgagagaaaaagagttacaattcagcttgtggtgtgtgatctgacatcaatgccaagcaatgctatttggttcctcctaaagattaggctgtggccaggcaaagaggctcatgcctgtaatctcaacactttgggaggccaaggtgcaaggatatttaaggccagaagttcaagaccagaatgtgcattttaatgtcattttgtatagaatgctactaacaatctatcattttgtatagattgtaccaatgatgtacatttttatactctgtctctaagataatggttcctttttaaaaaataaataaataaataatggttcttatcaagttattacaaatctgccaaggtgaattagagcattctaccagtggatgtttttaaatattattcctatctgaatttatttatttcagctttatacagtatctcaatttgtattctgatcttcaacagtctacgcagtcttttaaacttaccattatatgttaatgagctgctaataagcctagtcatgttataatagcacaaaatagttctaaagcatactattttaaatatccataaaactaaagcagtatttagatcctttgttagtgttatccagataagatgacccaaaactagcataattaataaattttcagattttgaattttggtcctactagtctatctaaatacaaatgctactaacaaagcagtaacaaaagtttactagtgcttatatgtaatcaaacaccgaagaagcttggaatttttacttcttggctctctaaaaatgaaaaaactaggccaggcgtggtggctcacgcctgtaacccaacactttgggaggctgaggcgggtggatcacctgaggtcaggagttcaaaaccagcctgcccaacatggtaaaaccccgtctctactaaaaatacaaaaaattagccacgcatggtggcgggcacctgtaagcctagctactcaagaggctgaggcaggagaattgcttgaacccaggaggtggaggtctcagtgagccaagatcgtgccactgtactccagcctaggcaacaagagcgaaactatgtctcaaaaataaaaagaaaagaaaaaactagcactcaaagtccatgttgaatattactttttcttttttataggacatcttaaggactttagcattacttttattttctatctgaacctttcagatgatcatagatcaagactgtaagtactatatactttttttaaaggagctatatacattcttactgtctctagcctacatcacaaattaactgccatatgagaaacaagctttgctttctcaaaatcttacattatagccctattattaattttttgccaatgtatgcaatgaatcataaaacaaagtctcaaaaccgtaatcaataaaatgccatcttatttgaaaaagcaattgacaaaacattcctacagatgatgagttaacagcaatagaacacgctcttaaaatatacaccttactacaactctataatgcttttcaagactatcaaatactacttaatttatcccgtcttatgcaccatactgactcattctaaacttcaacttgaaataaaaataaaacaaaaacaagaaaactaccttctcagtt

SEQ ID NO: 1491 - DNA, 200 bp, Homo sapiens
  misc_feature (1)..(200): DMR9:101392201
acatgaaaaaagaaaaacttcacataaacaatctaaagatgtaccttaaattagaaaaagacaaaccaaatccaaaattagtagaaggaaagaaataagatcagtgtagaaataaataaaatagactaaaaaagcaataaaaagatcaatgaattaaaaagttggtttattgaaaagttaaaatcaacaaacctttagct

SEQ ID NO: 1492 - DNA, 4200 bp, Homo sapiens
  misc_feature (1)..(4200): DMR9:101701301
tacagattatttcatcaccgacgtattaagtctagtacccattagttgtttatcctgatcttctccctcctcccaccctccagtaggctgctgtgtgtattgttcccctctatgtgtccatgtagtctcatcatttagctcccacttgtaagtgagaccatgcctagccattgcagaaaattgaaactgggcccctacctttcaccatatacaaaaatcaactcaagatggattaaaagcctcactgtaaaaccccaaactacgaaaaccctaggaaaacaaacaaacaaacaaacagacaaaaaaccttgacaataccattcaggacattggcacagacaaagatttcatgatgaagatgccgaaagcagttgcaacgaaagcaaaaattgacaaatgggacctaattaagccaaagagcttctgcacagcaaaagaaactatcaacagagtaaacagacaacatacagaataggagaaaatttttgcaaactttcaattatatagatgattaggagttttttcattcctctctcttacctccccaatgaccttgttctggaatctgtatcagcagtctctctctatcctgagatctcccaccagcttacagatattcttagtatcatctactttcctccttcagcttctattccatacagatttttttttttcagtacaagcctgagatttgtgtatacttaaaatcttcatttcttcgctgggcgtggtggctaacgcctgtaatctcagcaccttgtgaggccaaattgggcgaatcacttgaggccaggagttcaagaccagcctggccaacatggtgaagctctgtctctactaaaaatacaaaaattagccaggtgtggtagcatatgcctgtaatgtcagctactcaggtggctgaggcacgagaattgcttgaacctgggaggcagaggttgcagtgagctgagatcaccccactgcacctcagcctggttgacagagtgagactctaatctccaaaaaaaaatttttttatttattcactttacattttcttatccaatcaggccttgaaactcaccatccatccaaacaacttttataacaatcatcaatgatcaatgctgaaaagcttgattttcagtgtacatatgactcacctctacatacctttcagcacagttgttcactccctcttgaaatacctcatcctctaggcttctcagtctcataggccttgttttctgatctcagcagttgattcttcccagtctgtcatttctctaagtttggtgtgccacaggccactgtctttgcctctcttcttatctgcactctcactaaatttagatatcatctataccccttattcttcaatacagagatcttatatattggactccattcttgatatctcctttagggttgctgttaggcatctgaaacttaagaagtccagacaaatgtattactttcttttctctatccccactctagatacccctgccaaattcacttctctcaaagcccttctcaagtcaccatgactgcaccatcactcacaccaactgctcaggccaaaaacgaagaaatcagcttttaatctctctttttcttcttgtcactccttaatccatcagttagtcccattcactccaaaatatatcctgaattcaatcactttcatcatctccttgcttgtacagtaagcctccatgtctatcacctggtctacggtgacagactattgtgacagactcactggtatccctgcctccaccactgcctattcagtaattagtttgacacacagacagcaggcagagtgatttttagaaaaaaatctaaattcacatttttcctttgcttaaaacacttcaatagcttcctcattgcaactaaagcaaaatacaagctctttactctctgccctaaatgatctggccttgcttactgttctcacctcacttattccacccacgtggtcccaaagccttgaggttcaagctagttcctgtctcataccctggtggttgctgctccatctgagtggaaccttcttcctctagatcactatgcggctgattctttcttcacattcaggtctcagctcatatttcagagctgtcctccctgacattagcaatctcctcacagcaccacccaccatcaaatgcatattttctttttatgacactattttatcttcctcagagcacagtcaatagctgaaattatcttacttagttcttcatgagtttgctaaacaattcctcactactaaactgtaagtccctagagggtccagacatttgttcctcactataatctcaggacctaggaaaacgttcagtggcatttggtggctgacttactgactcaggatgtctctgtatcatgcattaaaatttatctttctactgaagagctcacattttgattgataacgcatttctcagaaattgtccttgtggaattgttttgggggcttattatttattatcgttactctggggtttattattaattcgttttggctgacctgtagaaatctgtctttttggctgcctctgtctcgagcaatcccagtctgatactccctctgcctccactactgtctcttcatcaacatctccatcttgatcttatctctatcttggtctctaatatctttatctaatttagttcctttgaggctttatttttgtattcctcttttgtttaaacacaagcgaaagggcttcctttaaaatgagcgtaataatggcaaacaacggtatttactaagcattagaaaccattatcatcatatccaagcagcttgctgctttagttaatgtcttcaaaagatgagacgttttagctgttattaaaaaaaaatcattatgggacagttctttactgcaaaattggatatcctgtagatcaaatcatgtttcctaaaatagtcttacttaggattcctggtaaaatagggctagtccattccatgtcttcatgtcatgttatacagaggcccaactcaatcctttgatgtctgaggtcatattcacttccagggtaactcatgtttctaggcaatatattttagatttatttatttgttctgaaaatatgcattgaatccccacaatgtgctaggcaatgtgacatatacagacaattctcaacttagaatgatttgacttaatgttttttttattttaccatgtagcaaaagcaatacacattcagtagaaactatacttcgaattttgaattttgatcatttcccacaatagtgatatgaggtgtaatactctccactcttttgccatgctgggcaacagcagtgagctctgcagcacccagtccagccacacgatcaggagggtaaacagttaatactctgcaatctttccagaggattttgcctaattataggctgatagaagtgttctgagcatgtttaacgtgggctaggctaggcaatgatgtttggtaggttaggtgtattgaatgcatttttaatttaatttaagatattttaatttaatttaagatgttttatgatgtgtgtatttttatggtatgtgtattttatagtgtgtgtattgggttgtaacctttttgtatgttgaggagcgtctgtattgggaatgcagcaggaatgagcaaaacagacatgttctctgtcttcctgagtctcaaaagggaggcagatattaataagataatacatttgataaggaagggggggcagggaaatgctgggtagagaagggctaggtccctggcaagggttccacccttgggcctgtgcccatagacctaaatgagaacacgcactcctgtttttgtgcccaaaagttgcatttccaagaccactctagcctaccatgcctctccacccccatcctgtgcccatataaacctgagaccttagcgggcacacacacaagcggctgaatgttgagaagagcagaggaacagagccgcagagaacagaagagggaggcagagagcgcagagaacagtagggcagcgccgcagagaaggaggaagaggtgtctgaaccaagccgaccgccaagaagaacggcggaactccaggcaaagattacctctcccgcctccaccttcccactccagctccccatcccgctgaaagccacatttactgctcaataaagtctccacattcatcaccttttaaacagttcgtgtgatctgattg

SEQ ID NO: 1493 - DNA, 200 bp, Homo sapiens
  misc_feature (1)..(200): DMR9:102114401
tcaggcacgtgggactacacctgactaatttctttttaaattttttttttctttgtaaagacagggctttgccatgttgcccaggctggtctcaaactcctgggctagaacgatccacctttctcagcctcccaaagttctggggttacaggcataaaccaccacaccaccacacctggcttgtggcatatattaagtat

SEQ ID NO: 1494 - DNA, 800 bp, Homo sapiens
  misc_feature (1)..(800): DMR9:103293901
ccttcatggctgttgatgtctagaatactcagaaatttcactagagacctgatgcaaactgcagaccaggacaaatctgtcagagtgccactgtctgctgtcctttcatctgaaggtccttcaagcccaatgtctaaaaatgttgatgggtagggtccagccctacggggctaagcgggtgttctccccgtgtgtggagacgagagattgtaataaataaagacacaagacaaagaggtaaagagaaagcagctcagcccaggggaccactatcatcaagatgcggagacgggtagtggccccgaacggctgggctcactgatatttattgcatgcaagacaacgggcagggtaaggagggtgaatcttctaagtgattgacaagatgaagcaagtcacgtgattacaggatagggtgcccttccctcttacgtagcggaagcagagagagaaggcagcatacgtcagcgttttcttctatgcacttataagaaagatcaaagactttaagactttcactatttcttctaccgctatctactacgaacttcaaagaggaatcaggagtacgggaggaacatgaaagtggacaagcagcgtgaccgttgaagcacagcaccacagggaggggtttaggcctccggatgactgcgggcgggcctcgatactatccagccttccacaagaagctggtggagcagagtgttcctgactcctccaaggaaaggagactcccttttgcggtctgctaagtaacggatgccttcccacacactggcattaccgcttgaccaaggagc

SEQ ID NO: 1495 - DNA, 900 bp, Homo sapiens
  misc_feature (1)..(900): DMR9:103388501
tagattttaaataactcaagaagagctgatagtctattatatttaccttgacttttaccagtttttttctttcttatttcttggtgtcattgtcctttagtgcaaagaacttctattagcaattttttttttagagtaaatctgttttctgtgaattgttttagttttcctttatctgagaatgtcattattttactttcattcctaaagaatattattactgaatatggaattatgggttaacaattcattctttcagtcctttaaaatgttatgccacatccttctagactctacaatttatgatgagaaatatgcaatcaggccaggcgtggtggctcacgcctgtaatcccagcactttgggaggcagaggcctgccaatcacttgaggtcagaaatttgagaccagccttgccaacatggtaaaatcccatctccactaaaaataacaaaaaattattcctgtaatcccaggtacttgggaggccttggtgggaggattgcttaaaccccgggaggcagaggctgcagtcagctgagatcactccatggcactcaagcctgggtgacagagcaagactctgtctcaaaaaaaaaaaaaaaaaaaaaaaaaaaaaaaaaaagcaatcattcaaattattattctcctatagggaatgcattggctttttttctctggctgcttttaatattttatctttgtctttagttttccagctttgattgtgatgtgtctagccctgaatttctttcgatttattctgtttgggattcactcagcctcttgaatctcaatgtttgtgtcttttaccaaccttgaaattttgggggcattatttcttcatattatttttctaggactgcgctctttctcttttactcctggaattctaatttt

SEQ ID NO: 1496 - DNA, 2900 bp, Homo sapiens
  misc_feature (1)..(2900): DMR9:104478301
atcaagagaaaacttactcatgtattttccatccattgatccaaatttaggatttttaaaacacttaccaggtcattttgatgcctatcaaaatccaatgaaccccaccccacagttcttgccacctccatgccccaggggacagggaaaagtttctgggttccaaaagagtccagcccacttttattttctctccaaatcctgtgtgatggagaatgggcaatttgttttccaaacgtttgttagtaaagtatttctgcagatcgagtgttgattttgtgtgccattattcactcacagtacaactcatattgacttgaagtcttttttattgctttcttaatattgttcatatccatttccacctcttccattgccacttgccaaaattaccatattttcccatcctcaattgcattaccctacctttaatcatactccataatgtaatcagaatggcagaagtggctttcaactatgcaaatctgatcttttcactttggtccttgaaatcatttagtcttttttgcttacaagagaaaattaaaattttttattttaccaaataaggctttcataatctgaccctttccactttttgcactcttctcacatgactcttacactggttatatttaattactatatctatttgaaatcaattaaatatatgtataaatatttaaactgatatatttaattacttcttgttatcccagctgtttcatgcccttgaaccttttaacttcattctttatgaccgaaacatgctctcatagacaccctcaagttaacctttttatataatcatttttttcaagatttggcttaagcatcatttcctctgagaagttgcccttttcgagctgggttaaagctctcatctctaccttcattctttcataataccctgtgcatgcatctatcttaatgccttctatttcatttttctggttgcttgcgtgtctctacaattagaatgtgagtaaattggagatattttcaattgtttgattcattcttgtattgccaacaggaactgcagttgattatacttactgaggtatttgaagatcatttattaaataaatgcacacataaccaacaaaaaatcttccaaaaataccttgctgataaatgttttaataaaatttcctctttctgtgagtgtttatggtagaataacaaaccaatgtggtgcttttctttcttagaatccaaagccttttccctataggctgagatatggcatggcaaaaactatagagtagcaattcttagaccttggtttacatcagaattgctaccttccccctcagaaaatctcagtgatcagggttagtgtctgacttgggaatatgcattttaacatatgattctgatgcacacagacatctgaaaaccagaactatagagagtaccttgcatattttctatgtgttttaccatgttcgaaaagccttaaataggcattaacatgcggctctgttttaactaagatattttatttcatcctctgggactattatcttgtctactctgaagtcaataatttcttgttttgatgctctagcaaaaatgcacccctcccaacacatcactccataaatttaaattataccatagatactaagtcttggaagctttcgatgtcttattttagattgagtcaccccctccagtgccatcaactatggatcaaaatatctctcaggtgaccccctgggactctgctaacttatagaagcaactgcacatggagttcctcaagaagatttcaaaataacctgagctcttaaggtgtctaaattaaagggaacctatgatttttggagctctttctctcaaacatacagtatcttgtatggcatgttttgcccccaagcaagatcttcattaatttataaaattcacacaatatgatacaaaggaatatttggtctgatacaataacataatgccctcagggaaagtacttttagaaataaaaattaatgatattctattttgactgtttttgtagacttaaaagatgatttaaaaaaccaccaggccaggcgcggtggctcacacctgtaatcccagcactttgggaggccgaggtgggcggatcacctgaggctaggagttcgagaccagcctgaccaacatggagaaaccccatctctactaaaaatacaaaattagccgggcgtagtggcacgtacctgtaatcccagttacttgggaggctgaggcaggagaattgcttgaatctgggaggcggaggttgcagtgagccgagatcatgcccttgcactccagcctgggcaacaagagcgaaactccatctcaaaaaaaaaaaaaaaaaaagaaacaccaataggtttctttgtattttagtgtttttgtggcagtatacaatgtggaattttatttattattcttattatagtccttcagagtacttataaatcaattatgcagaaaagtagctcttgttttcactcaaaagccttaatgcctttcctttaccataggagaaaagatggcaagaaatgagcagttaactattctcattgccaaaggaacatttagatgagatctatattttgctatgaatttgtgtattgtggacttgtgaatatacaaatggcaagtgtcagtaccactcttcaaaatggtatagaagacttattaaagtcaatagttcatatttgcattaacaaggactttgacttgaagtccatatgctgcttcataagaggaaagggaaacgtaacttgatttggacagactaagcagagagtctgctttctgatgattccttgtgttctaaatgggaaaagatctgtgtcatctccttagggtatgaacccctgatgccagatacagtgccccagcccattgttttctaaact

SEQ ID NO: 1497 - DNA, 500 bp, Homo sapiens
  misc_feature (1)..(500): DMR9:106089101
gtattctgtgatggtagtttgtatttctgtgggatcagtggtgatatcccctttatcattttttgtgtctatttgattcttttctcttttcttctttattaatctgtctagggggtctatctagtttgttgatcttttcaaaaaaaccacctcctggattcattgatttttttttgaagggtttttcatgtctccatctccttcagttctgctctgttcttatttattgtcttctgctagcttttgaatttgtttgctcttgcttctctagtccttttaattgtgatgttagggtatcgattttagatctttcctgctttttcctgtaggcatttagtgctataaatttccctctaaccactgctttagctgtgtcccagagattctggtatgttgtgtctttgttctcattggtttcaaataacttatttatttctgccttaattttattatttatccaggagtcattcaggagcaggttgttcagtttccatgtagtt

SEQ ID NO: 1498 - DNA, 200 bp, Homo sapiens
  misc_feature (1)..(200): DMR9:108269101
ctgcctttcagtatctccttgtctagtgggcaggggaagcctgcaaatggataagggctagaatgaaagattggactagcagctataaggttagagaaagagaagaaaatgatctctgcttgggtaggctgttcagggatgactctactggggccatggcatgagttccattctgacatccaattcagaattcaccaggc

SEQ ID NO: 1499 - DNA, 100 bp, Homo sapiens
  misc_feature (1)..(100): DMR9:109932001
gggcaggacgggaccagcagagcggctggtaagtcctggggacctttggacgctaggatggtccaaggggcttgcatttcactgagctttattaatgaga

SEQ ID NO: 1500 - DNA, 600 bp, Homo sapiens
  misc_feature (1)..(600): DMR9:110429601
gcttgagagtggtgtggtctagtctgtttctgagacatcaagagtattcattagctaggagcatccactctcagggtgcctcaagggggcactggaggtaatgatagattattggtcaggggatttaaggattctagatataactaccattaaattattggattaagatttgttcacactatgtatcattcgattaattacatattaattcaaaaatgtcctctgcaattattttcccaccccctttctttcagtgttatatcactaccagtatgccatcaacatcttctacaatatagttttaatcttagatacttacctatatgtcactttgctgccaaaagtaaatgctaactcctcaatgcaaccattttctggaatagccggtttaccacatgaaacagcttaacaaaggaaaaacaaacacgtgacttttttgagactgtgtgcaaaaatctttgaaatttcaaggggcagctcaagatctttttttgtttgtttgttttctttttttttttttttggtgtgtgtgtgtggggtcatgtttaaacatgagcctaatacctcagttcaaatacaaagaacattgatacaacataa

SEQ ID NO: 1501 - DNA, 400 bp, Homo sapiens
  misc_feature (1)..(400): DMR9:110884701
ctcataattcttgcttggcccttgattggcaattttatctatagtctcacattcgtctttagattaaggaaatatcctattactttgagtaattttctttccattgtttctgttcatctgagacttcttttacaatgaatgttggatatttgggaatctacatttaaaaattgatggatccttgatgtctcttaatttttcatttgtatttttaacactttactttttatttggtatcctgggtgatatcgtggacttattttcaaggtcaaatatttgatttttagctatatccatttcactacttggtagtggcttttggtttgtctgtttattagtaatggataaaggagggcaggcgatcagatttttttattttcaggaacactgttctctgaat

SEQ ID NO: 1502 - DNA, 200 bp, Homo sapiens
  misc_feature (1)..(200): DMR9:112669701
atgtttttctgctctttaaatgattatttatggcttttggagactacatttaattctcaaaacttttaatgtagaaatttactgttctgtatatagagcagttaaaaaataatttctaagaaacagcttctgaaaaatatttccttcttttttttttttttttgatggagttttgctcttgttgcccaggctggagcgca

SEQ ID NO: 1503 - DNA, 100 bp, Homo sapiens
  misc_feature (1)..(100): DMR9:113072301
ttccccaccacctgccggatcagggcccgtggggcgggggccgctgcctttgtcaccccagctctaactctcctgcctccctggcccctgccaccccctc

SEQ ID NO: 1504 - DNA, 800 bp, Homo sapiens
  misc_feature (1)..(800): DMR9:119111301
aaagattatatactatatttatcacattttagaatcagtatgatgtttattccaaattagtgaaataaattttaaagaattccttccttttgttttaaataactaagctacatagaaactgcattttaaaaaatttaaagacctttctattaaacactctgggcgttgctgtctctgtattacttgaatagttttcacattacatccgtgggtactttcaacatatgcttacatcagtcttgataatttatatttatttcagaagtaattttctatatattttaaagtttattagcaaagcattgcacattacattctttcatccatcattctttcatcttttcatccatatatagtttctctgtatccacggttataagttatttctgtttcctatcatggtttatttgagttttctcctattttcgattactctcgtttaatttggttgtttatatatgagtcctgttctttaggctgtgaacaccctgaagtcaggcattatgctttgcctacttctatcactaaaacaccagtacagtgcctttcacattgtacgtctttacttactgtgtgttcaactgaactgcaaacgcctggagttatttatggagaaactctccattaagccaatccaaaatgattcattaaacgttagcatttacatgggacaacatagtttcattttacaaattatgaaactgagagaagagttggtttgcccaaggttagttacacagcaagtttgtggtagaacagacttcttcccagcaaaccatgctgtcttcctaaattgagtt

SEQ ID NO: 1505 - DNA, 400 bp, Homo sapiens
  misc_feature (1)..(400): DMR9:120046501
tgtgcatcaggaaagtatctaggaaaaatccttctaggcagaaggaacagcagcgcaaaggtcacaggaaggaagagaaaagcatttctttgcatctggaatgtaatacataggcaggaagcagcagcagatgaggcagaggcaagcaagaggccagatcacaaatggtcttagaggcagtcctcaggaatggaaacccatggcgggtgaattgaggggagaagtgttggtacctaatttacattttttattgatacataatatttgtagaaatgtatgggacacatttgatactttgatacatgtatagaatgtgtaatgatcaaatcagagtatttaggatatccatcacctctaacatttatcatttctttgttttgagggcatttcaaatcttctt

SEQ ID NO: 1506 - DNA, 200 bp, Homo sapiens
  misc_feature (1)..(200): DMR9:120804701
taattgttcatagttgtctctaaaaattctatttttttttttttttttttttttttgagacggagtcttgctctttcgcccaggctggagtgctggagtgcagtggcgttatcttggctcatggcaacctccacctcccaggttcaagtgattttcctgcctcagcctctctagtgttgtgggaatcaggaggaccagag

SEQ ID NO: 1507 - DNA, 4500 bp, Homo sapiens
  misc_feature (1)..(4500): DMR9:121293401
gtctttccatttttttttttttaaactgtggaaacatacacacatcataaaatttgccatttaataggccgggcgcggtggttcacacctgtaatcctagcactctgggaggccgaggagggcagatcacttgaggttaggagttcgagaccagcctggccaacgtggtaaaaccccgtctctactaaaaatacaaaaattagccagaaatcacttgaacctgggaggcggaggtggcagtgagccgagatcacgccgctgcactccagcctgggtgacagagcgagaccccatctcaaaaaaaaaaaaaaaaaagaaaggcatttttaaccctatcttacatgtaaggaaattgaggctcagagagatagaaacttatccaagtctctcttttaacaataaaagcagcctcctttatatgtgcttattctgtaccaagcactgtgctaagccccaaatgttctttaccttattaaattcacacaactaccctaggaaaaaagtattataatccccgttttatagatgaggaaacggaggctcagagagccaaaacaacttgctcaaagccacactgctaataagtgatagaccggggacttaaatgcaggcatttctggtgggagctctttccacgatcacataacagaaggttgctctctgtttttctccctcttggaaagtccttcctctgcagagcaggaagctgcctcctgtggcttctcctgctcattctggcttgggttggggcattgtagaccctgccttcccctgcagctctgcagagcctgtgactctccaaagtcttctgctggttccacggtcccagcatctgcagccaggcctccctgtcttgttgtggatttgcgtttgtgcctgggcttcccaggggtgggtggtggggtgctgaaggggctaggacagttatttgcagccctggctactgacccaccacacctctcagggccatttcctccccgagagaaggggagacagactgctgaagtgggtcctagcaagaagggcccagagctcatacccatggccaaatctggctgcttccaggacatggggtcaggaagtagcagggccaggcccctccagatgtccagccctgggtcccagcactaggtggggctggctccggaagctgggaaaggaccatggctttggtccctgagacagttggtctcctggagttggcttcagccaagccccgctggccatctccccaacagctggccactcccaggatggacttggccaaagcagaaggccagccagccccgatggggagcactgctgtgtcatggagacccaggcctcagttctggcctggttgttgagagacctgagttctagatctactctgccaggcacttgtttgactttgtgaccctgaaaagtcaccctcttgttcttggtgtgatcatctacaaaagagaagacagactaatgaacactgctgctaataagtcctgctctgaacaacatactccaacagtctcacttctgttcccccaaaagtcctgcaactgggcatcactgtccctgtttacagatgagtgacctgaggctcagagagggaaggtaacttgctctgccttacacagcccagacctgaactctagcgtctcaccgtgaaatctgtaacgtttctcccgcaccatcacataccgaaggcaggcgtctgtgcagaaaacaggctgctcagaaagaagagtgcttacttttggcgagctcctgtgcgtcacatcctgggcttcctcactgctccatgctctaggtaccattctcccccttttagagatgaggaaactgaggtctggattgcagaagctgagtccagattcgcaaacctgtccacagggcttgccggaacttttccaggccctgttcagttccactgggtttcataactggcttctctgtttactgaccattgtcccaattagcaaaatccctggtcagaagggcgggtgctcctaggaggacccagagaacagcagtgagccaaaaagtaaatagactccaagagagggctttccatgagtggctggctgcctggaaaatcaagaacaacagtgtttggagtgaagagaaaagaacagggtggtgtcttccaggcccagccaaggcctttttgtacactgtggctggggatggaaggggcgggggaggccacctcctctggtctctggtagggggtcccgcagacatacagagaccaaggttacagaggaaaggagggcccagagctggttgtgttgtggaggtcctgggtcaactacaggggagggaggggtcccccagggggacatgggctgtacagcccccatcctgtggcagacacagagaatctgcctactgtgtgcctggagctgggcaggatccaggaatagccgagatcagaggtcaaggagatctccgaggtgcacagaagcagagaccaggacatgctcatgtactgagttggtagcagaagggctgcctccaaatcaaagaaaccatgccagacctgagtgccatgtggctcagagggcaggtgccacagccagtcctgcactaaatggccacagcctggggatcttccaggcctttggcctgggcagtcacatcaggtgtgtgaaaggctagagggctttcccggtgtcacctcctgccctggcctgggaagtgtcgtggggacagctgctccggagactcctggctgccaggcttgacttgggcttgattgatttagcctgttacctggaaagggcactgctgctccctgcccaggtcaggtggtgctaggagctcctgcttggtctccgcagacagagcctgggctctgaagccagtcagacttgtgtttgaatcttggcaacacctctttccagttgagtgacttgaacctccctgagtctcagtttcccaggctgggcccagaggtgaggtggcatgctgctatcagtgactgcagtgcctccttcctcaagtcaggggctgtggactgtctgatccagaacggcctgcagaggtgacctggccgaatgtacccattttacagatggaaccctgaagctcagagacttgtaggtcctggatttggttgtacaaccagtatctggtactgcttgggctaggaaagaggcttcgagtcagagcatcaggccctaccctgtattttgcatatgaagacactgaaacccagaaaggtacagtgacttgcccaaggtcaccaggaagtcagtgtcagagccagccctagcactcgggcctcttcctttccacctaggggtccttctcttgtacctgaattcccccattcccttgaactcatacatcttcttccaggctggaagcagagtaagacaatgttgcccgcatcatggtctccactcatcagtgccctgtagcaagggctccagggtctgtagtgagggctcccagagggcaagggtggggtctgttcaccagctctcctgtgccaagggcctgggctccagagctatatggcaggcaaagctgcaggccctttgtgatcattaacgtggtccctgggttgatggccagtggcctctggggccaaggtcaagccacagcagcccctctattaatcaccaactatgcaggtcagagtcacactgctctggaaggggcccctcagctgggcagttgctggcccaggttcagtctgggggctgggcagctaagaaaatttcttcctacttgtttgaattttccaaattgtctaatgagcaggcatcactataagcatattttaaaagggattgtttctggatttgtgttttataaaagaacaaaactatattggatatacacttgtaaagtttcaaatgctacggcaatgcttttacaattttttcggctagtatattaaggtataatttacatatcatagtgattcacacactaagtatacctatagttctatgaattttagtagatttaattggttatataatcttcaccataatctagtattagaatatttttatcaccccgaaaagttccctcatgccaactgcagtgatctaggcacttcctccagcctcaggcagccacggcaatgtttgaggatgaaattctcctccttcttccctttccagcaaacggccttaacagtttggtgcttaccctctgattttttaagggtatatgcaaaaacaggcaccattgtaaaaaggagaagaggagatatactatagccattgttgtgcaattgctttctgcacttggagatctccctgtgtttattgagtgcctactatatgccaggcacaatcagacgtagctcattcttttttcacagctgcatagtgtctattgtaatggtggctccatcatttatttaaccaggacttttgggtcctttccagttttcttcaaacaatgcttcagtgaacatccttgcacatatatttttgtgtttgttggtaagtaattctgtagaaagtggaactgttgttgcgttgtgtgttttgagtttggata

SEQ ID NO: 1508 - DNA, 1000 bp, Homo sapiens
  misc_feature (1)..(1000): DMR9:124183301
tgcatatgtctgtttctgccaacaggttgcacttgagactgatactagcagaaaacggaggggagaggtgggaaaaagagggaaggaggggacaggaaagctcagttgtgagattaagagctttgggatcagacggtggctgtgcaattcctggcagggtaactttgggcaagctctctttgagcctcagtttcctcatctccaaaatggcaataataatcccaagcttgcagtttatttttgctaagattagagactttatacatatatatgtataaagtgcttcatacatatatatgtataaagtgcttcatacataagtactcaagagatgttaccattgttaataatattataactaaatgttgtattagtcagctgtgctgtgtaacaaacaacatctcccccaccaaatctcaatggcttatagcaacaaaactttatttctcacaaggactataggttagctccgtcccatgtgttttattgttctgggacccaggctgaaggcacagccccactccgggacacgtcactctcaggacagagagcagaagtgcaggagagcaagctggaccatgcaactgcaattaaagcttgtgctagacatgcacaggtcatgtcgctcccttcccaatggtcagaggaactcactgcaaaggtgcagagagctgtactcctgcctaccaggaggcagggcaagactggggctggataatcctcttacaaagaagagaatgaattttattgtcaacaataaaaccatataccacaaccctatcattaggtattataacagtgtttcccaagcttgcctgatgataaggatctcagggggagggaggaggaaaaatatagagactgagtctcacctcagagctgctaagtcaggttccccagggaagggtcctaggaatctgtatattttaacaagtatctgattatctttttttttttttcttgagacagagtctctctgctgcctcccagtttcaagtga

SEQ ID NO: 1509 - DNA, 400 bp, Homo sapiens
  misc_feature (1)..(400): DMR9:124196801
taaaacaggagggtcccagagatccaaggctggacatggagcagcttcaggaaggcaggagtagggacccagaaagttgtcaggagatctggaggtagtgtcttaggctccttgtgactatctctctctttatctcagtcttccttcttattttccttcctttctctctccctctcccgctccccgccttgtctcagtatctctcctgcatgactgcctctttctatcttgtctctgcctgtctctgtctctccctcccataactgcatttcaacctttccatgattgagtcttctctctgccattctatgagcaagtggccaaacacagccagtccagcccagctttatgcctcctttcaaataaccagccaggaaggcaacccagtatccctgattct

SEQ ID NO: 1510 - DNA, 900 bp, Homo sapiens
  misc_feature (1)..(900): DMR9:124629901
gggcaactttatttcattaatttttcattaaagtgtaaacagtctgtggccaaaaggcaagaatctttttgaaatgaacattttgagatactaaagtagtaataaaccacgttgcccaaattttttcatacatgttatcaagagagaaagtaataaaacctcaaaatgacagttccagatcaaagcaaatacctacaaatacagagctatatgtgaattatattttatcatacaatatctagaattaaactcctagaaaattatatttagaatggctacacctttctgaactccagttcctccaaatcagttttttttttttttttttttttgagacggagttttgctcttgttgcccaggctggagtgcaatggcatgatcttggctcactgcaacctctgcctcccaggttcaagtgattatcctgtctcagcctcctgagtagctagtagctgagtagctagtagcaggcgcatgacaccacgcctggctaatttttttttttttgtatttttagtagagacggggtttcattatattggtcaggctggtctccaactcctgacctcaggtgatccgcctgctttggcctccaaagtgctgggattacaggtgtgagccactgcacccagccccaactcggcttaaaaccagtggaggctggctatcctagggggaagagcatgggttctgaaatccgacacacctgggttcctattcttgttctactattttatacttttgacccctgggcaagttactacatttctttttttttttttttttttttttttgagacagagtttcgctcttgttgcccaggctagagtgcaatggcacgatctcagctcaccgcaacctctgcttcccgggttcaagcgattctcctgcctcagcct

SEQ ID NO: 1511 - DNA, 100 bp, Homo sapiens
  misc_feature (1)..(100): DMR9:125043701
acctctccctcccaggttcaagcgattctcacgccttagcctctcaagtagctgggattatgatggtggtggcagcccatctggagcagctgctgcaggg

SEQ ID NO: 1512 - DNA, 2000 bp, Homo sapiens
  misc_feature (1)..(2000): DMR9:125269301
tttttccttcaacttttgggaggctgtttttttgtcatacatatttccttctctggagttaattttctgttaagcaagaaggatttcagttatgtattttttacacttgaactacctaaacttgtgcttgcatagaattattttcaactttaactccttaagtaatcgttttcaggatattttagtttttgttcttgttttttttttgagttggagtctcgttctgtcgcccaggctggagtgcagcctcccgagtagctgggattacaggtgctaccatgccctgctcattttttatatttttagtagagacaaggtttcaccatgttggctaggctggtcttgaactcgtgacctctggtgatccacccgctgtgctgggattacaggcatgagctaccatgcctggcttttttttttttttttttttttttggaggcagagtctcactctgttgcccaggctggagtacagtggcatgatctctgcttactgcaacctctgccttccaggttcaagtgattctcctgcctcagcctccctggtagctgggattacaggtggctgccaccatgtccagctaattttttttatttttagtagagacggggttttaccatgttggccaggctggtcttgaactcctactctcaagtgatctgcccgccttggcctctggaagtgctgggataggtgcaagccaccatgcttgggcagatgttttaatttgtaaaggaactaggaccaataattttttttactgtatacacattttagaataagttttaggcacctagctgtttgatttctggtaactaagattatagtcagttaaactttactgctggccaggcatggtggctcatgcctgtaatcctagcactttgggaggccgaggtgggcgaatcacttgaggtcaggagtttgagtccagcctggccaacatggagaaaccccgtctctactaaaaatacaaaaattagctgggtgtggtggcgcacacctgtagtcccagctacttgggaggctgaggcaggagaattgcttgaacctgggaggcagagtttgcagtgagctgagattgtgcccctgcactccagcctgggtgacagagctagagtctgtctcaaaaaaacaaaaacaaaagaatctttccttctttatgcttacctatattttctaacttttctggatatgtttcaatatgtattatgattttgtaaaaaatttcagaagggtggttattttttgtttcaaagctgaaacccagtttaaaactctaatacagtggtcagaggaagtggtgaatatcttgatacttcagtttctaatatttaatatatatataagtgaatggttgaggccgggcgcagtggctcacgcctgtaatcccagcactttgggaggctgaggcgggtggatcacctgaggtcaggagtttgagaccagcgtgaccaacatggagaaaccccgtttctggtaaaagtacaaaattagccaggtgtagtggcacatgcctgtaatcccagctactcaggaggctgaggcaggagaatcgcttgaacctgggagtgggaggcagaggttgcgatgagccgagatcgtgccattgcactccagcctgggcaacaagagcgaaactccatctcaaaaaataaaaaagaatggttgagtgaaggacttaacagactacataggggtttctataaatttttttttttgagtttgaagatgaaccagatacctgataaatgcttgtgtctgaaagaaaagtataaaagtataatttaattctaatactctttgtgtgtgtgtgtggccaaaattatgtttttgtatacctttttttgtaagccatttaaaaaatacaggctttaaacatactcttggaagtgtataaacagatactgtgtctgcttgttaatctaagatgtctgtccgaaaaggtgcttgcttggtcttgctcccttataatgccggtacacccacgctggagacta

SEQ ID NO: 1513 - DNA, 4300 bp, Homo sapiens
  misc_feature (1)..(4300): DMR9:125423801
cggagtgacagggccctgttgggggaggtggacccaggccccttcccgcaggaaactccttccacagcctgtccgaggttgtgaccccaaatcgtcccctcttgacctgcagttgggcccctgctatgctgcctggcgtccactgtggctgaatgagtgccgtgggcttatggggaccctaagagagttaaggaacaaatggttaggggtggttggcaggggtggatagaggggaatccgtcctggttctggagcctgagacctgcttgtaagggtcggccctgatttgctgtgtgacccagggttgctcctgtgcctctctgtgctccattcctcctccgcatacccgcctcacagagcggtcaagggccccctcgggattgctacacaccgtgggaaggtcaggggacagcatgggtggcatctgacagggggccctactgcagatgattcattgtgtgcctgctctgagccaagccctggggccggcactggtgacccagtggtggccagacaggcaaagcccttgtcctcacaggttgcccagaccccttctggtgggtgatggttacataccccctgtgatgggcgggattctatctcccccacaaattcatctgttgaagtcctaacccccactgccttagcatgtgactgtaatgagagactgggcccttattcatttatttaattatattttttgagacaggatctcgctctgtcgcctgggctggagtgcagtggcgccatcacggctcatgcagcctcaacttccctgggctcaggtgatcctcccacctcagcctcccaggtggctggggctacaggcatgtgccattacatccagctaatttttttttttaatttttcgtagagacggggtctccctatattgcccaggctggtcttgaactcatgggctcaagcgatcctcccaccttgacctcccaaatttctgggattacaggggtgagccaccatgcccggcaaagacagggcctttaaaggggtaattaaatgaaagtgacatcattagggtgggccctaatccaatctgactggtgtccttataggaggaagaaattaggacgcagatacccagaggggagacatgaggacagagggaaaagccggccatccgcatgccaggcagagaggcctcgggagaagccgcccctgctggcacctccacctcggacttctagcctccagaattgtgagaacatcagtttattttgtttacccgccccccccccgcccccaccaaatctgtagaactttgttacagcagccctcgggaacaaatacacccccaatatatgaacgtgcatttggagtcgtgagtgcagcagccccctaggagctgataccactgaaaatacgagacacccaattaaatttgaatttcagataaacaatgaataattttttcgcatacactgcatgggacatacttattatactaaaacaatccattgtttatctgaaattcaaatttaactgggcgtcctggatttgcatttgctagatctggccacgtggcctggcatctaaggctgtgactcccatccgacagaggttcaaggacagagaccagcctggaagccgagaagggggtgagagcctgaggctgcttcccaggcctgagctgctctccccaaacggttcccatctcccgcacaaacatatttattgggcctgatggcaaacagattatgcttgtcccaggaagggcagctccaaagagaaaaccttgaagtccgggaaataatgatgagggagttaaattaaagtgcataaaaccctcccgagagataacgtcagggtgagttacaggcccgataagggactgggggcttgcagagggggctcagaaaggtcgcccagcggcgcacagaggaccaggaatcataaatatggggcaagacgcccagccggggtcgccggggtgaaaatattggggtcattccaaaaacaattatcctgcttggtttgctcttcaggtcttgtaaatctttcaccttttataaaagatttctggagaaggaagcactctggaagtcttaactgatttttgtggctgcttcttggtggttctgctgaaggaaaacaaaaagacagaggaaaatgaaattacccagcattctcagaggcacagggctgggctgactggttttctcttattctttggagaatttgggctgccttgggttttgagtcctcccatttacagtcttgacaccatttaacagttcgtttgttctgttttgaagccagttgcagcagggctttcactgcccagtgggccctgttctatggggccaacttggcagccatcttgactggaggcagccatcttggcagaagcggtgcccgttctgactgaagtgcagccgtcttaactgaggggcgttcctggtggctaacaggtacccagatgctcgttctgaccgaagtgcagccaccttgactgacggggttcgtggtggccgacatgtacccaggctcgtgtgcccaggcagagctcctgaagctggagaatgggtctaggccacgcctggcctcgtgctcacggctccagctgcatcccctgccttcctattgtctgcccaagggcacccttggtccagtcctgtcctctgtggctctgtctgtgttctgggcttctcagttgcaccagcagaaggcagtcatttgtcccacaaatgttttttaaggctgggtgtggtggcatgtgcctgtaatcccagctattcgggagtatgaggcacaagaattgcttgaacctgggagatggaggttgcagtgagccaagatcacgccattgcactccagcctgggcaagacagggagaccctgtctcaaaaaaaaaaaaaaaaaaagcgaaaagaaaagctcattgagcacctgcacacttgcacatgccggccactgtgctgggtcctaatgcctcatcctcagctgagggcgtcatcttctgggtggctttttcctaggtttccctgtccccctccgcacgtgcacagccacaaaaccggctctcctcagaaatctctctcctatcgactacctcatttatttctcacaaccctgtagaggagggattactagcgcatttgacagatgaggaaactgaggctcagagggtgaagtgactggcctggtgtcacacagataggggaggaggcagagctgggagttcaacaccgacctgtacagctctagaacggcgctcttggtgtcccgtgccttagctgtgtgccctggcggactcactgggcaccctgagccttgctctcctcatctgcgcacgggatacatgttctaggcctgcgtggggcgtgcgggcgggagccatgcgtgcggggcgtgcgggcgggagctgcaggcgggggctgaggcttggagtctggaaagcattctaggggtggaagccagagcttctctgtgtgtgtgagaaagagtatccccattcagctttcatggtctggcacctcccaccacaatagaattattcaaactgagttaatttgctgagtgggacttggggctccttcaggttcaagccagattgaggtgtgggagaggggtagcaagggggtggccaagtggcctgagagtgtcccatgggaacacccgcccacccattcattcattcatgcatgcatgcattcattcaacaaaccttattttgtgccaggcctgctctgggcgctggggatacagtgagaggggaacaagtcagattcgagtcctcccccaccagagctcctatcccggggcaggagacagactggagctagggaggcccgggaggaggccactgctatgtggtccaggagagtgatggtggcacccggatggaggcaagagtggccctgaggatcccatggaagtgtaaagggtgactcagcctcagcgaggtgaagggacttgcccagggtcacacagttaacaggcggtggcgccagtttgtctgactggagaccgcgctgtcagccggccactgccacggctcccgaaacagcatcgcccataccgagtcccgagctaccccagctctagacatgcgtgcatgcacttcggtcacaagtgtgcctggggaagttgcgtgtcacccccttcttggaacacagtgcacagtggcccgttgaaggctctgagggaccccgcaggagcaaaaactgccatgttcagcgtggagttcccagacctctgtggccatggaaccttttggacactttttaacatacgttctagtcattggatatttgttgagtgtgtgctacatgccagagac

SEQ ID NO: 1514 - DNA, 500 bp, Homo sapiens
  misc_feature (1)..(500): DMR9:125888501
agaaacagatgctctcacttgatggcatttttttgggagggatacgatttgatatttctttttttttttttggccgtttgttttctaatgtatttcctctcctagattgggtacaaacttagtaaagttttggacttgattacttactcattataaaaacagcattaatgaaactggtaattaatttgttcataaatttataatgccctgtttcagtctaaatgaattctagtaactgtttatatttgagatataaattcttaatttttaaaataatttttatggcaggccaatatagtagtctggactggaaagtgtaagcaggattgggtgctaatttaggtcaggctgcattcagatttgggaagtcaccttttcagctcctttggaaaagaggacacatccaatatggaatattctggatgattatgagtatgaagtgaaaatgtttttccaaaaatgtacatttttgggtgtaaaatatgctttgggaatttact

SEQ ID NO: 1515 - DNA, 1100 bp, Homo sapiens
  misc_feature (1)..(1100): DMR9:126711601
ctgggattacaggcatgcaccaccacacctggctacttttgtatttttagtagagatgaggtttcaccatgttggtcaggctgttctcaaactcctgacctcaagtgatccgcatgcctcggcctcccaaagtgctgggattacaggtgtgagccaccataccacgctgtttaattttttaacaaagttgtatcattttctgtatcaggtcttgcacatcttttattagacttatttttagattcctttctgtctattgctattttaaatattgtcttttcctggattgtttactttcataaagaagtgtggagaaaagcaatttagttttgaatattggtcttatatcctgccaccttgattaactctttcattaattctaataactctcagtagattagtttggatttttctatgtagataatcatataatctggaagtgatgatagttttgtttctttctaatcattataccttttctttctttcttttgttttaaacaccttggctagaacttccaataaaatgtcgattaggtagctatcaattgggatccttgccttgttctattaaggagaatgttttttactttttttttttttcttttttgagacggagtcttgttctgtcacctaggctggagtacagtggcgcatctccgctcactgcaatctccacctcccgggttcctgccattctcctgcctcagcctcccgagtagctgggattacaggagcccgccaccacgcccggctaattttttgtatttttttagtaaagacgggatttcaccgtgttagccaggatggtctcaatctcctgacctcatgatctgcccacctcggcctcccaaagtgctgggattacaggcgtgagccaccacgcccggccttttttttactttttactactaggtgtgattttgctaaattttgcaacttaaaaaaaattcccttgtattcctagtgagataaaaattttaatcatgaaaggatattgatttttattaaatgcatttttgcacagattttctccttcaacccactgtcactgaatatatttacacatttcatgtacataaaaatagtattatatgacat

SEQ ID NO: 1516 - DNA, 1200 bp, Homo sapiens
  misc_feature (1)..(1200): DMR9:127618501
ttcgagtaaaactgtaataataaaaactaaatctattgatcacttattaggtgccagacactgtcctaggcatgtcgtatgttgtcatttaatcctcaaaaagatcccatgagttactctcattagtcttcttttactctaaggaaacagaggctgagagagtttaggataattccacaaggttatcaatttgtcgttataatgtttgtatgtatgtatgtattattttgagacagagtcttgctctgtctcccaggctggagtgcagtggcactatcttggctcactgcaatctccgcctcccgggttcaagtgattcttctgcctctgcctcccgagtagctgggattacaggcgtgtgccaccacggctggctaatttttgtatatatatatgtattttagacggggttttgccatgttggcgaggctggtcttgaactcctgacctcaaatgatccacccaccttggcctcccaaagcgctggaattacagacgtgagccaccgccccagcactgttgttataatgttttagtaactaacatttacatcacatcaacaagtgctaaacactaaactaagtgctttgtgtatgctaacttgttgaatgtctatagttaccctgtaagagaggtgtattccctgcgctttatggatgagaacattgaagtcaggtgaggaatgtgcgctaggtcccataggtgagaagaggcagatgcaggatttggaccctggtagtttggctgcagcatcagtcttaatctcaacacctgtcttctcagatttggattctggctcacaggctgcagagcctgtacttcttttttttttctttttcccagagacaggtttctgttgcccaggctggagcacagcggcgcaatcatagctcactgcaacctcaacctcctgggctcaagcaatcctcttgtctcagcatcccaagtagctgggactacaggcatgcaccaccatgctcagttaattaaaaaaaaatttttttttcttcaagacgaaacctcgctctgtcaccaggctagagtgcagtggtgcgatcttggctcactgcaacctccgcctcccgggttcaagcaattctcttgcctcagcctcatgagtagctgggactacaggcatgtgccactacgcccagctaattttttgtatttttagtagagatggggtttcaccatattggt

SEQ ID NO: 1517 - DNA, 2300 bp, Homo sapiens
  misc_feature (1)..(2300): DMR9:128977801
aaaaagaaagacattgtttttgccctctaggagagcagtttagctgagcctagtaataacttacatttatgtggcatttttgaatttacagtctacttcctcatacattatctcatttaatccttatttataatccttacttataatcctactttgaagcagaaattactgtccccattttacagataaagcatttctggctcagagagatgaatttgtctaacattgtacagcagacacaacacaccctggacaggatataatcttactttttaaacccagagttcttggctgggcatggtggtacacttctgtaacccagtgctttgggaggcggaggcgagaagatcacttaaacccaggagttaaaggctgcagtgagctatgatggtgccactgcactccagtcttggcaacagagcaagaccctgtctctaaaaatagataacatacctacttacatacttatatacaaaaacggtaaaaagaggctggtctcacacctgtaatcccagcactttgggaggctgaggcgggcggatcacgaggtcaggagatcgagaccatcctggctaacatggtgaaaccccgtctctactaaaaatacaaaaaattagctgggcgtggtggcaggcgcctgtagtcccagctactcaggaggctgaggcaggagaatggcgtgaacctgggaggcggagcttgcagtgagccaagatcgcgccactgcactccagcctgggcgacagagtgagactcaaaaaaaaaaaaaaaaaaaaaaaggtaaaaaggaagaaacaaacccactcacccagaattcttgcactctagtctgggtgatagagcatgaccttgtctttaaatataaataaataaataagtcaaccaacccatccacccttaagcagtttttttgtttgtttgttttttgagacagagcctcactttgttgcccaggctagagtacagtggcatgatctcggctcactgctacctccattgcctgggttcaagtgattctcatgcctcagccactcaagtagctgggattataaggtgtgcgccaccacacctggctaactttcgtatttttagtagacatggggtttcaccatgttggccaggctggtctcgaactcctgacctcaagtgatctgccggccttgcctcccaaagtgttaggattataggggtggcccccacacccagccaaccaaccaattcttaaccagttttttctgactttctatattaaggtgtttattttattttatttatttatttgttttcaagaagaggatttactatgttccccaggctgctctggaactcctggattgaagtggtcttcccactttagtgtttattggtgttttggtgtttttatttcaacagaatacaataataaagatagactggttcagctagggaaaatgatccatttttcttcccttcctcaaacaggatataattgatacagcatgtgaagtattggccgacccttctcttccggaactgttctggggaacagtaagtatgtcagagagagtcactgcatagcaaaagaattgttcaaacacttgttttcttacaggttttgtactaagcattcatgtgcattttctcatttaatcttcataaaaacgtatgaagtagatactattactgtccctcttttaatgtgatgacacatgacacttagagatgtgaagtgatttgctcaaagtcacacatagaaagaggcagccagaacccagttctgtctgacttgagtctgcagcccacgttattaccagtgtgctgtctccagcccaccaggtttttttttttgttttggttttgtcttgttttttgagatggagtcttgctctgttgcccaggctggagtgcaatggcgcgatctcggctcactgcaacctctgcctcccgggttcaagcagttctcctgcctcagcctcccaagtagctgggattacaggcgcccgccaccatgcctggctaattttttgtatttctagtagagacggggtttcactatgttggccaggctggtctcgatctcctgacctcgtgatctgccagcctcggcctcccaaagtgctggggttacaggcgtgagccactgagcccggccttccaacccaccagttttttgtttttatatatggcagtgttttagacaccagtgttcctgcagctcttgaaagtgcttttaggagattgtaaccgtagcctatgagttgtcagggtattgtaactagttagagtgagaatttggctttgaaaagaacaatttctcacca

SEQ ID NO: 1518 - DNA, 1400 bp, Homo sapiens
  misc_feature (1)..(1400): DMR9:129774101
gagccttaggagtctgagaccagcctgggcaatacagggagatcttgtctctacaaaaagttaaaaaaaaaaaaaatagccaggcatggtggtgtatgtctgtggtcctagctacttaggaggctgaggagggaggatcacttgaggctgggaggtcgaggctgcagtgagccatgatcatgccactgcactccaacctaggtgcaagaaagaaagaaaagaaagagagaaagagagacagagagaaagaaagaaaggaagaaaaaagaaagaaagaaagaaacaaagaaacaaacaaacaaagaaggaaggaaagaaacaaagaaagaaagaaaccaacaaagaaagaaagaaagaaggaaggaaggaaagaaagaaagaaacaaagaaagaaagaaagaaagaaagaaagaaagaaagaaagaaaggaaggaaggaaggggagagagaaggaagggagggagggagggagggagggaggaaggaagaaagggagggaaggatgggtttgtctctcaacgtaagaaccaaaatgaagacatgtgtgtctaccaggtgaggagagaagtacggagaagaaaggggagggttggtgggtcccccaggagcctggttggctggttggaaaccagagggtgtactggacaaggcccagaatgcggacctgcctgggccccaataaggggtccctccccatccacaggtagacgcatcgccccgaggtagacacatgtcccctagggaagaagccttcggctactcctcacgtgcaagtcacatgctcctctccctgctggcaccaccatggccacagctgatgggcaggggtgagcacctggctgcaagcagccaatggcgaggccagccagcagccaatgaaatcaacagcccgatgtgggcctgggctgagacccaccccccagaggaggctgggctcgtggccaaggactcggctgccagcagcaggagcggccacaagaatgtgtacccctggggatgacaagaagcccctacagtgaaatccacttcggctcttcacgggccctggggtcttcacctgggtcctgtgcccacgaggtcttgggccccagcatcctcacagtaaacccctttatcccggggtcctcagtgcacgtctggcccagcaacggcaatgaaaccaacaaactgccacacactagagctgggtcctgcggctctgccacctgctctgtcaaacgctggggtccccagaagccacggcccctgccaaaggtcattttgggtctcatttgtcatctgggtacttagggtaaaacgatattttctgtgcaagcccctcattgcttccctgtctctcccatcccctaactccaccaccatgaaggcctccctgctctcacccactccaagagctggat

SEQ ID NO: 1519 - DNA, 1700 bp, Homo sapiens
  misc_feature (1)..(1700): DMR9:130049201
caacatggaaaaacctggtgtccacaaaaaataaaaaaatttgccaagcacagtggtgcacaactgtaatcccagctacccgggaggctgaggtgggacgattgcttgagcctggtaaattgaggctgcagtgagccttgatcatgccactgcactcctgagagcgagaccctgtctcaaaaatcaaaaaataaaatagaaataatgctacttcaaaggttattgtaaaggttgaaagaaaggtggcttatgcctataatcccagcactttgggaggtgaaggttggaggactgtttgagcccaggagatttagaccagcctgggcaacatggcgaaaccgtctccacaaaaaaatacaaaaattagcccggcacggttgtgcttagctacttgggggcttgaggcagtaggatcgcttgagcctgggagttggaagctgcagtgagccgtgattgcaccaccgcactccagcccgggaaacaaagtaagactctgtctcaaaaaaaaataaaaataaaaataaaaattaaaagaaagaatacgtataaaatgtttagcacataatatacacacaagtatcagttccctttcctttcctcctgttttctggaggatttttacttattgtagaaaataaagcaatcctttcagcattttctttttttgtgtgtgttttgtgttttgtttttgtttttagagaggtcttgctctgttgcccagactggagtgcagtggcatgatcatagctcactgcagccttgaattcctggattcaaaccatcttccccagtagctgggaatacaggcctttaaacatttctgatgcagcaggaccgcctgcctgaacttacagttgattggttgtctactggtgaagaactacttctaatgaaattctcaggattttttcttcttcaaaattacttgtttttagcttaaaatttccaacttcttttgcattcgaactacttactagggactcaagaaagcaatcaactggaaaaagtggagtaggataaaaccaggaactccatggtgagtgaaatgctaaaactgcaatgaatttttacaacgaataatccaattcccctgtaaagatgtacataaaatcaagaaagactgcctgtcctgtggctgagcaagttatacactagggtcgtcaggttgaggagtaattttgaagtttctctccaatccacaggactcaaagtgtgtcagagcctggcttttccatgatcactttctacaaaaagatgcacttggaggcattcccgacaccccaagaaatgcatgaaaactttagctgcaatcctggaagaaatggtgtttcaagccaaagaatgaaaagtagcatttgacttctgaatgtattgctaggccccaatttgaccactagtttcctatactgtcttaacagaggcttttggtttgcaatatcaatcaactctttttttttttttatttgacagggtcttgctctgtcacccaagctggataaaagtgtcatggcttactccagtgttgactcctgggctcaagcaatcctaccacctctctgcctcctgagtagctgggactacaggtgcgtgtcaccatgcccgctaatttttgtgttttttttttgtttttttgtttttgtttttgagacagagtcttgctctgtcgcacaggctggagtgaattggtgcaatcatgctcg

SEQ ID NO: 1520 - DNA, 1500 bp, Homo sapiens
  misc_feature (1)..(1500): DMR9:130390401
tctgcgctggacatggggcagttgctcgtgtctttgtgttgagaggctggctggatccatgaggatctgggcaaggagatcgtcctgggctggggccgtgagagatggctttgggcaggggtgtggctggagagaatgaagggggaggcctgaaggccgggagtgggaggagcccgagcagaggcccagggggaagccccagtgtgacctgtgtagggtcagtgaggggctggtttgacttgagcagaaaccttgatagacaggggtagaggggcagggcatggagggagaaagcaaaagcagaaaccttgattgatgggggtagaggggcagggcggggagggagaggatgggagctgagagctgggcctgagagcaaatcctggacactgaagggagggggtcccttgggaagagctgtctcaagtggaaggaaatgaggaaggcttctaaggaacagagactgggctggggaaggtggggacatataagaaggcgcctctgcctctgtggggctcagtttcctatgagcacaagaaggggctgggggattcaggggacccctctgtcccacagagagcagcgcggtgcacggtgtggtctcccgggggggccgcctccagctgagccgcctgcaaccggcccaggcgggcacctacacgtgcgtggctgagaacacccaggctgaggcccgcaaggacttcgtggtagcagtgctgggtaggtctgcgcctgcaccctcctgtcccactcccatggcagcccctgccatcacccagggcctcactgcacccctgcctcagtggccccccggatccggagctcgggcgtggcgcgggagcaccatgtcttggaagggcaggaggtgcggctggactgtgaggccgatgggcagccgccgccggacgtggcctggctgaaggacggcagcccgctgggccaggacatgggcccccacctccggtaagacttggcccatgccctccccagaggcggtagggcccatgttcccttacgcctctgccctgggccctccttccctgtggcaggttctacctggacggcggctccctggtgctaaaaggcctgagggcctcggacgcgggtgcctacacctgcgtggcccacaacccagccggggaggacgccaggctgcacacggtgaatgtgctgggtgaggagccccagggcatctggagggtgatgcgtgggcctgggcacgggagataaggcgacatgtgagcaaagcccacactgtgtcctgggccacgggtctcacttccctgggcctccatggcccatcctcaaactagaggacaatagtgccagcccagggtatagcggagattcgggaggtgagaagagagtcagggagtggctgtgtcccccatgcagcgggcctcatccttcacaagggaccactgtggttgctggcggcagaagtccaggtctccacttctgggatttccctgggaggagcccaccttcctcccaagacct

SEQ ID NO: 1521 - DNA, 600 bp, Homo sapiens
  misc_feature (1)..(600): DMR9:132527801
atgtgaaggacctcttcaaggagaactacaaaccactgctcaaggaaataaaagaggacacaaacaaatggaagaacattccatgctcatgggtaggaagaatcaatatcgtgaaaatggccatactgcccaaggtaatttacagattcaatgccatccccatcaagctaccaatgactttcttcacagaattggaaaaaactactttaaagttcatatggaaccaaaaaagagcccgcatcgccaagtcaatcctaagccaaaagaacaaagctggaggcatcacactacctgacttcaaactatactacaaggctacagtaaccaaaacagcctggtactggtaccaaaacagagatatagatcaatggaacagaacagagccctcagaaataatgccgcatatctacaactatctgatctttgacaaacctgagaaaaacaagcaatggggaaaggattccctatttaataaacggtgctgggaaaactggctagccatatgtagaaagctgaaactggatcccttccttacaccttatacaaaaatcaattcaagatggattaaagatttaaatgttagacctaaaaccataaaaa

SEQ ID NO: 1522 - DNA, 1400 bp, Homo sapiens
  misc_feature (1)..(1400): DMR9:133108901
ctgggctcccctgagccaggctgggctcctgagccggcccctgtccatctgaaggccacctgccccggcccaagcccccttggctgtccagctaaaagaaccaaggaggcccctggtcagtggcgaacacctctcccctcctccaaggaagccccgcccacagctctgcatgtctcccagcaccccctcctcgctggaatgtaaactccatgagggatcggtcctcctgccgggcatctgcaggtccctggcggctcctcaacttgtagctcagtgctggtgagctgccttactctctcagagctgtgtgtgggtctcatcttcccactaatcctgttctcccagagggtggggtgcagcctgcccactgagcactcactattgaggggtgaggcaatgtgagagcagaggctcaccccacctcttgccaggggcccctagatcagggcccactgagccaaggccagctgggatgaggctatggtgggatgagttcccgccgggggctgccccgagccccagccaccccaggacccctccacagctctcggtcgtctttcttcctgcaggcgaagcccccagaccccagccctctagcaggaaccacaagaggtgtgggagccagggttctgcccagccagccccggctccggccccagccccatgtactctcccactgttcggtggggacagggtcccttcctcttggctcaaagctcactcactttttaagttggtcctggggtccaccatcctcgtcggaataggggaggatgcagccgtatctagaggaggccgtgagggcgtcacatctaccgtacctgcttatgacgtctagtgttactgtctgactctccgactagaacggaggcccaggagggcagggatttttttttttgctttttttcatcaaattatattaaatgcctagaaaagggccagcacacagtaggtgcttcatatatatttgttcaatgaataagtcccaaccagctccttcccagctatctgagcgccccttgggtccctccaacagcccccagatagaatccggaatctccttgacaagtgggaaaactgcttcgcccaaggccacatacaagagaggcttggggcagagagcttccccatgggggacaggaaaatcataaaaacgagcaccacagccccgcagcccattccctacagggccaggcgttgagggagcactttccacgcctcatcccgcccaggcatggtgacaaccccatgaggtcctcttagcactccagtttctctttcatatgagcaaagcgaggctcagagaggtgaatcagcattgccaagacccgcagccaggtgggggtgggggcgagggcccctgtgcaccctgtgcagtggagggctcatgctcacctttt

SEQ ID NO: 1523 - DNA, 200 bp, Homo sapiens
  misc_feature (1)..(200): DMR9:134891601
accttttccagacctcattctcactcgccttcacctctccagaatctgatgtgctttctggttttgtcttccctgtgctctgccttccgagcagtagcgggtgctctgtggaaccctaggacccttccatcctgcccttgggctctcagcccttgggcgatggatttgctgcagcctgatccccaccccctcttcctgtc

SEQ ID NO: 1524 - DNA, 700 bp, Homo sapiens
  misc_feature (1)..(700): DMR9:135537701
ggctgtgaaaccatcaccactatctaatccaggagatcttcatcatcttacaaaggtccccacgcccgtccgctctcacccccattcttccctctgcaccccagaacctctcatctacttcccgtctgcatgaacttgcctgttctgcacacttcatagaaatggaatcatacatatgtgtttcttgtgactggtttctttcccttagcataatgtttcaaggtttgcccacgtggtagcatgtgtcagtattttatttctttttatgacagaataatatttcattgtgtggataataccaccttttttatccattcacccattggtagacatctgagttgtttctacttcttgggttttgtaatgttgctagggacatttgtgcataaatgttttcgtgggaacatatgttttcctttcacctgggtgtatacatgggagtggaactgctgggtcatagggtattaaataattctatgtgtaactgttggataaactgccaaactatgtttttctgagcagctgtgccattttacattcccaccagcgatgcatgagggttctaatttctccacatccttgccaacccttgtcattatctggctttgtgattctagccatcctaatgagtgtgaagtggtatttcgctgtagttttgatttgcatttccctaatgactaatgacattgagcatattttc

SEQ ID NO: 1525 - DNA, 800 bp, Homo sapiens
  misc_feature (1)..(800): DMR9:135592601
gggctcctctcacataagcaggggtccctcactctaggacctgcaggggcagggtcctagagtcacaggggagcccttttgtgcacatcaggtcctggagcctcggcccctgtgcggacggagaggatgtcgccttcctgggagggacaaggaggctgaagaccaaggcacgtttcctgggacgctgggacctcctgggtctcagcctggggtctcctgtcctaagctgtccctctttgaacaataaataaccccgtcccctgagtctgtgctggcaggcgcgtggggatgcagctgagggcaggctgtggggctggggaactcggggactggcagactcaggggctggggggatcggggactgggggactcaggggctggggtctcagaggctggggggcacgggggctggggactcgggggctggggactcgggggctgggggactcgggggctgggggcttggggcctggatgactcaggggctgggggactgggctggggggctcagaggctggggggctcaggggctggggggcttgggggctgggggactcgggggctggggggttgagggaactgagttcatggtttctgtattgtaggccctatcatatttggggatcaagacactataggaggctttaaaattttcaggaactagataagagtgctgctgagatggccagagcttgccattcatgttggaggtccaggccacacaaaggacaaaatatgaaaaatcacagacccattcattgaataaatattgatataaaaacttaaatgagtgttttaca

SEQ ID NO: 1526 - DNA, 200 bp, Homo sapiens
  misc_feature (1)..(200): DMR9:138025801
agagatctgctggttacaaatacaggccccttacgtggtggggaaggtgcatgggcgtttcatgggcatcaaggaggagccctcctttcttaagtacagagaaaaaaggggtagaagagaggccatagaaacaggactcacatgaatgccagcagaagcatttaggtcttaagcagaccagacggactcaatcaggtgcc

SEQ ID NO: 1527 - DNA, 300 bp, Homo sapiens
  misc_feature (1)..(300): DMR10:43901
agtacatgcacacagctatatgcaaatgggaaaggcttggaaggaaccaaatccacctctgaacactagttacttgtggggaaggggcaggtgaagccaactgtcagcattactcaccttttcaactgatgagcttacatcaattttggcaatttctcataaaaaggcaattttcactccttgggtgatcacccaggtcctgcagaactgagccaccaacaaccacctgcaccacttcccatgaggccaaataatggcttccctcaaagctcagccctcccacccacctcccagtcctct

SEQ ID NO: 1528 - DNA, 1800 bp, Homo sapiens
  misc_feature (1)..(1800): DMR10:850801
ttaataaaagaaagatccctggaaaacccccaaatatttgtaaactaaatcaaatatctctaaattatctatgagtcaaagaaaaaaaatcaaaaaagaaatacagtatttggaagtaactgaaaatgaaaacaatgcatctaaatttgagagattctgcttaagcactacttatggggaaaatagtaaaactaaatgactatatcagaaaataagaaaggcctcatattaatgagctctgcttccaccttaggacacagaagaaagggtaaattaaacccaaagaaatcgtaagagagtatattacaaacatcagaagaaagaatgaaataggaaagagtaaaacaaatgagaaaaatcgataaaatgaaaacactaactttttttttttttttttttttgagatggagtttcgctctgtcccccatgctggagtgcaatggtgcgatcctggctcactgcaacctacgtttcctgggttcaagcagttctcctgcctcagcctcccgaggagctgggaccacaggcgcccgccaccacaggcggctaatttttgtatttttagtagagatggcgtttcactatgttgaccaggctggtcttgaactcttgacctcacgtgatctgcccgcctcggcctctcaaagtgctgggattacaggtgtgaaccaccatgcccaacagaaaacaccttttgataaggtcaataaaactaacaaacctctacccagactgattgggattataaagaagacacaaattaccaataacagagatgagtgatgtaacatgactacagatttcacaggtgataacagagtattatgaacaactctgtgctgtaaatcccacaactcagatgaaatagaccaaatctttgtaactatataaaccaaagctccctcaagaagaaataaatgagtagcactatgaaaaaataaactgtagttgaaagctttcccacaaataaaactcctgcccaggtgggacgcagtggctcatgcttgtaatctcagcatctagagaggctgaggtgagcggatcgcttgagctcaggagtttggagaccagcctgggtaacatggtgaaactccatctctacagaaaatacaaaaataagccaggcgtggtggtgtgctactgtagtcccagctacttgggaggctaaggcgggagaatcgcctgagaccgggaggttgggactgagtgagccatgatgatgctactgcactcaagcctgggtggcagagcaagactctgtgagcaactaaactaagtaagtttagtaagtaagaaaggaaagaagaaaaaaggaaaactcctgcccacatgacttgtttcacttcctcatatgagggtgaaataatacgtaacctcttccaaaaacttaaatagaaagaaaaacactgaaatgaaaactagaaaccaagatcccaggtgtaaaaattctaagcaaagttttggtaaatggaatccagtagtatatccaaagtatactgtatcatgatctacagaggtttagaccacaaatgttggtatcacatttgaaaaacaattaatacaattcatccgaacacactaaaaaacaacaaatatatgcccatctccatagatgacaaattacaatattcattcctcataaaaatctctcagcaaaccaggaaaagaagagtgcctcatcaacatataaagggcacagacctaaaaccaccactaacgttatacttcatggtgaaatactgagtgcctcttgtaagaccagagacaacccaaacgtttgttcattctttccacttctgt

SEQ ID NO: 1529 - DNA, 3100 bp, Homo sapiens
  misc_feature (1)..(3100): DMR10:1197701
cagttttatcttcagtgtggactaagaaattaatcattgacaacatatctgtttaacatgctgttaacacaaacagcgaatttatcctacccagatttctttttttcttgatgaagagaaataaaaatttagccttgatgttgaaagctcagagaagcatatatcctcagcttggtggaacagcctgtcaaagtggctatttcatctcactttttcctaaaaggatgattattcaaagcatagagttttattaattactatccccatcattttgttcatcttactgaattcactgagaaggaccaagggcaaactcctttaggctatctgtactcaggaaataatgcaacttttgctgaaggattcagcgtttgagacatcctcgaaatgggcttctggtcctgaagttttgccatagatttagactggaaagtgcagaatttttcaagtatatccttcaagaacattactatgcatcccgtgactgtgtgagtaagggtatctttttcagcttggttgcttctttttaactcagagctgatttagccatatctaaattgctgggcctcattctgctaatacataatcttcatcttctaaggcagttctgcaaactgaccttgagggaagcttcaagcaaacttcatttgcttatttgagggtgctttttattattatccctgtgcaagatctctctctctctttcttttggtgcaagaaattctgatgatttcttttcaaaatttgcatgattggtttttaaatgtccatcaggaacaatgcagggacagcttaggggttgcatgcaggcaaggtaccaagatttaggctcatttgcatctgcaaaataatgaaaaccagattcccaataagcatgtaaatggaggctgaaatatttagtcaggctgcaccggccgtggtgtggcaggtgccacctgggatcggaagcagacaggtgtctctcgggcttggctattatctgtgccactcaatgatgtcaggtggatctgaatttctctaattgcgttttctaaaattcactgtgttcacacttaggattggacattcctgtttttatttatgttgacatgttcccagatggacacatgattgaaaatcagcactgggagactggctgctgagggtgacatgccagtgcccagggagggcaaaacctgctccgttgacggtggcttggggagggcgtggttgcatttgtactccatatttccttgtgctgcgcaagcttaaataagcccttcagtaggtgctggacaaagagcggggatggcctaaggaaaacgcgcagaaaaagagtgcaggagccacttggcaaacaggtgaaaatcctctcctttctggggcagaggttttctccgtttcccccacatatctgcctgattctgccacaggcaggcccttcagagagctctcccactccagcaagggaggctgactcaaagacctggtgttctgcaggcccagcatgaggctggcggtgattcggaaacccacccccccgcttcccgctgttcctgtgaaaggccaggagtcgcctcctgtcagtgtgtccttcacaaaaccctcccaagaccactcccggggctttctagggcacctcgcagctgccaagggactcttcatccttgcagctggctgtgtgccaggcagcccgggcaggccccaggtaacgtggggaagtagaggcttggggaggctcgggtctctgaggacatctgggctgtggggaatcctggtgcgaagccggcccagtactcgcggagtaacctggcagcctctggagggtgtggagggcccggggccctgggttccgaagacccgctctggccacgtgaccttggcgccccccgcccctcctcgcccacctggctcttcctcagcatcgcctcctgtgggcggccaggtgggcaggtgggcaggtgggcggccaggtgggcaggtggggcctcttgggtgagcccaacactagtgattctgttttcagaactccttcagacaccgctgtgaaaacagcaccatcacacaatcacgaattcacatcaggacctggcctattgctatatgcagagagatgctgaaacctttcattttttctttttaaaatcgtaggactttgcccattaaatcctaaattgccactagccaacatggatgaagtctgcgagggatggcaccgccgggcacacctgtgtctggcctggtggtgggaaggaggtggagggcccccgggaagggggttcttaccgctgaggagaggccggttgtgccggtaggaggcgggcagctggccgacaccctccatgcggtggctcatgacgcgtgcgaggtggcccgtgtggtgcaggctgcccaccacgatgctctgcaggtacacgggctccacgaagtgggacaggagcgcgccctgcagccccaggacgttccacctgtggggagagccagcagtcagcggagccccacccaggagcccagggagcctggtcctctctgtccgtctgcggcctggtcctgaggacctgtcagtcttcccatcgtgcggaccttggggagctccctgggagtgccccagacccaacccagccatcactggggctctggggacactgttgcctgggactgggctccacaggcccatgtgtgctaacaaatgctgctctcttttctgaaaatgagtcgttagagtggaaactgttatgttctctgtgggacttagaattagatttttttaaaaagatactctgtcccaaaagtgaatctgaatttttctttatattagctgggaaatactataaatggaatttgtttattttagtttagggaaaaatacttagtactccctttgtccttagcagtcaaaatgacctattgtgttgaaattacattaacaaatgaccttgttttggtctgggcatgattttggtttcagaagcccagattggagatgaacaacaaggccattttgtttgaaataaatatagctctgggtgaatgtttttgcttcctcaagcaaaaatgccaagagcactgacattttttccccttaaatttgggtggcaagaggttccatgtgtgtgttttt

SEQ ID NO: 1530 - DNA, 1200 bp, Homo sapiens
  misc_feature (1)..(1200): DMR10:1207501
aacaaatcatggaggaaggcgtcagaattgttcccaggtgggctgcgtggccaagaggaggcacgagaagctgttgttgagggaacattgagcagctgatctctaggtggggggagacggcactctgcacaggctaaaatttaggtttagaaatcagccagtgccgtattccccagagagcagctgtaatttcttatggttcattttcatggagaaagttttaatctgttcatttaaagacacattgtgatcaataatcaagctcaggtacttaaaattagaaaccatatctgaaggaacattagttccaggagatttagattttttatatgccgctcaatgtttgattaatcttagagacaaaagctaaaagcacctctgcagttttcctcattcttttaggagcctggggtttggctgttggtgagagtctagcctggctccatagagctggaaaaacaggccgcgtccacaggccttcaggatgggactgttaggcctgcggtgtccgaccctcttcccatgcaggggcagggtttggtctccagggcactcctaaccttaccttgtggctttgcaggtcaattcttattgacctgtgactaccactttctgcagttccatcccatcttcccagggctatggtggtggtaggattttaggaatcgagtttactgtgactttatctgttctctgatttcctgaagaccggataggtgatttctctcacctgccagtgccagcctcctagggctgctgtgggacaaccacagtggggtggcttgaaacagggatgttcccccagttctggaggccagagtctgaaaaggtgtctgcagggtcgtgctttccctgggtgcgtgtggctggtgccaccccccggggtccctgtcctccaagcacccactggctctgaggtcacagaggaggccaaggacacctgggtgtgtctgtccctggccccagcactcaggtgcaggcagccgggccccatgctgggctctgtccctgcctcccattctctcacctccctgcttccccagcccctttgcatcagcacgaggccctgggcggactgaggtgcctcagggacatgggactctagagcgtcctctcatggcctggacccccagtgggcctggctgcacatcaggccgtttcctctgggctggtcttagccaccaggcagcacccatgggc

SEQ ID NO: 1531 - DNA, 2000 bp, Homo sapiens
  misc_feature (1)..(2000): DMR10:2176901
gtggtgaagttggtcttggaactggatgggcagagactacagatgccataaagcagggtcctcgtggaacctgcaaatagctgcctcaaccacgccctagctgtcggtcggtcagcaacgaccccagaccttctgctccgacaggggctcctcgggtgctagaattcggtgaaagaattgagcatggtacggattacagagggcttgccagaggtcagcaagttccaaacctgtctttttaaggcagtcctgaggctttaatgcgatgctgtatagaaaacaacttatgagtcagatctccacttcttcaaaagatagtctttaaatagaattcccaaataattatcttagcgacttgttttctgtcgttttgttgctattcaaagaaaataatacagaaacacattttcatactgaaatgaaagtttatgatgcatcacatatattacaaattacaaaaaagttgaagaaattaatgatatgtcttatttcataaactgcctttattctatgagtgaaaatgcaatttcaggagaagtaagagtcagcacgagccttcctagttcttcgaatgaatcatgtgtaaatattaattttctagactaatgggctcagttttcttcattcccctgggctagttgacttctgaattggatctcttaaatttaccatgtccaaaactaaagtattgatcccaggcaccaactttcttctccctagctctcctgtgtcttaggaaatggcaaaaacgttgttgttcagagaatggcggaggttcatgccctttttctcacataccctgcttcaaacattggcaaattggagcgtgtcttggtctgttgagatgctagaaccgagtatcgcagacgggaagctacaacagcagaggcctgttgttcacagctctggaggctggaggtccaagatcaagatgcaggcggattcagggtccgtgcagggctggcttcttggttcatggatggcaccttctccctgtgtccctcacatggcagaataggggagagaactctctggggcatcttttcatggaggcaccaatcccttgagttttctgcaatcacaacctcatctaatcctcgttaccccacaaagtctccatctccaaaatgccatcgtatcggggattaggattcaacacacagacttggcaggaagaaaagcctccggtccaccgagtgcatagcagagcgactctgtggtaagaagccatccagatccctaaccattctcatgactgctccaggaccacccaattcaaaccagcacccagcctctctgactgccacactgtcctaacctctaaccttattccccagtcagttctctctagggtgcttttaaaggcaagtcagactatgtcattcctcagctcctaatctggaggttcccatcacacgcagaataaaaatgaaatactacagcctaagcggcagtgattcatgaatctcaccccagccacaatttagaatcagtctagggaagcctgtgaaaaatatagatgctaattaccaagcacgaatgaattcaatcagaaccccgagtcatggcacctggacactgatatttttaaaagctcctcgggagatgcaaatacagagcgaaagatggagtcctctgccctgggtgattcacacaaggttccggcagtccctgccctctgcttttcttcccacttctccttccttccttccttccctccttccttccttccttccctccttccttccctccctcccttcgcttcctccttccttcaatcctcctttcctctcttcttctctccttccttcctttctccatccctccctccctcccttcctcctttccttcctcttttcctccctctcttcctccccttccctccctcccttccttctttccttccttcctccctccttccctttccttccttccttccttccctccctcaccttcctccttccttcaatcctcccttccttcctttccttccttccttc

SEQ ID NO: 1532 - DNA, 1200 bp, Homo sapiens
  misc_feature (1)..(1200): DMR10:2317901
caggagctgtgcaaaggatgctgcaaggatcagccgtccatgcaaccccagtcatgggagcttgaggcacaaggaggaggacacaggacgcttcgaggatcagccgtccatgcaaccccagtcacgggagcttgaggcacaggggggaccttccatttgctgtgagtcgcttggagagaaggaacagggactcacgttaggggtgagggcgtttgcccaggggtgtctgtgaggaggtgaccttgtcaaggagcagctgcttttctcagccgccaactcctcatggcatcttccctcctgcggggagatgtttgccaatggacaaactccacattgctctctcccacttcctgctcagagtaggcagggtccatagagcttgttattaaccaggaaactgtattttctctcttcttactctaagtaattgaaagaatgaccacgcagagaagagatgtctctaaaattcacttcaatagtgctcagttcaaactaaattcacttcaaactcttccaggcacagacatttaaagtcatttttattgaggcgtgatttggggtgtcctgataagaagaggagctgaggacacagacatgtccagcgggaccttgggaggacatagagggaagacgccttctgcaaaccactgagagaggcctcgaggaaccagccctggccgacaccttgatatgggacttccagcctccaggacggtgaggaaacacgtttctgttgtttgagccacccagactctcgtgtttttttatggtacccttaggcaatcaatacggcatagtttaaaaaggtaaatggtatcaagatgtatataacacaaaggcaagtacccaaccctcctctgtcacccctcagacgatgctagtgctgggattacaggcatgagccactgcgcttggccctggaatttacctttatgtatcatttcctctatcaattactcattaataaaccttttctattgctatttatatgatgcaaaagggagacttacagtatctcactccctgcttcttaacctcaatcacgttaacatagtgtgaggtcacctcagtctaatcacttctcatttgatcggatactgacaatttaactatggatttctctcgcccaagcagcacactgcgcacccttggtttttaaatgagcaataatgtaaggcttaaatattgtatgatattttt

SEQ ID NO: 1533 - DNA, 1100 bp, Homo sapiens
  misc_feature (1)..(1100): DMR10:2391601
aaaatgttctattcaacccagttcggccttagggaaagcagcttttaataacctcctagcttcttgcttataagttctctaaaaacaaacaaacaaacttgttttctaatattccccagctatcttcttatccaatcctgtactatttaattctgttatatagtgttagcagtgtgtattgtactaaaatatttgatcaataactattgaatcagtgcgtatttggaaatattgatattctgttctctatttcattttcccatgacatgcatatgatatttcatccaaagcgattacagtctttctttattgtgattagagaagtagataaaagtatttcaaattatagacaagaaaaaatgcaattactaataaacttctaaaactcaaaattgtactttcttcagccagaaaaataaccctaaagccagaattggtcatgagaatcaggagtttctaaatagagttattatgtcagaatttaaagtgagaggatttggatcatgggctttctttcaaaatgcagacaagaggcaatttctgtttattacctctattctgcggttgcagctccaagtatgaaaatatatggtgtagagattggaaaaggcctagacccgttcctttgagttgtcaaggtcactgggtgaggaggggacgggggtgtgtttagatcagctgacaggtgaggagggggggggggtgtttagatccgctgacaggtgaggaggggagacaggtgtgtttagatcagctgacaggtgaggaaggggaggggggtgtgtttagatcagctgaccggtgaggaggagaggtgggtgtgtttagaccagctgacaggtgaggaggggaggggtgtctgtgtgtttagatcagctgacaggtgaggaggggaggggtgtctgtgtgtttagaccagctgacaggtgaggaggggaggggtgtctgtgtgtttagatcagttgacaggtgaggagggaagacaggtgtgtttagaccagctgacagatgatgaggggagggaggtgtgtttaggtcagctgacaggtgaggaggggagaggtgtgtgtttagaccagcactgcagtccttcgttccac

SEQ ID NO: 1534 - DNA, 200 bp, Homo sapiens
  misc_feature (1)..(200): DMR10:2755901
ctctgccggccaaggttgagacctgcatctctaatgggatcttctgcttatagtttcctgcaggtgtcctcctcagtctcccagaatccctacctcctctcccggttctccctcagaaacaaaccaagcctcctcctcagtctcccagaatccctacctcctctcccagttctccctctcagaaacaaaccaagcctttt

SEQ ID NO: 1535 - DNA, 1100 bp, Homo sapiens
  misc_feature (1)..(1100): DMR10:5670001
cctgaattctgctgagccttctttggccagtagaaggaatccacctgtgcttactcagagggttaatcttgcctgatgaatctatgatggcctcaccagtggaagctgatttgcaaagagctggggatcctcctcaggatctaccccccacctcacctgtcactgcttctagacctgtaacccagactcggcctgcccggccctgaaaggtaagtaaggttcagaggggtttgaggcctaataaggcacaacacgcaccataaaagttgcaagatttttgccaagtgacattggcagaaatctgtagaacttatataggaatggatcaaagggatactggattagattggaaggaaaataatgttggatcaggccaaaatttttaatcaggtttaccacatcacaattctaaagtcagtttgcttgttcaaatggctaggcatgtttctacaggtgaaatgccagaactttctcagtacactttggaaaaatgtctcctaaaggcttagaatgctggagtagatttttcatgtaaaacctgtccacccatcgcctaactctggctctcagaatctgaagaaaaccccctcacaagactgagaagtccatttgtcaggacggtgggggtcgggggtgggggcttcttaatccttggggagtctaggtcggtaatgatggtggggaagttgctgtcattaagctttactcgctgaattcactgggaatgatagaatctgatgactgagtggtggcacttaattgccaaagccagtgtgggaccagctgccatcatgggcagcagaactggcacagtcatccagatggtctgtcctcagagatcttgggcaatgattagtcagtgacagcatccctagagctgaaacacatggcagcctactgaagccttacttgatttttacaagcaggaaagctctaggtctggcgaagagcagtaaagaaaaatcattttaatagggagtttcagcctcccaaccaattcctagagttgagccagttcacagacccagagctccttgaatgaaagtgggtccaggtacacctgaactctgagccacagagtttgtactgtaactcgtcct

SEQ ID NO: 1536 - DNA, 200 bp, Homo sapiens
  misc_feature (1)..(200): DMR10:8779901
aaatttatctttgcagagccagcaaaaaccccacagcttttttggaactccttctctgaaaaggcatgtctcctctacctgaactccctcaactcccctacactttactgaatgaccctctctttcacaagtttccttttaatcacttaattttgttttatttctttttgtttttcttttctttcttttcttttcttttc

SEQ ID NO: 1537 - DNA, 200 bp, Homo sapiens
  misc_feature (1)..(200): DMR10:8902801
ggtatcataatattatatattattaatatataatattgctgtataacaatactgttgttatatataataatattgggtcttcctttatttcccaagaatgagtaaaaaaaaatcattatgatggacatttgaactctttgatgaaaggtaatttatcaagcccagatcaagttattagttcctattatgtctataaatat

SEQ ID NO: 1538 - DNA, 300 bp, Homo sapiens
  misc_feature (1)..(300): DMR10:9131501
gaaaccatggcctaattatttaaatttcaaagaaaatgtctatgcgtttatattcagtcttcaatgaattgtaatataaacaataaattgtacgtttttcaaagccattgtctatatggttaacttctactaattggacttaagaatccagagacccatgtatgaataatgtgtggaacaccaaataagacacatctcactactttcctcattatcctcaacataacaaaactttgttacagagtatgttatagaaagtactacttatagattttgctttctcacaacaattagattttg

SEQ ID NO: 1539 - DNA, 1600 bp, Homo sapiens
  misc_feature (1)..(1600): DMR10:9502901
ggtctcaaacttctggcctcaagtgattctcccaccttagcctcacaaagtgctaggattacaggaggtgtgagccaccacacctggcctacttgttaacttttgttttttgcttttttgagatagagtttcactcttgtcgtccaggctggagtgcaatggtgggatctctgctcaccgaaacctctgcctcccgagttcaagcaattctcctgtctcagcctcccaagtagctgggattacaggcatgcgccaccatgcccagttaattttatatttttagtagagacaggatttcaccatgttggtcaggctggtctcaaactcccgacctcaggtgattcacacaccttggcctcccaaagggctcggattacaggcgtgagccacagtaacttgaacttggtaactttattggcctccttttcaatctcactttacttcgctatcaatggctttttttttttttctgggatcactttactaatgaactattttaattgtgtcttgccatctacttttaatggaatccagaaatgtctatcattgtaaactcaggctaaatgtatggacatcacgtcttgtgtcatgtgtctctgacacagacaggccacagggacacctaattacaagaaggaactccaaaaattatttttgcaaacctatcttttatcccacaattctttttcttagtgttacttttttttttctttcttggaatcaatagcaaaaatgcaggatggaagaatgttagagttttcaagtcaatactagtttctaaacagcatcaatttggattatgttttcactgtcagcctcaaatctgagagggaagaccagaagcatgagataaatacaccactcatcccctcattttatcaccttttctttaatttttttaaagaattttcttccctttccgtttttttttttttgcttattcaaaagtgcctgtgctttcaggagcatctcaaacagcaatattccgtagaaatataatgtgagctacatatgggatttaaaattttctagcagctgcattttaaaaataaaaaggtaaaattaatattaacgtgtttaatttaacccaacataatcaaagattgtcatattaacacacaatgtaaatataggtatttacattctttttgatgtcattcaagcctgctgttcatttttcacttatagtgcatctcaatttggattagctgtgggtcagatgcttcatagctactgtagctaattgctgccctattggacagcacggctctagaacacttctgcgaaactaccagaaccttcttcattatctcttactgtgcttattttttttctaagcatgtattgtctcccaagagaatgatagcagcaataaatatgatacctctctataggaggcttatgaagaatgctcacataaattacctaggagaggtaccaggcttcactctcctattttattctccactgagctgtacaattagtgggtgttcaagaaacacttgatgaaaaaattaagtgatgcatttcagcagacagactggtatgcatggagacgagtgagatgatctaaacatgccttgctgacaataagataata

SEQ ID NO: 1540 - DNA, 1200 bp, Homo sapiens
  misc_feature (1)..(1200): DMR10:10636601
cacacaaacatagaattcgtatccaagtcgactagcaagaatccctcccatggatgcccaatagtcagtttctctttgatttctgagaacatggaaatccttattgcttacgaattttaccctaacatcacagggtcaataatataagtatttccactgtcaatgagaccttccatgtgaagatgatctgtaagagagattatgaaggggaggggttcaccaagttctgaaaacctagaattatgagacatttgcaagtgtgataatgaaattattaggattaacagaaagaaaaactattttcctattaagacacaagtttttaaacgtgtctcctcctagggattatgtgaatgaaacacataaataagaccagcaagtcagattttccaggtagaaagtactttagatatttagatttcatggtaattatatatatgagggaccttgaattcagagaaatctcatggttacacagctcttaggtaattgtgtttgcattagtgaccagtcttccaacccagctagacttgttttccattacatcatgtgagtaatcgactctggtacattattaagggaaagctaaaaatgttggagtaaaatccgcaaaaattttgcaatctacatcctgaagggatttactatgtcccccacaaaacataccttagtgtcccagactcccaggaacagagacattcagctaaaggcaacatatttatctagtaacaagattagaactagaacctccatctctctagatcctagaactcaggccactgcaatttgctctgcactatactgtcttccttagcctcccagacagaattacatcttgcagccattgtatttgaggttctgtcttgctcagaggcaggggaaacttttcacgtcagccctggctctagtgacaggagatgaggaaagagcctggtagccatcattcaaaaattagagaatacaatgcttttcaaactctgatatgtcatcacttccatacctcaaaatggggactttccagcaaaggtgactgcgctaaaaccatattcttccttggcaggcacaggatcccaacggtcacctgaaaaattctgaactcacctttcaatgtgacacggagtcgcagatgatttgaacatgttgtaggatctgtgctctgctcaagttaacatgaatcaagcattgtcagccccgtttggt

SEQ ID NO: 1541 - DNA, 1700 bp, Homo sapiens
  misc_feature (1)..(1700): DMR10:10870201
aaaggaatagaatttaataaatatactttaaaagatatgtacgttaaatttagggacatttggtatatataaaaaaaggccataagtcattgagattatttcactttgacatgtaaatgtattgcctatctcggggtatatatatttaagtcttctcaataattataccttagttttatttatttattttttccatgttgaaacaatttggacagcagggaccagggtctaagtctccatagcaaagactcaccctcatggaaacgccggtgtggctctccaagtgactctgtgcttcagtgatttccgaaataccagtaaataacaaaaactttcaggaagtcagccctctgagacccagagttgggtcttctgattctcaacatgaagctgttatgacactgagtctgagaattaggaccaaaaatgggaagcagaagtctccaattagtaaattctctggttacacattcttgagtttcttcttatttccatttttaaaacctcaaccttaaatccgtgtggtctttaacccaccgcccgcccagccttctgcggtcaggcatgagtgcacacctgccacatcccaggcagcaccagagcacggtgacagtcgcgctggcctgagcacagtctccaaacagtaaaaagggatttactgcctcttgttcgttaatatatcttagttgcctccagccttgttattttctctagacattaccggactcactaacgcagtggcccgaagtagacaagaggcagtgtacgctcccacccccaccccgcaacttgcagagaagagcaactccctgctgttgcgccataaataattgaacagtctcttccaggcaacacagtcaagatgcagatttaatttattccctgggaggactaaaggtggctatgtagagccggttcgcagtcaagctgagctggggacactggtactttcaaaatgtgtcaaaccatgccctggggtccagtgtcaaatgccattgcaaagaagggttcttttctttttagctttgttctgtttccctgagcattcctcattaggaaaagaaacttcattccacaacagaaagggaaatgatactgatgtcactggctggcattttgcacatctttaaattcactaaaaatctatgcgccacatctaatgtcatggtttctaccttgtttattttctttagaagatttcttttttaaagccacctgtgacttgacgtctggagttgttttacataacacagtctgaaaagcacacctcgtggaagctacaacttctttgcttgtgttagaaacctagcgggaatggctcaggactgcaatcccagcactttgggaggctgaggagggcagatcacgaggtctagagacctagtgggaaaaagaatggaaaagagggaaggaggaagaggaggagggaaggaaggaagacaagaaagaaatcccaattcaggcatttcgaaagacttctaggaaggacttttgggatggaaccaggggacgtaaaagaacctgagaccaccagcagcacgaggacccaggagcgaggagagaaatgggctttccagggaccactgggagctgaaggagagaggaagtagtgaaaagaggcaaacattgccagaaatttgataattcagcccaaacgaatacaatgctgaaacatgcaaacgtattctcaggtccctaag

SEQ ID NO: 1542 - DNA, 200 bp, Homo sapiens
  misc_feature (1)..(200): DMR10:11289801
cttaagtaaatcctgtaacgatcccttttgagaaataaacatttttaacatgatagatttccccttcataaaaataagtcatttttttaaaaacatgaaaattagaccctcccaacttagatttcacaaatcagattaaaatgtattttcttaagagggattttttttctcccctgtgagcactttgattaccccaaaat

SEQ ID NO: 1543 - DNA, 2100 bp, Homo sapiens
  misc_feature (1)..(2100): DMR10:11367201
ctcgccaacctgggaggctgcaatgatgctatttgctaaggagggttggagggccattcaaacatgggactgagggggccacacagatctccctccctcatcctgggccacttctcctgtcttgaagccccgaggaagctgaactcacccatcagtctctctcatccgttggccacctgctgtccccacccacccaccaaactggtgcttttaatggaatcagctttaaaaagaaaaaaatcctccaagtaacaaagcaccctataattattccgcagctccttgtcctcggtaattttaggcttgtgctgctatcattacacattacatggagttagggagtcatagctcttgtgtggccaatcagtgatacatctgcaggatttccaaatggaagggaaagtccaggcgcatcctggtggatgggctgatggggccttgatgactgcggctcctccagaccccaagcacacacgggagtgccggtgcctccagggagggccagcaggaggcgctggggacaagtgtgcactcggtgcccacagggcaccaggccctggtttattcaagagcacagtgtgtagaaccccactcccctccccacacctccaatctcagcctcccgtccatgctcgcctctgcaaatggctcaaatccctccagcttctcctcctctccattgagctcgctctgtccccaggcctcccctggaaccctgatccagccctcccctggcctgccatggtcatatgtccttctcacaagcctctggtgattttttttagaggcgaatctgctaataccacttcctgcttagtgttcttcaccggcttatcactgccttcaggagaaaattcagaatccctgcagaggggattcgccgccaaccgtgctcctcctgacttcatcaggagggcaggagggatagatgggtgcagtgaaggtgggactccccagggaggaaggctggggaggggaggcggatgctggagccggcccaagcccaggctgccatcaccacaccgtgtactcagggccctggcctctttccctggcaggaggtgtgggagctgcctcaggtatcttaggtggggctcgagacttctcagccctgcctacttcctcacttcctcacttctttgctccctttttagcaaacgatcaggaaacaaccataagcattctccgttgagcagcccatgacactgctctgcctacggagtagctgttccttttgcttcttgacttcctttacaaacttgctttcactttacggccttgccccaaagtctttcttgcatgaaatccaagaatccactcttggggtctggatcagggcccctttccagtaacaaacccattacacctactatggcaaaatcatgccggatatttacctatgtcacgcaatcaactttgagtcatggttcttatcttcaatattcaacagggaaactgaggcttgaagagactgagtaatccccaagaccacacaagtgctgggtctgtcaccagcatcttgctcatcttactccactgtgctgtcactaaaatgtagtccttcccaggatggtgtccacagcaggggaagtggcccaagctctgcccagctctctcaccatgggccttgtccaggatctgtgtctgaattgggggaagaggagggaacagcctaaatgactgaatattatataaacctggatgacagtgaaggaaatcaaaacattttctactccaaaatatatttctttgacatattttgagatagctgtcagagggccagctcaatgaagcagccctgcaaagctgtcttttttggggaaaatgtgcatctgtagaaaagtctgcaatgatgcagccagaccttcccttgtctagaactacaaaagatgaactgagagactgagacctttaaacgtcagaaagaaacatttcccatctattctctctgggggctgctacctgtgagctttcatctacataataagaccggctttgctagccaggccttttcttctcccccttccataaccatctggccactataacctgatttaccactatttttgaccatgctctgagcccacattccttctgtaa

SEQ ID NO: 1544 - DNA, 1400 bp, Homo sapiens
  misc_feature (1)..(1400): DMR10:11684401
ggaacaggaagccaaacaccgcatgttctcttgtaagtgggagctgaacaatgagaacacatggacacagggaggggaacatcacacactggggcctgttgggggagggcaaggacggggagagcattagggaaaacagctaatgcatggcaggcttcatacctaggtgatgggttgacaggtgcagcaaaccaccatgacacacatttacctatgtaacaaacctgcacatcctgtacgtattactttaaagaaacacccccctcacaccaaaaaaaaaaaaaaagaatctgcctttgatattccaggcctgcctgattgctggagaggcacatccttagtgaccatcgggacaaggctgtggggagggctgggccccgagacccgggagtggccctgcctggccatttgctcaagcagcatgcaagccggatctacagccggtgcaccttgttccttgttcttccgggcaccggaggcccacgtgaaacctctcagaggagagcgaagaaggccacctttcatctcaatgagccaacagcctcacatctttaagtcctgcctaatcttacgagtcatgagtcatcgcttcttccccgccaagtcattcaggattcagtgactccagctgccctcaggatctgacggaatcttgaaggcagagttccgagactgcagtccaggatagagaagcccccggctccatcaggggctcctcggcttcaaggcaggacccaccccaaagctctcaaagcggcagaggcctgttttcaggtctatttttaaagatctctaggggaagtggtttctgaatgctctgtaggatgaggctgtgaacagtgattgtttcatttgctcggggctggcaaaaaagggatgtacaacccgttctcaccacaccagtgagttaaaaagcactgcagactatgaataccttttgccagttggactggttatggaaaccgatggcttcccctacaactggggaggctgccagcccgggtttcttgggacagtccctgaatatcttggtctagcttcgaatgcacttgctttatgagtcaccgttcaattaaaataaaagtggccaaggaaaaagaatcgaaggaaaagacacgaaaactgtgcagaggatccaaagcaagaatgcatttacgtaacaggcatgccttactctaaaatcaccaacacaaagtcccaatttacaatacagaaattgcctagaatagaggcaattatactcatggcagaatgtgaatgatttcattttaccaagaaaacaaagaaagaaaattcatcagaagtttccttttagtgtcttctctaataaattttaaatattactaaactgtcagaaatctgatttacatctgactttttccaacccccctgtatggtat

SEQ ID NO: 1545 - DNA, 100 bp, Homo sapiens
  misc_feature (1)..(100): DMR10:13047601
cacagaatgcctgggtacatataaagagacttcagtaatctgctccggagcccagtgtggtcctggcaactgcaagctggatctccatccgtgccctccc

SEQ ID NO: 1546 - DNA, 1900 bp, Homo sapiens
  misc_feature (1)..(1900): DMR10:13678901
ggttggaaatactcaatatcctccctctagctatttgaagctatacaataccctactgttaactattaacatcctacagtgctataggacactcgaacacattcctcctacctcactgtaatttctgtcctacaacaaatctcccccatcacctactctctctacccttcccagcctctagaaacttctgttctactttatacttctatgagatccacttttaaaaaacacatagtgttatggctgggcgcggtggctcacgcttgtaatcccagcactttgggaggctgaggcaggtgggtcacgaggtcaggaggtcaagaccagcttgatcaagatggtgaaaccccatctctactaaaaatacgaaaaaaaaaattagctgggcatggaggtgggcacctgtaatcccagccagttgggtggctgaggcagggaattgcttgaacccgggaggcggaggttgcaatgagccgagattggtccactgcaccacagcctgggtgacagagtgagactctgtctcaaaaaaaaaaaaaaaaaaaaaaaaaaaaaaaaaaatatatatatatatacacacacacacacacacacacacacacacacacacagtgttcacaaacgatgtttcctgagtccctgggttagcagctaggtctttggggcagctatggttggaggtggggtcaaggaggttctgtggctattcttatcctattccactccacgttcctcaaaacagagcagctccccgtgaacctgctgcatgtattcaggttgccgtattgtaacgaaaagaggttcccattgccttttttgtctttaggaaatccactgttctggggcaagggctcggagctttcaccgctgctctacctcagggcttgtctgatctgagcctgcgggctgctacctgcaactaagcaaacgtggccaccaaggcaagaggtggccgagtgcccagtgacacggacacaccagcaacattccacagaagcagctcaaagggcgtcaggagagggagcccaaaatgccctctgatattgatctgctttcccacgtcctccacaaatgcccactaggcatccactgacccagcaggttggttttaaaagggaagaaggaaagaagctacaagacagggagaaatcaagaggtggaggttcactctcactgcctgccttgatgccctcaagtgacagaatgactccaggaagaaattgaggcagggcagagccttagggctcagggaaatgggactgtcaaaaactaaaagctggtcacagtggctcacacctgtaatcccagcactttgggaggccaaggagggagcatcccttgaagccaggagtatgagaccagcctgggcaacatggtgagactctgtctctacaaaaacaaaaccaaaccaaaaattctaatttcaaatcagcacctaggcttatgctgatttatccattttcagttatttgaacacatatatgcttttgcaagtgcaaacctctttgaggttgtgtttagccccttggaaattaaaaaaaaaagggctgggtgtcgtggctcatgcctataatcccagcactttgggaggccgaggtgggcagatcaggaggtcagattttgagaccagcctggccaacatggcgaaaccctgtcttctactaaaaatacaaaaatcagctgggcgttgtggcatgcacctgtaatcccagctacttggggagccgagacaggagaatcgcttgaacctcggaggcggaggttgcggtgagctgagatggcgccactgcactccagccggggtgacagagcgagactccatttaaaaaaaaaaatttaaaaaaaagtttaaaaaaaggatataggctgggcgcagtggctcatacctgtaatactagca

SEQ ID NO: 1547 - DNA, 1900 bp, Homo sapiens
  misc_feature (1)..(1900): DMR10:14980401
ctcctaatgtcacacgtggtgtacaaacagtgatatcatttgtgatattttatggaaatgttacccctaatatcgcaggggctgtacaccttgtaatcttattcagaatatgaagtaacgtacctgctgtcaggagatctgagcttttttcttggacacattatacccacagtcctccaggtgttggcgtagggcaatccgttctcttggcgcacccgactgacctggggtgtcccagcaaaagctcaacctactggagcaaagcgcagcctatgtctctggttggaaacctctggaggtctcgagccaacgcctcaccgaagatggtgggggagttcttgaacctttggggaagaccggtccaagtgtactgagtagtgacacctgactccggaccttcccactgaaaggcaaagagcttctgcctctcaggggctaatctgataggaaagaaagcgtctttcaggtccaagcaggtgaagcagctgtcctcagctggcagcaaccccaacaatgtggacgggttaggtactgttggatggaaagtcagtgtagcttgacgaagcaagcgcaaatcctgtcccggcctgtagaccttggtctgtggcttgggaacaggcaggaggggagtgttccatggcgaatgacaaggaagtatcattccacaagttcttaggtgcttgagacggacctggataccttgaagagcttctctggtgaccgggtcctgtttttgcctaagcggctgggccccagtcttaactggccaactctggagggttgtcttccgcccgtactcttggccaccgcttagccagagctggtcttctctcttggcctggctcagttcagaaaagtctccattcctcctctcgggggactgtaagggtcataatgactcccgtggtgggtaactttagcagcaaagagctgtgttctgtcaaagagagactggctctcagcttgctgagcaagtcccttcccagcaaggtcaagggacggtctggcatgtacaaaaactgatgaatgacttgatgtcctcctacagtacaagtccgaggcgagcagaaagcttgctttgcggaaacccccgtggctccggtgatgtcaagagtctttttggataagggggcgaccggggcggttactagcgaatgttcagcaccggtatctacaggaaaatcaatgtctctacccccgacagtcattctgaccagaggctctttggggacgcttgagcccggtctccctcagtccaataacccttctgcgaggttgagccgggccccttcctcctagtccagggcctcctgttctgagtcatcttgttttcttttgagctgagggcatttgttcttccaatgtcctatttctttccaataagcacactggttacactgcaaactctgacagccaagctgagtttctttcccagggccccccttcccttgcttctttggggggacccctctgattgctgcagctaacaaacaggtcggcgtttccccgggcctgacctccattctctttgcgcttttcctcgcggcttactgcatccctgtttacaaacacctgcttagctctttctcatcattgtgatgtattcacccctgcaagcccagcctgcttctgcagttttcttctaaggtcttccgcgctttgatggattaaagccatgtgaatcatgcgctgattttcagggttatcgggatcgaggggagtatacatatgataggcctcacacagtctctcgtataattgtgctggactttcttctttttcctgaatgacctcagagaccttgttaacatttgtggccttctgagctcccctcattaatccttccaagagagcttccctgcctcagtttagcctttgcatatcctctctttcatgtggg

SEQ ID NO: 1548 - DNA, 1700 bp, Homo sapiens
  misc_feature (1)..(1700): DMR10:15012201
tgaaagaggatgatatgactcgcaatatcgcagggtgtgtacacccctcctgtcctattgttctgaataccctgggagggagaggataaggtgacattgaatatcgcagggaatgtgtaccctccccctctgatacccttcctagtatccaggggaagagaggaaaattttactcccaatatcgcagaggcagtacaacccacctgtgatgttgttcccaatacgcaaggttggacaggatgatactactccgaatatcgcaggggtgttcacatcccccgtgacattttccttaatatctaggggagagacaattatatgacagcaaaggtcgcagggtctgtacatcccttcctgatattgttcctaatatccaagggggaagaggatgatatcgaatatgaaaaggagtgtacaacccccacccctaagatattgttcttaatattcttgaggggagacgatgatataactccaaatatcgcaggggttgttcacaccccccgtgatattctttccaatatcctgggtgggagaaaatcatattacttccaatattgtaggtagtgtattccccacctgaaatactgcactgaatatccaaagagggagaggatggtattcataccaatatcgaagtgtgtgtgcacgccccttgtgatacggtttttaatatccagtgggcgggaggatgatattcatcctaatgtcacagagggtgtacactacccttgtgatactgtccctaagttccagatgggagaggatgaggtcactcccaatatctcagaagttgtacatcccccgtgatacttactgttcatcatatccagggaagcacaggatgacattccattgaatttcgcgacaggcgtacacgcacagtgtgatattgttcctaatatccaagaagggaggagatgatattactcccaataaagcagtggttgtacattacccgtgtgttattgtctctaatatctggggccgggggagcggggaagaggataacattccctcaaatttagcaggtggtttgacgcccctcgtggtggtgttttacatatccagaggggaagacaatagtactatttttgatagtccaattcatccgctccacctttccagaactctgaggctgggaggcggcatgcagtttccgtgtgatccccaatacctttgctgtcttctgtagcaagtcagctacaaatgcaggcccgttatctgagccgatccggaagggcagtcccaatctaggaatcagacctcgaagaagcacacgggtttcttcacgaggtttcccagttcgtgttggataagcctccacccacccagagtaggtacgcccaagaacaagtaaatacttgttacctccacactttggcatctctgtgaagtctacctggagatcttcaaaggggactgctccataagcttgtacactgggctgaacggctggaccttgcctcgcattaggctgtaggcaggtgacacaccactgcctcaccgttttggcaagagctgacaaatgtgagatgtagaaataccagcctaacaacttttcaagtgactcctgacatagatgggtgccagtacaactgcagttcctcacagctgtggcacagctacgctcccatctggtaactgactccatccttcctccatcacttgtccttccctctacctggagaaagtccttt

SEQ ID NO: 1549 - DNA, 200 bp, Homo sapiens
  misc_feature (1)..(200): DMR10:17110301
aaattattcgtgagggcaatggaacagtaagtctgtgatccactcagaaaacttttcaaattctgcattatctctgtagctatttgacagtttgtaaagtttgttgttttctactgatattcaaaatgttttttctttcttatcatagagttgtactaatgtgtcctgaattcacaagataagcaaaactttctgtacta

SEQ ID NO: 1550 - DNA, 1700 bp, Homo sapiens
  misc_feature (1)..(1700): DMR10:20298201
ccacagtctacagctagaagatttcaaagggtgaatgcaaaactgcctttggataacttgagagtatattgaagtgtttcagagctctctgaggaggcaggtaaacacctgatttagtcatcagggaaactatgaagatgtcagtcataaaggaaactgattggctcccatgaccctgtctctgtgtttaaagatcatagccctgcagggtccaagtccattcaccctgcaatggagcttggtttgtgccttggagatgtaaggagctggtggaagaacaggaaccaactagtttgttatatgttaggcctcccatttatggggaaccagatttcatatgtgcacttcactaccatagagcgtagagtaaacacaggaaggaggaggagaatgcagaaattgagaaaagctagaggtgcggacaggaagctactgcttcagctggtgcctattttcctgctccaggcagtgggtatgttaataactgtcatctacacatctatttctccaagtctaaagatagggcaattgtagattttggaaatttttaaaatgtgtcaaagagagaaaatccaatgagaatcctataagagtttgcaacttcaggacaggtagaaacactagcctccacccggtaatgcacctgttattttctgtgaattgctatcactttcaagacacacagaagtacttggtctcccaaagtaaataaactttagaaatgccagcatctcttgataaatgttaattgacccctttttaacgtgtattattctaatgtctgcagcaaactttacttaaagcctttgatcgtctaccaaatattcccctgtcatttttttttggtaaactttacaaacatttgggggttgcagaatcgtgttcagctttcttcccagaatttctttgtacaattgcaatttagctttctttccaaatggattcattgtggcgtgagtcttgatagaatgtgaagcaaattctcctcctggaatttggctgtaagcctagaggatgggctgcataaattattctaaatgccatagaatcttgcatgttgtttctttctagactgttttaaatctgcgtcaggatgcctggaagtgagacactgaacaagcaagagctcattgcacaaaagagaaatagtgacttgcaaaaaaaaaataaatgaaacatcctttttgtaaaatgttgtcacttggaatttaattaaatgtcatcttcttgaggaaatgtatgttatttgagctaggccagatcccagcaggttaaacagcaatagggtaaataagaaaggaacagccttgttagagagaaaagttaaaatgaggttgttgagatcacaggagacttctcagtcacatatgaggcaataaactccagcagaaggggtgtgttcctggaaaggggaaggaatccatgtggattttaattataattttaattttattttaagttcagggtgtgcaggtctgttacataggtaaacgtgtgccatggtggtttgctgaacctatcaacccatcaccttggtattaagcccagcacgcattagctatttttcctgatgctctccctcccccatcctccttcaacaggccccagtgtgtgtcgttcccctctctgtgtctatgtgttctcattgttcatctcccacttataagtgagaacatggtgtttggtttcctgttcctgca

SEQ ID NO: 1551 - DNA, 1800 bp, Homo sapiens
  misc_feature (1)..(1800): DMR10:20668501
atctattaatgatttttttaattcatggtgtcattttcctatctcaggttaaaggagagtttaacagcagtaaatcccaaacaaaagcattctgattttagacaatgctatacataagaagtagaaatatctcaaatacaattctcaaatgacgcttttagttgtatgagaaagaaaagccgtaaatactagcataaccaaatgatatggtttagctctgtgtccccacccgaatctcatctcaaattgtaatccccacatgtcggaggaggggcctggtgggaggtgactgaataatgggagtgaacttcccccttgctgttctcgtggcagtgagtgagttgtcacaagatctggttgtttaaaagtgtgtggcacctcccgcttcacactccctctcctgttctgccatggtaagatgtgcttgcttcccattctctttctaccatgattgtaagtttcctgaggcctctcagtcatgcttcctgttaagccagttaaaccaattaactgtgagtcaattaaacctcttttcttcatatattacccagtctcaggtagttctttatagcagtgtgagaacagactaatacaccaaacctctgtcatcaaacaggaaaccattatctttcattgaaactgctaaagacaccacagtcaaagttataacctctatccactggtgatttaattaatgtgaaagacttactcataagaaccagtgtggtgttgaagtccccacacacacccctcctgtaaagtagaagtttggtcactatatcccctgatggcaatgtttattatatgtggctgtgcaaataggggaagagacagtgagacagcacatgacctgagtacagaaaccatattacaggaccagaagtcctggcccagtctctccacaccaaattcagcccccaaatatgtcttcctctgtctccaagctgcaggacatggcacaaattgaaaacaagaaaagtcccacttttgaatacatagccaagtacgttggtagaaaaagagcatattttggccaggtgcggtggctcacacctgtaatcccagcactttgggaggccaaggcaggtggatcacctgaggtcaggagtttgagacaagcctggccaacatggtgaaatcctgtctctactaaaaataagaaaaattagccgggcattatgtagggtgcctgtaatcccagctactcagaaggctgaggcaggagaatcgcttgaacctgggaggcggaggttgcagtgattcgagatcgtgctattgcactccagcctgagcaacaaaagtgaaactccatctcaaaaaaaaaaaagaaaagaaagaaatagagcatatttttttaaatgttccctcaaaatcacttttcaaaacaggcttttcccattgaatgtaaatgtagcaagttgaaaaattaagtctgtaggttccttcatctcctgagtacttgctttaatgtggccagtaccagaaacggttcttccatttaaagtctgatcattaaattagaagtaacttaaagggactaattgctcatgggagatttgttcttttcaagcagtagaacacagagctctgtaacatcctgtgttctaaattatcattatggccaaaataggtcctgatccaagcacaaaaatccttctcatattttgcagttcttaatagaagtgtctaacctaatgtaatttgattcacgaatgttagtagtgcaagtaaaacttgtttttagaaattgggtttttttggtttgtgttgctgatttctcatttttagttacctctgcgg

SEQ ID NO: 1552 - DNA, 300 bp, Homo sapiens
  misc_feature (1)..(300): DMR10:20799701
agggtcaccaatcagtagtcagaaaaccgaagcagtggctaaaatagaaacaccagcaagtttattttaaatgaagatacatagttctaaatcaggagtgtattttcttcttcttaaataaagctcatgtatatttgaagtttacaacatgatggtatgggatacatatacgtggtaaaatggttactatagtgaagcaaattatcatacctaccatctggcacgtgtgtgtgtgtgtgtgtgtgtgtgagacggagaaagagagagcgcacgcgtgtgagagagcgagcaaagggcagc

SEQ ID NO: 1553 - DNA, 500 bp, Homo sapiens
  misc_feature (1)..(500): DMR10:21315901
gtccatgctaaaatgttaatggtactaatgggttaattcattctctcttgtgcactctctctctctctgtcagagcctgacctcccccctagactcctcccccttgccttgctgggcaatagccattcatccccagatgcagagcagaaaggagcctcctccgccactaacccttgaattcttgagctgaggccaagaaccaggcagccggaacagaaccagttgagattagagtttcacacatcttccaaggacagattctgctggctgccccgggaacccacatagccttgcccaagcagagagaacacagagccagccctgcagaagatgtagggagcaagacagtgactctctcaggggcctcagggggtcttgtcatcaccccagcctgggactgtggcaagtcttcaccctcggagccaggctgtgctgcccaagactgcccagggtgagagaaacagggcaaaaccaaccaacagatggtgtttctagctccc

SEQ ID NO: 1554 - DNA, 300 bp, Homo sapiens
  misc_feature (1)..(300): DMR10:22585201
aacgtccctaaccttcgggaaaggataagcagatgtactatgaggagatttcaaagaagtcacatgtttgccctaaaatccttgaaatttgaggtgctgattagcttatttaacagggagttcagattttggggcaaaacttctggattcaactaaagatattaattgtttccctaaataaaaggataagaaaggaatttaagtcgttttttatcaattttacccatttatcgattcagtcactttgaaataagaaagtaaattaaaatgctgcatttcaaaagctattaaaatactcaa

SEQ ID NO: 1555 - DNA, 600 bp, Homo sapiens
  misc_feature (1)..(600): DMR10:23917301
actcagaaggaaccactctcatttcagtccagagagcttctagggcagtagggcatctgagacaaggggatactcaggttcttactcctcactctgaaattctcagattgcttgttctgtgaatacttggcagcaagcctagggccttgtgaaaagagggcagtggaagaaggaaatggagactctggactgatgtgggagcagcggccacagaggaagaggtggtgagatgcaataacagattggagatctggagcaagaactctgactgtgcgagtgaaaagtgactatagttttagtttggagatgtcatttcccagagctagtgtgctgcaggcaatatgaaaggtcaatgcaaaagagtcagccagagagttccaggaaggtaacacagggctctccccagctgtccagacagctgtcgctgacaaatggtgtctgtttctcgctcccacagcacatcctatgtgctaagtatgaccagcaagggaagatgagaaaccactctcaatgcctaaagctgtgaagggcctatgaccctttgtcttccatttagagaggtatgatcacttgagtactttgctttagggtttgtgggat

SEQ ID NO: 1556 - DNA, 500 bp, Homo sapiens
  misc_feature (1)..(500): DMR10:24331001
tggcatgatcacagctcactgcagccttgaacttctgaacccaagtaatcctcccacctcggtctcccaggtagctgggaccacaggcaagcaccatcactcctggctaattttttattttttgtagagacagggtctccctgtgttgcctaggctggacttgaactcctggcctccagcagtgctcccacctcagcctccctaagtactaagattacaggcatgagccaccatgcccggccagtgaggacattttaaagaaggaagcagaagaatcaactagactgattgccctctccaaaattaaatattgcaaaggcaggagttggataagcatttggtcatgaaagatgttaggatgccttagaatcttcgaaggctaaaaagcagcagcattaatgaagttgaatgtatgaaagcagatttcaggtgttgaagaggaagcagctatcaatgcagagattaaatagacgaagtcacaagaatctagcagtagtaat

SEQ ID NO: 1557 - DNA, 200 bp, Homo sapiens
  misc_feature (1)..(200): DMR10:24953001
accgtcccagccctcgggctaacaatctccttgactcctccctgccagatttcatgcacgcgattgtcccaagcagaagcgtgaaagagcctgtgagccagcgtgctcttggaggatgggaagtgtcctggatgtgttttcaaaccttggagccgccacccacctctctccacctccgctcatctccctccacctcccct

SEQ ID NO: 1558 - DNA, 900 bp, Homo sapiens
  misc_feature (1)..(900): DMR10:27066801
ttagaatagatttttttttttttttgagacagagtcttgctctgatgcccaggctggagtgcagtggcgcaatctcagcccactgcaacttctgtctcccaggttcaagcaattctctgcctcagcctcccgagtacctgggattataggcacgcaccaccacacccagctaatgtttgtatttttagtagagatggggtttcatcatgttggctaggctggtctcgaactcctgacctcaggtgatccacctgcctcagcctcccaaagtgctgggatcacaggtgtgagccacatctggaccccagaatagaacttaaggatagaaaaatattcagagatatccactaacttaccacttctattatttttgtgcacttcatcaacataagtcaaattgtcattatttgtttgctctagtggagcactttcaataatatcaataccattttctttttttgcaatgcctggctttgttggttcttcctattaaaaacaaaaacaaacaaacaaaaaacttcagaaaacactgtatttattcacttacccattcaatcactgtattagtccgtacttgcactaccataaagaaatacctggtcatccaagatgggggcatagttttttttttttaaagaaacacctgacggggtaatttatgaagaaaagaggtttcactggctcatggttttgcaggctgtataggaggcatagcagcttctgcttctggggaggcctcgggaagcttataatcacagcagaaggcaaagagggggcaggtgtctcacatggcagagccagggcaagagagcaaggtggggaggtgctgcacacttttaaagaagcagatcccatgagaactcacttgctatctcaaggacaggaccaatggggatggtg

SEQ ID NO: 1559 - DNA, 1200 bp, Homo sapiens
  misc_feature (1)..(1200): DMR10:27408201
aatttaaaaatgttacaagttctttcttgtcagcaattaccttaaatgtaaatagattaaactctccaatcaaaagacaggttggcagaatggataaaacaacatgatctaactatatgctgtttacagacttactttattgccaaaaatataagtagattgaaagtacataaaaggatactctacacaaatagtaaccaaaatagagcaggaatggctacactaacatcaggcaaaacagacttagagacaaaggagtacattatatattgataaacgggccaattccccaagaagctataacaactgtaaacatatgtgtactgcataacagatacccaaaatatatgaagtaaatattgacagaagtgaagggggagatagagcgctctacaataatagctggagaggactaggcgtggtgacttacacctataatttcagcactttggaaggctgaggtgggtggatcacttgaggtcaggagttcgagacaagcctggtcaacatggtgaaaccccatctctactaaaaatacaaaaatcaggtgagcatggtgatatacacctgtaatcctagctactcaggaggctgaagcagaagaatttcttgaacctgggaggcacaggttacagtgaggcaagattgtgtcattacacttctgcctgggtgacagagtgagactctgtctcaaaaaaaaaaaaaaaaaaaaaaagaaaaaaaactggagaatgcaatataccactttcatcaatgcatgaaacatctgagaagaatatcaataaggacatagagaaatgaacaacactacaaaccaattagaccctacagaattatatagaagactcaacccaatgacagcaaaatatacattcttctctagtgcccatggaacattctccaggatagatcatacattcagctgtaaaacaagtctaaataaattttaaatgattgaagttatacagtgtacgtttttctaaccaacaatagaataaagctaaaaatcaataataggaaaactggaatattaacaaatctacaaaaatgtaacaatacactattaaacaatcaagagacattagaaaatacttagttaagaatgaaaatgaacacacaacataccataacttatgagatacagtgataatagtgctcagagggaaatttatagctaaatacccacattaaaaagaaaaa

SEQ ID NO: 1560 - DNA, 600 bp, Homo sapiens
  misc_feature (1)..(600): DMR10:28433001
aggagggcagaggataacaatctatttcttattttaatgacagggtatcacacgcttgcagcaaccagaacgtgacttctcctgagtactgaagtatttcacagcatctgcagaatttaaaaggaaggaaatcaaggaaaggaaaatttattttcatatacccttagttcagaataaagacacatagaagccttatggaggaaaagataagaattttataagcctcgatgttgaataaagaattttctattgcaattttaaaatacgtatgtatggcctctgcccagttaggtagccttgtgggccatttgggtaaagccctctttatactgtaattcaatgtgtcaaagatcagttgttattagatgggcagacttttttcaaaatgatagaatccagtttgggcaaaagtctgggaatatgaaccattttgtacactcttggctggagggtaaatgggtacaactttggaaggcagttaggcaatgtccattctaattttgtgtgaacatcctacatgatccctcattctgacttctgtcctgtaaaaacactagtaaagtgttcaaaaagatgtgataaaaccttcattgtagcatt

SEQ ID NO: 1561 - DNA, 800 bp, Homo sapiens
  misc_feature (1)..(800): DMR10:28748301
gttttgtttactgtaggcttgtagtatagcttgaagtcagatagtgtgatgcctctagcttggttctttttgcttaggattgccttggctatacgggctctttttttggttccatatgaaatttaaagtagttttttctaattctgtgaagaaagttaatggtagcttgatgggaagcattgaatctgtaaattactttgggcagtatggccattttcacaatattgattcttcctatctatgagcatggaatgtttttccatttgtttgtgtcctctcttatttccttgagcagtggtttatagttcttattaaagaggttcttcacatcctttgtaagttatattcctaggtattttattctctttgtagcaactgtgaatgggagttcactcatgatttggctctctgtctattattggtctatagaagtgcttgtgatttttgcacatttattttgtattctgagactttgctgaagttgcttatcagcttaaggagtttttgggctgagacgatggggttttctaaatacacaatcatgtcatctgaaaacagagacaatttgacttcctctcttcctatttgaataccctttaattctttctcttgcctgattgccttggccagaacttccaatactatgttgaataggagtggtgagagagggcatccttgtcttgtgctgattttcaaagggaatgcttccagcttttgcccattcaatatgatattggctgtgggtttgtcataaatagctattattttgagatacgttccatcaatgcctagtttattga

SEQ ID NO: 1562 - DNA, 1700 bp, Homo sapiens
  misc_feature (1)..(1700): DMR10:30019301
gagccgagatggcgccattgcactccagcctgggcaacaagagcgaaactctgtctcaaaaaaaaaaaaaaaaaaaagaaaaaaagaaattgtatatacacacacaatgggatattattcggccctaaaagataagcaaatcctgccattttacaacaacatggattaaacttcaggacattatggtagtcaaaaaagccagacacagaaacacaaatactgcatgatctcacctatatgtggaatcatttaaaaaaaaaaaaaaagttgaaatcacagtaacagagagtagaagggtggttgccaggggctggggtgaaggaaaaggggaaatactggccaaagggtacaaaccctaagctataagatgagtaagtactggagactgagtgcataggatggtgactttagttactaatgccatcatgtacacttggaatttgctgatagagtacatctcaaatgttctcagcacacactcaaaaaaactggtaactatgagagaagatgactatgttaactgccttgactggggtactcatttcacaatctatagatgaatcaaaacaccatgttctataccttaaatatatgcaatttttgtcaatcatgcttcaataaagctgggaaaaaaagaaaaaggaaaaaaaacagcaagtctcggcatggtcaaaaaaggtgattcacttaaaaaaaaaaaaaaaggaaatctggaagtatctgaaaagttagaaaaacaatcttttggccgggcgaggtggctcatgcctgtcatcccaacactttaggaggccgagacaggtgaataacctgaggtcgagttggagaccagcctggccgacatggcgaaaccccatctctactaaaaatacaaaaattagccaggtgtggtggtacatgcctgtagttctagctactcgggaggctgaggcacgagaatcatttgaacctggaaggtggaggtggcagtgagctgagatcgcaccactgcactccagcttgggcaacagagtgagactcggtctcaaaaaaaaaaaaaaaaaaaaagaaaaagaaaagtgaaaaacaatcttttctgaaatccatctggacaactgtgcattaaaaaggccatagacattccaatttttccagcagcaaaatgtcttacacatcctcctcactccttttcaacctggctgagacagatgtatgatacaacaggtatcacgactgtgatgactgagacagcattcagagtacttaaagccctacattactacccagatgggacagtctctgcatttaggaaaagaagtttgctcaaacgtcatcagctgcacgcaggaataatctggctaaaaggaaggggagttcacataaattctttctgactgttgatgcttaacaacatccatgaaacaatataagacattaatagctgggtgcttcatttctgtgctcaatcagcctcagagtgttcacattctgagagggtcctcctgtgagcaaaggtgtctttttctccattgagaataaggtgtgcggtcatgaaattatgagaacgtgtggaagtcacacttcggctagtgggagcacctgttattaagatgcttagtttcttccaggctaagcctcacattacataacactaggcatggaacaggccatgccatgtctgtctgtaccaccccacccaacacacacacccttcgagaccc

SEQ ID NO: 1563 - DNA, 1200 bp, Homo sapiens
  misc_feature (1)..(1200): DMR10:30370401
cccacctaggactttgtcaaggccacagccaggtaacagcagggtgggcacttggcctccaagctctgcatccagtgctcgctccccacagtgccccgcaactaacccacagcagctgactcagccccaggctgcctctaacaaccacacacaaaagcagcaagaaatggccatgctgccttctgggcaggacattccaccctgcagcaaagagggcagtaacagaagagccatgctgcatgctccatgctctggggtccctcagggtgaggcctgggcaccccagctccccatttacccttagcaccagaggcccccagaccctttcttcagggccccaaagggaaactgaagcccaggattggcagtgtggaatcaggggaccccactggactcttagcaatgactcggtgttttcattgagttgattgattgttgtggagctcaagtccagggctactgctagttcttggtactggctctgaggcacatgcagagaggaggaattggaggaggattgcggggagaggtagagagaacaatcattagggctggggtgtgtgtgggctgtctcagctggcagaggggcactcagcccctgctgtgggaggaggttggggggctggcctacagggccactgcactttggcccagggcctcttacctccagatccttcagggtagcagatgatgcaggggtaataaaaataagaaattcaaaaaaacaaaaacttccatcaaaaacagttatggctatggagaaagtataaaaacagcaagaggctgggcacagtggctcatgcatgtaatcccagcactttaggaggctgaagcaggtgaatcacttgaagccaggagtttgagaccagcctgggcaacatggtgaaaccctgtctccactaaaaatacaaaaaaattagcctggcatgatgatgcatgtctgtaatctgagctactggggaggctgaggcatgagcatcacttgaacctggaaggcagaggctgcagggagccaaaatcacaccattgcactccaggagagagaacgagactcttcaaaaaccaaaacaaaacagcaagaaggaaatatggggatctgggcctttgtttccagaacagagagacctgggctgggcacagaatctcagagcatgaggaaacaggccacagaccccctaatctactggaccattggcagag

SEQ ID NO: 1564 - DNA, 2900 bp, Homo sapiens
  misc_feature (1)..(2900): DMR10:30846501
tgcaggagtgggtagagaggggccctgaggcagagctgggccaggggtggtgccacacttcatggagccagtgggagctggggacaagcacgagccctgccctttccaagttgacggtgtgggagcttaccaggcacaactgcctgcagctgcccaagctgcagctgtgacccaggcacccctgtgctcttggaagctgggagcaggcaggagcgctcctgccctcccaggcatcactgtagctaccctgctgtggctgcagatccaggcatctctgcactctcaggggtccaggaaggcccctttccccccacgggctcaagaagcacctgctcctgctgcctggcttctccctgctgtcagcacctgctccaatctcaaagcaaggctggggctgagcctgggctctgctgtaacctggttgggtgtgcacacgcttgaggcagtgctgatatgcccacctcctaccccattggcctgctccagactttgggtgccaataagcatggaagggaggctgaggaaggggtgctcaggacagctcggtgccagcctgcaggtgccccctcagcatgaacagcctgggtgccataaacagaagcagggagcaaagaagctcctgggcagaaaaggggaggtccccggtgaagccccaccttcaagccagagaagccctgaagcctgggggccaggttgccagtcatgtggactggagtgggaacttgtggtgcttttctgggtctgtccatgactgcccatggaccaactgcacgcatttcctctcctctgaggcacataaaagccccggacttagccagacttgaagagacaatgggacgaccagtggcagagaggagctaccctctctgctgagagcacaagagatgacggggaaaacctgcctgcagagaggaactgccccctgcagttcaactctgagctgttctatcactcaataaagctcctcttcatcttgctcaccctctacttctctgtgtacctcattcttcctgaacgcaggacaagaacttgagacctgccaaatggtggggctaagagagctgtaacacaaacaggctgaaacacgcctcttgcttgccacacagcaggtgaagagaagagctgcggccctttggggagctctgtcctgggagccccctgagccagggcagtgactccctagtctccaagcttctgggcaacatcatgttcctggtgccaaccgtggaagctgcttgtgatgtgcctggtccagccacagccttgcaaggaggtggcacctggagctgcctggcctgcagcagcagccggcgtgcctgcctatgcgcagtggccagaccccacgctcactcacacatccctcaccactctgtgcctggctcgcccttggcaggcatgggatctaggccggtagcatgagctgagtgcagcctgctaggttccaagtgggtggaacgagcctaatgggccagagcaaaactcaggccaaggcgccactggccacagaggtttccggctggtgaaatgacaccccaaggatcccatagcaataataccaggaagcagtgcttgcaaaaaggaatgacaccagaaagagtgaacccgaactgatgggaaaaacagggcaaatgaagagggtggggtctgggcaccttaaggtagggtcaacatgacagacccacccactctgagtccccaaccatgggtcatgccgcattttggggcaaatgatgctgtttaaaataacgcaaattctgtggatgtgattttgggggaaattacttgtaaagaccactggaactatatacagtactttactagattggttagggtaattccaagtatggatgatcagaaaccagagagaaacaagatcattcttcacagatctaggaggtatacatagctactttatgaaatcttaatcctagagatgttttataaactctcctttctgaatatgaaatcttcccctcttccccaaatcaaaacagactctcttgccaggtctccattacattggcactcacctctccaatgatccctccatgcctcgcacactcatgtctctgttctttggtatgtctcctggctgcagttcactgggcgcaggctcagtgctgatcacaaccctatgcacttctttcagatggccaaaatagactcggatgtggccaaacacttttgcacaaaactcacaacacatgagtttcttcagacggttctcaccatgatgaagtttcatgtgtgtgctcaggctgccaggacgtacataggacttgcgacaaatccgacaactgtaagggcgtctgttggtgtgtgtattcatgtggtctcgaaggtgctgtttgaactggaagtggtggttgcagacgtgacatctgtgccaaggcttcttaatgccagagaatccatttctgaacacggagctgggcttaggggaagagctgttgtcttgcttacagccaagatatttaggagtgagtgaattatttaacaaaacatcctgtcctaggcccccaagcatctgggactgtagtgtagttggagaagccagggaggccaaagtgggtatgaccatgataggtttgggcataatgctacggtattttttcagggtccccagcttttggtctctgaattcttggggatcattttttactctttctttaccatctctacacttattaatgatatatttcctcctttttccctgaaatgccaaaatttcatctggtaccttccgttttcttccttttctctttgctgctccactgttcagttttgttttgtggttaagatcaagtttggtgggtggacaaaaggcactttcacaggcactctgctgtgacacttgtggaacaggtagcctgcttgccaccttggtggctgcattaaag

SEQ ID NO: 1565 - DNA, 1700 bp, Homo sapiens
  misc_feature (1)..(1700): DMR10:31625801
tgaaacaagttttaaaggaattaagaatcaagcaattatttctgctttttctgtattttaggataaccaaataatcaaaggagaaattctttctagagaagcatttcaactattaaagaaataaggactgagagaagatcactacccttttcattctttatttatttgtatttgtatacatttgtggaatataagtgcaattttgttacatgcatagattacataatggtcaagtcagcttttagggtatccatcgcccaaataacgtacattgtacccattaagtaatttctctccatccactcctcttccaccccttcacctttccaaatctccattgtctatcattccaccctccacttccatgtgtatacattatttagttcccacttatgagtgagaacatgtggtatttgtctttctgtgtttgacctgttttacttaagataatgacgtccagttccaaccatgttgctgaaaaagacataatttcattattttttgtggatgaatagtatatcattcatatactatgaaaatgtagtgtacataaactacattttctttacccaattatccattggttgacacttaggttgattctatgtttttgctattgtgaatagtgctgcagtaaacataggtatgcaggtatcgctacccttaatgaatgaaaggatcaaggcaacagtcatcaagtgctgctggaataattcaaagagagacaaccagacatgacgtacctcctggtggaaggcaacagcattgtgtataaagtattccagccagaaaattaaatctcaatctcagcaagtctttagagctaattaccaatttataggaagtctgagggatagaagaacacgttaaatgacaccactgagttgcaattatcaaaatccagatggtggaaactctacaagtcaaataacacagtgtcttcaataaataatattgccataggaagaaaaagaagagtgaggacctatagattaagagtctaaagagacgtgtaaattgattgtagtataaggactgtatttagatacatctttgaacacagagaaaaagagagtaaaatttcaatagtcactggctattaaggaattattttttttaggtgtggtaatggcattgaggttatgctttcttgagcatccttttttttgtttttttatttttggaaaatgtagactttttttttttcttttgagatggagtttcgctcttgttgcccaggctggagtgcaatggcgcgatctcggctcactgcaacctccgcctcctgggttcaagtgattctcctgcctcagcctcccaagttgctgggattacaggcatgcaccaccacgcccggctaattttttgtatttttactagagacggggtttcaccatgttggtcaggctggtctcaaactccctacctgaggtgatccacccgccttggcctcccaaagcactaggattgtaggcatgagctaccgtgcctggcctggaaaatgtagacttttaataactgcttttatcaccaggttaagtaatgcagttacaaagtagttagaaatttctgaaagggagttatagttaaaaaaaaaagaactgatttgtacacatttattatctagcacttcattgggacactactgctctaaaggccctggccaaataactcccaaacgaaacactcaacccaaagtt

SEQ ID NO: 1566 - DNA, 2100 bp, Homo sapiens
  misc_feature (1)..(2100): DMR10:32208801
aagtgctgggattacaggcatgagccaccgcgcctggccatttcctgactttttaatgatcaccattctaactggtgtgagatggtatgtcattgtggttttgatttgcatttctctgatggccagtgatgatgagcattttttcatgtgtccgttggctgcataaatgtcttcttttgagaagtgtctgttcatatccttcacccactttttgatggggttgtttgtttttttcttgtaaatttgtttaagttctttgtagattctggatattagccctttgtcagatgggtagattgcaaaaattttctcccattctgtaggttgcctgttcactctgatggtagtttcttttgctgtgcagaagctctttagtttaattagatcccatttgtcaattttggcttttgttgccattgcttttgatgttttagccatgaagtccttgcccatgcctatgtcctgaatggtattgcctaggttttcttctagggtttttatggttttaggtctaacatgtaagtctttaatccatcttgaattaatttttgtataaggtgtaaagaagggatccagtttcagctttctacatatggctagccagttttcccagcaccatttattaaatagggaatcctttcctcgtttcttgtttttgtcaggtttgtcaaagatcagatggttgtagatgcgtggtattatttccgagggctctattctgttccattggtctatatctctgttttggtaccagtaccatgctgttttggttactgtaccttttagcatagtttgaagtcaggtagcgtgatgcctccagctttgttcttttggcttaggattgacctggcaatgcgggctcttttttggttccacatgaactttaaagtagttttttccaattctgtgaagaaagtaattggtagcttgatggagatggcattgaatctataaattaccttgggcattatggccgttttcacaatattgattcttcctatccatgagcatggaatgttcttccatttgtttgtgtcctcttttacttcattgagcagtggtttgtagttctccttgaagaggtccttcacatcccttgtaagttggattcctaggtatttacaataggtttttattttattttttaagaaacaagaccttaccctgtcacccaggctggagtagagtggcacaatcatagctcacggcagcctcaaactcctggcctcaagcaatgcttctcaaagtgtggtccccagtcagcagcatcggcatcacctgggaagcaggagcaatgcaaattctccagtcccgcctcagacctactgaagcggacacactgtgggtgctgcccagcaatctaggttttaacaagccctccagggcattctgaagcgctggtaaattgagaactgttgctttagattttcgaacgtggttgaactgtaaccagagacggtccaggttctggttactgctctgggaatgtgctttttccagcccggaagacttcctctgcacaatcctatctccttgggtccagggcaagcccagccttgctctttgagagcagtaagactccagggaaatgccatatgagctggtgggattccaccagcataaaaggtggaaatggagcctatagtgaccactgccccaaactcgccagcgccctcatgtggaggcacaactgcaaagatgcactgagtcactcccacgcgcggctcctgtccaccaagatccagtctggttaaaacactaggccttgcccatagataatagacagcgccacttccttccgtccctttcttccctttcctaccgtgctatgaggggttgatgccctttgatttcccagacagactgattgcaagagctgaaccttacttaaagatgtgacttcggctgggcgtcatggcgctacatgtagttccagctacaggggaggctgaggctggaggatcgctaaagcccaggagttgcagtccagccaatcactgaggattttttttaaatgcaaattctgactctgtaggtctcagggggagccccagagcctgcatttttaataaacgccacaaacgcactcttgctgctaat

SEQ ID NO: 1567 - DNA, 400 bp, Homo sapiens
  misc_feature (1)..(400): DMR10:32731701
tgtcagaggttttattgtgtgacatttatttaagttgtattgtctagtgtaaagtcttataaaactgatagggctgggcacggtgactcaagcctgtaatcccagcactttgggaagccaaggcgggctgatcacaagttcaggagatcgagaccatcctggctaacacgatgaaacctcgtatctactaaaaatacaaaaaattagcggcgcatggtggcacgcgcctgtagtcccggctacttgggaggctgagacaggagaattgcttgaatccgtgaagcgcaggttgcagtgagctgaatcggccactgcactccagcctgggcaacagagttagactccgtctcaaaaaaaacaaaacaaaactgataggaaactttgaatggtcctttctata

SEQ ID NO: 1568 - DNA, 500 bp, Homo sapiens
  misc_feature (1)..(500): DMR10:32769301
tcatgtactctgataatctttttaaatttctgtggtatcagttcttatgtctcctttttcatatctgattatgtttacttggatttttttttggttagtctagatagtgatttatcaatttttaaaaatcttttcagggaactgagttttcatttggttgatccattgtattattattattatttctttttgaaattatactttaagttctgggatacatgtgcagaacgtgcagttttgttacgtaggtatacatgtgccatggtggtttgctgcacccatcaacccgtcatctacattaggtatttctgctaatgctatccatccccaagccccccacccctcaacaggccccagtgtgtgatgttcccctcccagtgtccatgttttctcattgttcaactcccacttatgagtgagaacatgcagtgtttggttttctgctcctgtgttagtttgctgagaatggtggtttccagctttatccatgtccctgcaaa

SEQ ID NO: 1569 - DNA, 2700 bp, Homo sapiens
  misc_feature (1)..(2700): DMR10:33162801
ccaggcttgagtgcagtggcaccatcatagctcactgcagccgtgaactcctcctgagtagctgggaccataggcacacaccatcacacctggctaatctttttacatttttgtgagacaaggtctcactatgttccccaggctggtcttgaactcttggcctcaagagatccttcttctttggcatcctaaatcattgagactacaggtgtgagccactgtgcatgactggaacccagctcttctgacttcaagtctagacttttttttttttttttttttgagacggagtgtcactctgtctcccaggctggagggcaatggcgcagtcttggctcaccgcaacctccgcctcctgggttcaagagattctcttgcctcagcctcctgagtagctgggattacaggcatgtgccaccacgaccagcaaatttttgtatttttagtagagacggggtttcactatgttggccaggctggtctcgaactcctgacctcaggtgacccgcctgccttggcctcccaaagcactgggattacaggcatgacctgctgcacccagccacgtctagaattttttaagaaagaaattattgtgtaactttctgagtgttttagacattttgtcaatttagttttcacaaccagtttttggttcccatggtattgtcttcatttttatcaatgcattaaccaaaactcagcaaaattaagtaacttgaaaaaaattgcatgaagaatgaacaattaaattggttatttacacaaagtgctgctaagtttcaaagcccatgttatagcttcttcttcctgtcactcatctttcccacacaaatctacaaatcacttgagggcctaatctagatctcacatccctttttatatcacgtaacaccttgtgcagacaggtacttaatgaatatatttagggaaatggaagaataatagaaggaaacaaagaaagaaggaaagaaggaagaaagaaaggagagaagggaggatttagataaataccaaggcctccggaggccaaagccattgtcctttccgctctaacaaatgatatcttgaatattattgatcagaacaaatgcaaagaatgggcccacagtaaattatcttgatatatttctggtttccatcctccttttgtatgaggaaatacgaatatgaatatactgattaagaatagtgtgggttggcttgcaagttagcataagttatgaagagttaatgcaaagtttaataaagacgtttatctccactgctcaaatagaagtgaatggacttagaaataaggtttgtacaatgcagatcattcaagagccccgtgactaactagatgtgagaagtggctgaattggctgaagtgtcactatacaaatattaacattttgcattgttttacttcatttagagatcatttaattcagaagggaaatggaatagcttgtctttcatgatctatagcactctagttcatttaaataatagatctttgtgtttggagctttttttcacttacagtttccgttcagcttcctgccaagattgggttagagaggcttaatggtaatgcgtgacatgtgctttgtggagtgtgttccctggagctcagagtaacagcctcaagtgactgtaacacagcctgaaaaattggctgttgtgcattaggaggtgcactttaccttgcaatttcgtaacaagaatactttgcatttgcagatgtcaatttgtggatccgtgtttttaaaatgtttgctgcatcttcctgtaccccggggaccgaggaatggctctggagacaagcagacaaattccacattgatgcatcactgtgctcgggctgtgccaccaccaaggagggcttccgctgacttcaaagggaactcagagcatgatgggaaaattggacctaataagaatatttctttttgaaaactccttttctaaggtgcttcactgaaaagtgctttgcctgttatatattcccttaagccaaaatgcatgtaaatgcaggagcttacaagcaggggttacagactagaatgacttcctggggtaccattgtcaggtgatggtacaaataatgccactatcaagatgaacttgaaagcccaaaatgctgccagggatttgacaatggtgctgagatcatggagtgaggttgactgagtggtgccttctttcgacttgcaagagaacctaaagggtcagccagccagaggctgtcaggtatataccaagagagagtaagtgtgacatttctggaccctcaatagagaaagataggcttgagcctgacttactgatgcaaatatttattttctagagtgagttgctttgagggtagtttctaaaacagagatgttattgaggctcttagcatttgggtgttgtttttttgtttttctttttcctttttttgagatggggttttgttctgttactcaggctggagtgcagtggtgagatcatagcttattgcagcctggaattcctgggctcaagccatcctcctgcctcagcctcccaagtagctgggactatgggtgtgtgccaccacacccagctaattttcatattttttgtagagaatcagttttgccatgttgcccagactagtcttgcaatcctaggctcaagtgactctctcgcctcagcttcccaaaatgctgggattacagatgggagcctctg

SEQ ID NO: 1570 - DNA, 2000 bp, Homo sapiens
  misc_feature (1)..(2000): DMR10:34250301
cgagaaaaagagagaaagttaaattatgtctgcagtcataatgaatcaaagcccagaaggagtctgcaaatcagcaggttctaatgaaatattaaggtaagtgattattgatgaaaaatgaataaggctttttgatttcagcaacctttaaatcatacctagctaattaaaacaactcaaatgcattcatttattccttgacgggcatttagctacccttgggtatacagagacttcattttaggagatatgtatgtagttgacccaggtaagtggaaaaaatgtgccagaaacagacatactcagtaataaaagaaaaaaaagtaagccccttttcagattttgtttatcatttccaagctggaaataaaaaaaaaaaaatcactcaagatgtttcctgtttaccataaagcaaacatcaataatagtacactacatatttattaacatagaacttattttaattatcatataatgatacaaggcatttataatactaatattatgcaattctatggcagattttatttaaatatatcatacagctattgaagacggccttatcattcccctccacacttccaggaggaaagcagttctctcttaagagtgagaattacccaggttgcatcacaagctctgagagaatctgactccaggcctgaggcctgcacgatcttcaatcacatcctctaatatcataaacctctttcaccttagtctcctgttatggaaattaatctttagctattcaagtgaaatactataccaaattactaaagattaagacgcttcctaattacagaaattaatcaaatgtccataaccatgcccattttagcagcagtatgtaaggtaaagaggtacagacatcagttgtatcatgaaatacaaaggtgacaaatctaacttaagtggtgtttacacataaaagatgctaaaaataagatacagaatccaatatcatacccatgcaaaaacaatctctgtggcaaaccttttagctttgaaatgcccttagaactcaagaacaaagacgacggtgatggtagtggtggcatcatacgaacaatagcaactaacatttatgggactgctctgtgtgccaggcagtgttcaaagtgccttacatgtagtcattcatgtcatgctcacaaaaaaaccccagtgaggtaagtgttattatccccgttttgcagatacaagaagtaaggcacagaaggttaaatggcagagctgggatgtgaacttaagctggcttcagagcctgtgctcttaaaaatacctacatcacatcttaccttatcatcttatggtatggtgttgtatcaaatcctcttttgctcttccccctctctctctctctcaaaactatacaagttctaagaaacctacaagaattataagtttaacatacaataagcaaaagggactttaacacttaaaatgtttaactgcattttgctgacagaaactccaggtttcttttctaaaaacaggctctctctgctcctacacagcttacagtcttatcacacatacatcccataaactgtctttgctgtgctgatgaggagtttggtttatccattccttaatttattgaacatatttgaatgtctgtgtggtagaacttggaatacagcagtgaatgaaacagacaacagacaacaccccctgccccgctccaaaatgcaacttcattctagttggaggagacggatgataacatttttaaagtgcatttatgccgcatcataatgccataaggactagcaagaaaaagaaggcagggaagggagtcagggtgtgctggggagggggaggggagagctgcacttttaaattacctgcgtgtggtcacgtcaactaacaccagtcactgcgtggtggtgctgcctgcctgcccccagctgctgtgctttggggacagagccaggcccctcagaggcagctgaggtccctacaggtgtgtgctcctgagagtgtgacattccatg

SEQ ID NO: 1571 - DNA, 200 bp, Homo sapiens
  misc_feature (1)..(200): DMR10:34937901
gtagatttactgagcatgagatgaatgcataattgccattttctctgctccctcctttcatgtgtaaaatgtagattcactgagcactaatcaaagcctcacaagaatgtaaatgattatttgccttattacctatcctccatccatccacgtttttccttcttttttcttttctttttttcttttttttttttgagacg

SEQ ID NO: 1572 - DNA, 2900 bp, Homo sapiens
  misc_feature (1)..(2900): DMR10:35605401
cttggagacagaaaaacccacctcctactcctggctcagacctttgctttcttatctccagctcacacctttaagtcttatgtagttaaaggacatttatccgcctccttggagaacacagccctccagtgtctcctgcagcctggagcctgggacattctggaagcatggaaggcgtggacttgctagggtttctcatcatcacattaaactgcaacgtgaccatggtgggtgagtattgggaccatctccaaactcctgcgctgtttttatttccactgccatggtggaattgagtccttaaagggtccaggtatttactcattttcagtgtgcaagcaccaagctgaaagtccacccactcccaaaagaaagggctgtgcctttctggagggaagagagctgaggcttctagtttctttgaatggttccgcggttcctccgtcatgtaagggagtcttgcgtttgacattgttctctcacagatcatcctgtgctgacactggggtgctgactccaaagaccaaagcaggtggaggggtgtttgtgtgcaaccctggtgtggctacgttaccaggaaaaggaacagaacaacaaatgttaatcagaaggtgatacctttaggttttattctggaagcttggttttttttttttgtttttggagacagagtctcactctgttgcccaggctggagtgcagtgatgcaatctcagctcactgcaacctctgcctcccgggttcaagtgattctcctgcctcagcctcccgagtagctgggactacaggcgcctgccaccacgcccagctaattttctgtgtttttagtagagacggggtttcaccgtgttagccaggatggtctcgatctcctgacctcgtgagccacccgccttggcttcccaaagtgctgggattacaggcgtgagttaccacgcctggcctggaagcttaatttttaaggagtagccatttctcttgtgcactttaaaccaaatcccaagtttagttattttttttaacaaagaaaataatagatttttgtttaatgcagacgactcacattttcagagaggtatgggggtcagaaaaggatgaatatatgccggagatgcagttgatacttttctggctcattattttgtagatttagacaaaaccaacttgatgttaaaagttcaactcaatgactcatcacataatgatattattctttgtttgactgtctttacatatttatttttgttttgtttttatgatgtcaggcgatgtttctctcatcacaaaacacaatattcacaagttattttggctgagttttaaacatgtttcgaaacagttggccggtgccatgaaaatagggcttgacagttattttggttttctagcttggtgtcattccttcacgatacattgaagaaagacaagccccattcattcctaataactggaaaaggggaagaggaattctgaatgattaaaaaatctgaaaaatggaatgttcataaagaaattcaatttcaagggccgtagactaacattaaatacaagccctgtgattaaatagagatccctggactgttgtcataagtaagatttactgaaatcagcagctcgaattggcagttacagaaatacaccaacctcttttaaaaggcttattctcctaagaagaaaatttaaatcttatttaaatcattaatttgctcagccaaactttctttctggacctatcagtccaggagacattaccaaaagtctgaattagcagacagattaaaacacttttaatataatgctttttaaaaatctactcatcttgaagcatcttacaaacaaggatgttcagtgctcagtaaatatttgtcaaatgaactacctgatgctgtgagtaaagacaagctgacaggtgtggtggctcatgcctgtaatcccagctactcaagaggccaaggcggcaggagcacttgaggccaggagttcaagaccagcctgggcaatatagcacgaccctgtgtccaacaacaacaacaacgacaacacaaacaaacagaaaactaaagacatgcttattgacgtttcaatttcccaatctcagccccaatagacactttaaagctgttactcagggcagtgtattcggggtgatgaggccatgcccgcttcctctcttccaggaaagctctggttcgtcctcacgatgctgctgcggatgctggtgattgtcttggcggggcgacccgtctaccaggacgagcaggagaggtttgtctgcaacacgctgcagccgggatgcgccaatgtttgctacgacgtcttctcccccgtgtctcacctgcggttctggctgatccagggcgtgtgcgtcctcctcccctccgccgtcttcagcgtctatgtcctgcaccgaggagccacgctcgccgcgctgggcccccgccgctgccccgacccccgggagccggcctccgggcagagacgctgcccgcggccattcggggagcgcggcggcctccaggtgcccgacttttcggccggctacatcatccacctcctcctccggaccctgctggaggcagccttcggggccttgcactactttctctttggattcctggccccgaagaagttcccttgcacgcgccctccgtgcacgggcgtggtggactgctacgtgtcgcggcccacagagaagtccctgctgatgctgttcctctgggcggtcagcgcgctgtcttttctgctgggcctcgccgacctggtctgcagcctgcggcggcggatgcgcaggaggccgggaccccccacaagcccctccatccggaagcagagcggagcctcaggccacgcggagggacgccggactgacgaggagggtgggcgggaggaagagggggcac

SEQ ID NO: 1573 - DNA, 6300 bp, Homo sapiens
  misc_feature (1)..(6300): DMR10:38492801
gaatggaatagaatggaatggacttgaatggaatggaatgcaatggattcaaatggaatcaaatggaattcaatgcactcaaatagaacagaatgtaacggaatggaatggacttgaatggaacggaaagtaatggaatgaaatggactcaaatggaatggaatggaatggaatggactcgaatgcaatggaatgcaatggaaagggatagactcgaatggaatgctgttgaatggaaaggactcgaaaggaatggaatggaaaggaatggaatggaatggaatccaatggaatggaatggaatggaatcgaatggaatggaatggactcgaatggaatggaaaggaatcgactcgagtggaatggaatggaaaggaatggactcgaatggaatgcaatggaatggtatgtactcgaatgtgatggaatggaatggaatggagtgcactccaatggaatggaatggaacgtacccgattggaatggaatggaatggaatggattcgaatggaaaggcatggaatggaatggcatgaactcaaatataataggatgaaatggaatggattcgaacgcaatggaatgcaaaggaatggactccaatggaatggaatggaatggaatggaatggaatggaatggaatggacctgaaaggattggaatggcatggaatggacccgaatggaatagaatgaaatgtaatggaattgattggaatggaatggaatggattggaatggaatggactggaatggaatggaatggtatggaatcgaatggattggaatggaatggactggaatggaatggaatggtatggaatgcaatggacgtgaatggaaaagaatggaatgaaatggaatgtattcaaatggaatggaatggaatgcaaccgaatggaatggaattgaaggtattgaactcgaatggaatggattggacacgaatggaatggaatggaatagattggacaagaatggaatggaatggaaaggaaaggaatggacttgaatggaatgccgttgaaaggaatggactcgataggaatggaatggagaggaatggaatggaatggaatagaatggaatggaatggaatgaaatggactcgaatggagtggaatggactcaaatggaatggaatgaaatggaccagaatggaatggaatagaaaggaatagactcgaatggcatggaattgaatggaatggactccagtggaatggaatggactgaacacgaatggaattcaatggaatggactccaatggaatggaatgcggtggaatggactcgaatggattggaaaggaatggaaaagaatggaatggaacagaatgtactcgaatggaaaggaatggaatggactcaaatggaatggaatggactcaaatttaatggaatggaatttaatggaatggactctaatggcatggaaggtaatggaatgaaatagactcgaatggaatggaatggaatggaacggaatggactcgaatgcaatggaatgcagtggaatggtttcgacaggagtggaatggaatggaatggaatggagtggactcgagtgaaagggaaagcaatggaatggaactcgaatggaatggaatggaatggacacgaatgtaataaaatggagtggaatggactcgaatagaatggaatggatagtaatggacacgaatgtaatggaaaagaatggaatggacttgaagtgaatggaatggaatggactcaaatggaatggaatggaacggtatggactcgaaaggaatggcatggaatggactccaatggaatggaatggaatggaatataccgaatggaaaggagtcgaatggattggtatgtaatggactccaatggaaagccattgaatggaatggcatggaatggaatggactccaatgtaattggatggaatggaatgcattcgaatggaatggaatacaaagaaataggctccaatggaatggaatagaattgtcccgaatgaaatggaaaggaatggaagggatcagaagagaatggattggtatggaatggaatggaatggaatggaatagaatggaatggactggaatggaatggaatggtatggaatggaatggacttgaatggaatagaatggaatgaaatggaatgtattcgaatggaatggaatagaatggaaccgaacggaattgaatcgaatggagtgaagttgaatggaatgggatggaatggactcgaagggaatggaatgaaatgaaatggactcgaatggaattgaattgaatggaatggaatggactggacacgaacgtaatgaaatgaaatggaatggcctctaatggaattgaatggaatggagtggaaaggaatggactcgaatggaatgcagttgactggaatggactagaaaggaatgaaatggaaaggaatggaatggaagggactcgaatggagtggaatggacttctatggaatgcaatggagtggaatggaatggacccaaatgtaagagaatggaatggaatggtatttactggaatgaaatggaacagaaaggaatggactcgagtggtatgtaatggaatggaatggacacggagagaaaggaatggaatggactcaaatagaatggagtggaatgggatggacttgaacggaattgaattaaattgaatggactccaatggaatgaaatggaaatacgcgacttgaatgtattggaatggaatggaatggaaaggaattgcatggaatgacatggaatggaatggactcaaatgtaatgggatggaatggaatggtctcaaatggaatggaatggaaaggaatggcatccaatagaattgaattgaatggaccaaatggaatagaatggaatggatgaaatgtaatgtaatggaatgaaatggacaagaatggaatagaatggtatggaatggaatggacttgaacggtatagaatggaattaaagggaatgtactcgaatagaatggaatggaatggacacaaatggaatggaatggtattgattgaagtcgaatggaatggaatggattggaatggattcgaatggattgtaatggaatggaatggaatcgaatggaattgaatggagtggaatggaaaggtacggacacgaatggaatggaatggacccgaatggaatggaatggaatggaatggaatggaccgcaatggaatggaatggaccggaatggaatggaatggaatggaatggactggaatgtaattgaatggactggaatgcaacggaatggaatggaatggaaatgacttgaatggagtagaatggaatggaatggattggaatcgagtggaactgagtggaacagactcgaatggaatggaatggacacaaacggaatggagtggaatggaatggagtagaatgcaaaagaatggaatttaccagattggacagtaatggaatggactctaatggaaaggagtggaatagacttgaatcgaatagaatgaaatggaatggactcgaattgaagggaatggaatggacccgaatggaatggaatggaaaggattgaagtcgaatggaatggaatggaatggaatggactcgaatggattggaatggaatggaatggaatggactcgaatggaaatgaatggaatggaatgtaaaggaatggacttgaatggaatggaatggacatgaaacgaatggaatggaatggaaaggaatgaaaacgaatggaatggaatggaatggaatggacttgagtggaatagaatggaatggaatggattgtaatcgaatggaattcaatggaacagactcgaatggaatagaatggacacaaatggaaaggagaggaacggaatggagttgaatgcagtagaatggatttacggattggactctaatgtaatggattctaatggaaaggaatgaaatggaatccaatggaataggatggaatggaatggactcgaatggaatggaattgaatggaatggacacgaatggaatggaatggaatggaatgcagtggaatggaatggaatggaatggaatggaaaggaatggaatggaatgaatttaatggaatgatatagaatggaatggaatggaatggactcgaatgaaatggaatggactggaaacggatggaatggaatggattcgaatggaatggaatggaatggacatgagtggaattgagtggaatggaatggaagggaatggattcgaatgcaatggaatggactggaattcacttgaatggaatagaatggaatggagtcgaatgtaatggaatggacacgcatagactggaatggaatggaatggactcgaatggaataaagtggaatggactcgaatggaatggaatgcaatggaatgaactcgagtggaatggaatggaatggattcgaatggaatggtatggactcataatgaaatggaatggaatggataggacttgaaagaaatgtaatacaatggaatggactcgaatggaatggacctaaatgtaatgaaatggaatggaatgaaatggactcgaatggaatggaatggaaatgaatggactcgaaaggattgtaatggaatggaatggactcaaagggaatggaatggaatggactcgaatggaatagaatggaatgttatggtctcaaatggaatggaaatgaatgtaatagattccaaaggaatggaaaggaatgtacccaaatggaatggaatggaatggaatggacaggaatgggatgccatggaatagaatggactcgaatgtagtgggttggaatggaatggacttgaatggaatggaatggaaaggaatccagtggaatggcatggaatggacttgaatggaatggaaaggaatggaatggacccaaatggaatggactcgaatggaatggaatggaaaggaatggaatgaaatggaatgcaatggactcaaatggaatagaatggaatggaatggaaccgaatggaatggaatggagtggaatgcaatgaaaggaaaggaatggaaacaacttcattgcaatagaatggaatggaatggattggaatcaaatggaattgaatggaatcgaataaactaaaatggaatggagtggaatggaactgagtcgaaagcaatagaatggaatattccggattggactctaatggaatgaactctaacggaaaggaatgaaaaggactccaatggaatagaatggaaaggaatggactcgaatggaaggtaatggaatgaacccgaattgaatggattgtactcgaacggaatggaaaagaaaggacatgaatggaatggaatggaatggaatgaaatggaccggaatggattggaatggaatggaatgtatggaatggaattgaatgcgcttgaatggaatagaattgattgtactcaaatgaaatggaatgtaatggatacgagtggaatggaatggactcgaatggcatgcaatggaatagaatgtactcgaatggaatggaatggaattttatcaaatggactctaatggaatggaatgcaatggactgcagtggaaaagaatggaatggaatggactcgaatagaatggaacggaatggactcgaattttatggactcgaatggagtggaattgaatggaatgtattcgaatgaaatggaatggaatggaatggacccccatggaatgcagttgaattgaattgactcgaaaggaatggaatcaaatggaatggaatggaatggattcgaatggagtggaatggactcgaatggtatggaatggacttaaatggaatggagtggaaaggaatctactcgagtggaaaggagtggaatggaatcgactcaaatgaaatgcaatgcaattgattggactcaaaaggaatggaaaggaatagaatggactcgaatggaatagaatggaatggaaaggaagggacgcgaatggaatggaatggaatggttttgaatacaatgcaatgtaatggactcgaatctaatggaatggaatggaatttaatggagaagaatggacgggaatggactcgaacggaatggactcgaaagatacgtaaagtaatggaatgaaatggactcgaattgaatggaaactaatggaatgaaatgtactcaaatggaatggaatggaatgaaatggaagggaatgcaatggaatggaagggaatggaatggaatggaagggaatggaaaggaacggaatggaatagaatggaacagagtgaaatggacttgaacagcttggagtggaaagaaatggaagggaatggaatggaagagaatgga

SEQ ID NO: 1574 - DNA, 13100 bp, Homo sapiens
  misc_feature (1)..(13100): DMR10:38799501
ttccattccattcgtttccattccattcgactccattcctttcgtgtccattccattccaacccgtgcgatttgattcctagccatacgattgcattttgttccagtccattccattcgagtccattccattctattccattccattcctttctattaaattccagtctagtccataacattcgagtccattcctttccataccattccattccattccattccattccatttgatgccattgcattcaattctattccattcgactccattctcttccattccattccatccgattccattccattcctttcctttccattcgtttccatttcattttagttgattacactgtagtccattccattcgagtctattcctttccagtacattctagtccattctattccattctatcccattggatatcattacattaccctgcctttcattctattcctttcgattccattcatttccattccattcagtttcattccattcaactccattccataccattccactccattccattccattcctttcagtttggttccaatccgttcaattctgctttgttctagtccattccattcgagtacaatgcattgcagtccattccattcgattccattcaaatcaattccattccacttgattgcactctgttcccttccattgcattccattctattccattccactgcaatccattcgattccatttgattacaatccattcgattccattccatttgaatcaaatactttgcaatccatttcatttgagtcttttctattccaatccattccattccagtccattccattcaattccattacatactattgcttttcatttgattccattctattcgaataagttccatttgagaccatttctttcgagtccattctgagtccattccattcgagtccatttcatttgggtccattccattccatgccattccatttgattcatttccattagagtacattccattcgaatccattcattccattccattccattccatgcaattccattcaattatattacattcgactccattccaatccattctgttcaatccgattctattccagtctattcctttccatttcattccattctgttcctttcgattccatttcattcgagtccattccattccattccaagccattccattcaattctattccactcgcctccattccattcgactcaattccattccattccattcgactccattccattccattccattccattccattccattccattccattctattcgatgacattccattgtatgctattccctacaactccattcaattccatttcgttccatcagattcctttccattatattgctttcctttccattccattccattctattcaattccattccattccattcgtttccattacatttgagtccattccattcgattccattccattcaagtccaatccttttgagtccattccattccattccatttgatatctttccattacactccattccattctattcctttcgattccattcaattccattccgttcgattccattcgattcaattccattccattcgactctattccttttgagtcaattccattccattctattccattcctttcgattccattccatttgattacattttgttccagtccattcctttcgagtccattccatttcagtccattccattcgattccattccattcgactccgttccatttgattccattccactagattccactccattctgttccattgcattccattctattccattccttcgcattgcattccattccatttgattacattcctttcgctttcaaggcattcgaatcagttacatttctttccattatattggagtcctttctattgcagtccattgcattccagtccattcaattctgttccattccactcgattccattccatactgttgcattccattcgattccattctatgcaaataaattccatttcacaccattcctttagagtccattctttcggattccattacattcgagtccactacatttggttccattccattccattcgatgccattccattctattctattacattcgataacattccattccagtccattcctttccattccattccattccattgcattccattcgatgccattcctttcgattctattccattcgtctccattccattcaattcctttccatccgattccattccattctattctattccattccattcttttactttccattcgattacatttcgtttgagtccagtccactgcagtccattccattccaattccattccattgcagtccattcgagtccattctatttcattccattccattggagatctttacattacactccgttgcattctatttctttcgaatccattcaattccattccattcggttcctttcctttcgactccattccattccattccatttcattccattcgattcaaagacgttcgattccattttgttccagtccattccattggaatccattccattccattatgttccattcgattccaattcattcgattccattttgttgcagtccattccattcgagtgcattccattccagttcactaaattcgattccagtccatttgagtccattctattccattccattacattggatatgtttactttacactccctttcattctattccttttgattgcattcaattacattaattcccttccattccatttgagtccattccattcgagtccattttattccattccattccatgccgtttgattccaataggttcgcttccattttgttccagtccattccattcgagcccattgcattcgattccattccattcgattccattgcattcgattctattccactcgattccactctgttctattcctttacattccattctattccattccattgcattccattccattccatttgaatattttccattcgataccattccattcaaatcaattccattccattccatcacattcatgtctgttctattccggtccattccattcaggtctattccattcaatgcaattccattccattccgttccatactattgaattccattcgattccattctatttgaataaattccattcgagacaattactttcgagtccattctatttgtccattcaatttgagtccattacatttgggtacattcctttccactccatttcattacattccgtgccattcgatgccattccattccattctattccattcgactccattccattcgagtcaattcctgtcctttccattccattcgatgtcattccattagattctatttaattcgtctccattatattccattccaatctttccgattccattccattccattagttgcaattccattccattccatttcattccattcgatgccattccattcaattgtattccattcgactccattccattccattcatttccatccgattcctttccattccattccatatcattccattccatgccatgccattgctttcgattttattccagtcgactccattccattctgttcagttccatctgattccattccattctgttcctttccaatccattccattccgtttcattccattgcattccattcttttccatttcattcgagtccattacaccccagtgcattccaatcgaatccattccattccagtccattcatttggagatcattccattccattcaatatctttccattacgctcctttccattctattcctttcgattcaattcaattcaattccattcaattcaattccattagattccattacattcgattctattccattctattctattccactctattacactccattccattctattgcattccattctattccattcaattgcatttcattcatttcgatttgattacattccattcgattgcattcaattcgaatcaattacattgcaatcctttacattcgagtatgttctataccagtgcattgcagtctggtccattccattcgattccattccattcgattccattgcatactattgcattccattccatactattgcattccattccattccattctattcgagtaaattccattcaagaccattcttttggagtccattttatttgattccattccattcgagtccattacatttgacttcattccattccattccattccattccgtttgattccatctgttcgattccatttttttccattccaatccatttgattctattcaattccagtccattccattcgattccattccattgacttccattctattccgctccatttcattccattccttaccattccgttgcattccattccattccgttccattccatttgattacattccattcaattccaaggcactcaaatcaattacttttcattcgattacattttactccgttctattccagtccattccattccagtccactccattcgattctattccattcaattcctttagaaactatggcattcctttcgattaaattgtattcgaatatattccattcgagaccattcctttcgagtccattctatgtgagtccattccattcaagttcattacatttgggaccattccattccattcctttccattcctttccattccattcgatgcctttccatttgattccatttcattaagaccattccattcgaatccattcaattcctttccattcaattccattcttggccattccattcgatctgttctattcgaatccattccattccattacagtccatctgattccattacattccattcaattcctttccattccaatccgttctattcgtttcaattcccttcgattccattccactccagtccattccattcgaagctattccatttgagtccattccattccgttccattccatttgatatctttccattacagtctgttcctttctattcctttcacttccaatccattcaattccattccatttggttccattccagtcgactccattccatgcgagtccattcctttccattccattccatttcattcctttcctttcgactccaatccgttcgattccattttgttccagtccattccattcgagaccattccaaaccagaccaatccattcaattccattccgttcaattcctttcaaatcgattccatttcactcaattccactgcgttccattccattgcattccattatattccattccattgcgtgccattcaattccatttcattacattccattcgattccgctcctttcaaatcaattgcattgcaatccattacattcaagtccgttctattccagtccattccactccagtccattccatttgatttcattccattcgattacttttcatactatggcattccattcgattccattctatttgaataaacgccattggggaccattcctttcgaatccattctatttgagtacattccatttgagtccattacgtttgggtccattccattccattccattccattccattccaatatattccattccatttgttgctagtccgttcgattctattccattcgacaccattccattcctttccattccatctgattccattccattctattcctttaaattccattccattccattccactcgacaccattccattcgagtccattccattccattccattccactccattctgttccgttcgactccaatccattcaattccattttgttccagttcattccattcgattccattccattccagtccattccattcaattccattccatttgactccatttcactcgattccactccatttctttccacttcattccattctattccattcctttgcactccattccattccatttgattatatttcatttgattctattacattcaaatcaattacattgcaatccattacatccgagtccttgttattccagtccattcgattcagatccattccattctattctattccattcgatttcatttcatactatggcattccattcgattccattcgaataaattccattcgagaccattcccttcaagtccattatatttgagtacactccattctagtccattacatttgtgtccattccattcaattccattccattcctttcgatgccattcaattcaattctattccactcaagtccgttccattttactccattccattccattcaattgcatccgattctattccattctattcctttccattccattcctttccattccatttgagtccattccactccagtcgattccatttgagtcctttcccttccagtccattccattagagtccattccatttaattccattccattcgatatctttccattacaatccattcccttttattcctttcaattcaattcaattcaattcaattcaattcaattctattcgattccagtccattccattccgttgcattcaattacaatccgttcgattccattttgttccagtccattccctttgagtacattccattccagttcattccattcgatatcattcctttcgattcccatccattcgattccattccgttggagtcaatgccattccattgcattcaattctattcaatgcatttccattcgattctattccattcgacaccattccttttctttcccatgccatctgattcaattccattctattcctttccattccattccattcgtttccatgccattcgagtccattcctatccagccaattccattcgagtccattccattctattccattcctttcagtatcttccattacactccattccattctattccttttgattccattcaattccattcaatttgatgccaatccattcgattacattacattcgactccattccattcgtgaccattccatgtcattccattccatgctgttccatttgattccaatctgattgattccattatgttccagtccactccattctagtccattgcattccagtccattccaattgattccattgcattcgattcctttccactcgattccactacattccattccattgcattccattcaattccattccattgctttccgttccattgcatttgattatattccattcaattccattgctttcgaatcaatgacattgcagtccattccattcgagttcgttctattccagtccattccattctgggccattccattcgattccatttcttttaattccattccctactattgcgtttaattcgattccattctatttgaataaattcctttcgataccattcctttcgagtccattctattttagtccattccatttgtttcttttacatttgggtccattccattccattccaatccattccattccattctatttcttgccattccattcgatgctgttccattcaagtccattccatttcattccattccattcaatttcattgctttctatttgatgccattccattggattctattccattcccctccattccaatccattctgttccatccgtttcctttccattatattgctttccattccattcctttccattccattcgagtccatttcactctagtccattccattcgtgtccattccattcaagtccaatcctttcgagtccattccattccattcgttatcattccattacactccatttcactctattccttttgattccattcaattccattccattctattccattccattcctatccattccattctacttcatcccttttgagtccattcctttctactccattccatttgagtccattccattccattccactcctttcaattccgagctgtttgattccattgtgttccagtccattccatttgagtccattccattctagtccattccaatcgattccattcaatttgattccattgcattcgattccactccactcgattccactatgttccattccattgcattccattctattccattccattgcattccattccattctattgcatttgattatattccattcgattccattgctttcgagtcaatgacattgcagtcgattccattcgagttcgttctattccagtccattccattctgggcctttccattcaattccattcctttcgattccattccctactattgcatttaattagatttcattctagtcgaatacattccttttgacaccattcctttcgagtccattctattttagtccattccatttgattccattccatttggttccattccattccattccattccattccattctattccttaccattccatttgattctgttccattcgagtccattccatccagtccatttcattccattccattcaatttcattgctttctatttgatgccattccattggtttctattccattccactgcattccattccattctgttccatccgtttccattccattatattccttttcattccattcctttccattccattcgagtccatttcactccagtccattccattcgtgtccattccattcaagtccaatccttttgagtccattccattcgttatctttccattacactccaactcactctattccttttgattccactcaattccattccattcgattcgattccattcctatccattccattctacttcatcctttttgagtccattcctttctactccattccttttgagtccattccattccattcaattccgctccttttgattctgatcgttcgattccattgtgttccagtacattccattcgagtctattccattccagtccattccaatcgattccatccaatttgattccattgcattcgattccattccactcgattccactacgttccattccattgcattccattcaattccattccattgcattccattccattgcatttgattatattccattcgattccattgctttcgagtcaatgacattgcagtccattccattcgagaccgttctattcctgtccattccattctgggcctttccattcgattccattcgtttcgattccattccctactattgcatttaattagatttcattctagtcgaatacattccttttgataccattcctttcgagtccattctattttagtccattccatttgattccattacatttggttccattccattccattccattccattccattccattccattctattccttaccattccatttgattctgttccattcgagtccattccatccattccatttcattccattccattcaatttcattgctttctatttgatgccattccattggattctattccattccactccattccattccattctgttccatccgtttccattccattatattcctttccattccattcgagtccatttcactccagttcattccattcgtgtccattccattcaagtccaatccttttgagtccattccattccattccattcgttatctttccattacactccaattcactctattccttttgattccactcaattccattccattcgattcgattccattcctatccattccattctacttcatcctttttgagtccattcctttctactccattccttttgagtccattccattccattcaattccgctccttttgattctgatccgttcgattccattgtgttccagtacattccattcgagtctattccattccagtccattccaatcgattccattcaatttgattccattgcattcgattccattccactcaattccactacgttccattccattgcattccattcaattccattccattgcattccattccattgcatttgattatattgcatttgattccattgcttttgaatcaatgacattgcagtccattccattcgagaccattctattcctgcccattccattctgggccattccattcgattccattccctactattgcatttaattcgattcctttctattcgaataaattcctttcgatacccttcctttcgagtccattctattttaggtcattccatttgattccattacatttggttccattccattccattccactccattgcattccattctattccttgccattccattcgattctgttccattcgagtccattccattccagtccatttcattccattccattccattgcattccattccattccattgctttctattcgatgcaattccattggattctattccattccactccattctattccattctgttccatccgtttccattccattatattcctgtccattccattcctttcctttccattcgagtccctttcacaccagtccattccattcatgtccattccattccagtccaatccttttgagtccattccattccattccatccattatctttccattaaactccatttcattctattctttttgattccattcaattccattccattcgattccattccattcggatccattccattctacttcatccctttcaagtccattcctttctactccattccatttaagtccattcccttccattgcattcaattccgctcctttcgattccgatccgttcaattccattgtgttccagtccattccatttgagtcctttccattccagtccattccattcgattcctttccatctggttccattccatttgataccattccactcgattccactcagttccattccattgcattccattctattccattccactgcattccattccattacatttgattccaatccattcaattcaattccgttttaaattattactttgcaatccattacatacgagtctgctctattccaatccattccattctgttccattccgttcgattccattccattctattccattcaatactcctgcactccattcgattcaattctattcgaatgaattccattcaaacccgttccatttattaaattccatttgagtccattacatttgggtccattcgatgaaatgccattccattccattcaattcaatgccattccattcgactgtattccatgagaatccattccattcgagtccattccattccattacatttcattctattccatttgatgccattccattcgattgtattccattcgacaccataccattcgattctattccattggactccattactttccattccattccatccgattccactccattatattcctttccactccatttcattcctttccattccatttgagtccattctactccagtccattccatttgagtccattccactccagtcaattccattcgagtccattcctttccattcccatccattcgagtccattccattcccttccattccattcgatatctttccattacactccaatccattcaattccattccgttcgtttccattccacctgattccacttcgttccattccgttgcattccattctgttacattccattgcattccattcaattccattttattacatttcattcgattccattccattcgaatcaattccatggcaatctattacattcgcgtccattcttttccagtccattgcattccattcctttctattccatttgattacattccattcgattccattccattagaatcatccatcacaatccattacactcgagttctttctattccagtccattccatttctgtccattccattccattccattccatacttttgctttccattcgattttattctattcaaataaattcctttctagaccattccttttgagtccattctatttgagtcaattccattccagtccattacatttgggtccattccattcccttatatttcattccactccattcgattggatgccattccattctactcaattccatttgtgtccattccattcaagtccattcgaatccattcccttccattcgatgccattccattcgattctattccattgcattccattccgttccatctgattccattccagtctattccattccattccattccattccattccatttcactcgtttccattccattcgagtccattgcactccagtccaatccgtgctactccaatccattccagtccattccattgcattccattccattcctttccattccattgaatatctttccaatatattccattccattctaatcttttcgatcccattcaattccattacattcggttccatttctttcgactccattccatccgagtccattgcattcccttccattccattccagttttgttccattccaatccgattgattccattttatgccagtccactccattcgagtacattccattcgagtacattccattcgattccattccattcgattcctttccactcgattccagtacgttccattccattgcattccattctattccattccattgcattccattccattccatttgattacattccattcgattccattccacttgattccattccatactattgcattccttttgatttcattctatacaaataaattaaattcgagaccattccatttgagtccattgtgtttgagtccataccatttgaatccattacatttgggtccattccattcaatgccattccattctattctattccattcgagtccattccattcgagtccaatccattccattcaattccattgaattccattccattccattttttgccattccattcgattcaattccattctaaaacattccattcctttccgttccatcctatttcattccattctattccattccattccattcgtttccattcctttcgagtccattcctctccagtcgattccattcgagtcca

SEQ ID NO: 1575 - DNA, 300 bp, Homo sapiens
  misc_feature (1)..(300): DMR10:41431301
gcgaattcacgccaatcttagacatggaaacatcttcgtattaaaagtacacagagtcattcgtagaaactagtttgtgatgtgtgccttcaactcacagagtttaacctttcttttcatagagcagtttggaaacactctatttgtaaagtctgcaagtggatatttggacctctttgaggccttcgttggaaacgggatttcttcatacaacgctagacagaagaattctcagtaacttctttgtgttgtgtgtattccactcacagagttgaacctttcttgagagagagcagagtt

SEQ ID NO: 1576 - DNA, 32753 bp, Homo sapiens
  misc_feature (1)..(32753): DMR10:41845001
attgcattcgatgttgattcctttagtttccattggatcatgattccattcgagtccattcgatgatcatcacattggatttcattccataattctaaccgattccatttgatgatgattccatctgattccatttgatgattccattcgattccattcaatgacgattccattcgtttccatccaatgatgattccattcgattcctttcaatgattattcccttcgagtccattcgatgattccattcgattccattcgaagatgattgcattcgagtccatggattattccattccattccattagatgattccattcgagtccattcgatgattatcttcgattccattcaataattcagtttgattccgtttgatgttgattccattttagtccattcgatgataattccattcgattctatgcgatgattccattccattccatttgaagatgattaaattcgagaccattcagtgattgcattcaattcattcgatgacgattccattcaattccgttcaaagattccattaggtttcatttgatgatgattccatacgattccattagatgatgactcctttcatttccactcgatgatgattccattcgtttccattcgacgatgattccatttgattccgttcaatgattattccattcgagtccattcgatgattccattcgattctattcgatgatgattgcattcgggtccatggattattccattccattccattagatgattccattcgtggccatttgatgattctcttcgattccattcgataattccgtttgactccgtttgatgttgattccattcgagtccattcaatgataattccattcgattctatgcgatgatttcattcctttccatttgatgatgattccattcgagaccattcgatgattgcattcaattcattcgatgacgattccattcaattccattcaatgattccattagattccatttgatgatgattccattcgattccattcaatgatgattccattcgagttcattgactattccattccattccattctatgattccattcgagtccattagatgattctattcgattgcatttgataattccattcgattgcattcgatatttccattcgattccatttgaggataattccatttgagtccattcaatgattcttccattcgattctattcggtgattccattcgattccatttgatgatgattccattagagaccattccatgattccattcaattccattcaataaagattgcattcgagtccattcaatgtttccattcaagtccattcaatgattccatctgattccattcaatgaatccattcgattccattctatgatgattccattcatttccatctgatgatgattccattcgattccattcaatgattccattcgattccatttgatgatgatttcaatcaatttcattcgatgattccattcgaatcctttcgatgatgagtccatccatttcaaattcatgataattccattcctttcaattcgatggtgtttccattcgattccattcgatgttgattccattagtttccattggatgatgattccgttcgagtccattcgatgatgatgacattggatttcattccataattctactcgattccatttgatgatgattccgtctgcttccatttgatgattccattcgatgccattcgatgatgattccattcgattccgttcaatgattattccactcgtgtccattcgatgattccattcgattccattcgatgatgattgcattcgagtccatggaatactccattccattccattagatgattccattcgagtccattcgatgatgctcttcgattccattcgataattccgtttgattccgtttgatgttgattcaattccagtccattcgatgataattccattcgattctatgcgatgattccattctaatccatttgaagatgattccattcgagaccattcgatgattgcattcaatacattctatgacgattccattcaattccgttcaatgattccattcgattccatttgatgatgattccattcgattccatttgatgaagataccatgcgattccattagatgatgactcctttcatttccattcaatgaggattccattcggttccatttgatgatgattcctttgaattccattggatgacaattccattcaataccaattgattatggttatttttgattccgtttgatgatgattatattcgattccatttgatcatggttccattcgattccactcaatgattccattcgattccattcaatgattattccattcgagttcattgactattccattccattccattcgacgattccaatcgagtcctttcgatgattctatttgattgcattcgataattccattcgattgcattcgataattccattcgattccatttgaggataattccatttgagtccattcgatgattgttccattcgattctattcggtgattccattcgattccatttgataaggattcctttcgagaccattcgatgattccattcaattccattcaataatgatttcattcgagtccattcagtgattgcattcaagtcctcttgatgattccatctgattccattcaatgaatccattcgattccattctatgatgattccattcgtttccatctgatgatgattccattcgattccattcaatgattccattcgattcaatttgatgatgatttcaatcaatttcattcgatgattacatttcgaatccattcgatgatgagtccatccatttcaatttcatgataattccattcgtttcaattcgatggtgtttccattcgattccattcgatgttgattccattagtttccattggatgatgattccattcgagtccattcgatgatgatcacattggatttcattccataattctactcaattccatttgatgatgattccatctgattccatttgatgattccattcaattccattcgatgatgattgcattcgtttccatccaatgatgattccattcgattccgttgaatgattgttccattcgagtccattcgatgattccattcgattccattcgatgatgagagcattcgagtccatggattattccattccatcccattagattatttcattcgagtccattcgatgattctcttcgattgcatttgataatcccgtttgattccgtttgatgttgattccatttgagtccatttgatgataattccattcgattctatgcgatgattccattccattccatttgaagatgattccattcgagaccattcaatgattgcattaaattcattcgatgacgattccattcaattccgttcaatgattccattagaatccattcgatgatgattccattcgattccatttcatgatgattccatgcgattccattagatgatgactcctttcacttccattcgatgatgattccattcgtttccattcgacgatgattccatttgattccgttcaatgattattccattcgagtccattcgatgattccattcgattctattcgatgatgattgcattcgggaccatggattattccattccattccattagatgattccattcgtggccattcgatgattctcttcgattccattcgataattccgtttgattccgtttgatgttgattccattcgactccattcaatgataattccattcgattctttgcgatgattccattcctttccatttgatgatgattccattcgagaccaatcgatgattacattcaattcattcgatgacgattccattcaattcctttcaatgattccattagattccatttgatgatgattccattcaaatccatttgatgatgattccatgcgattccattatttgatgactcctttcatttccattcaatgaggtttccattcggttccatttgatgatgattcctttgaattccatttgatgacaattccattcaataccaattgatgattgttatttttgattccatttgatgattacattcgattccatttaatcgtgattccattcgattccactcgatgattccattcgattccattcaatgatgattccattcgagttcattgactattccattccgttccattcgatgataccattcgagtccattcgatgattctactcgattgcattcgataattccattcgattgcatttgataattccatttgattccagttgaggataattccttttgagtccattcgatgattgttccattcgattctattcggtgattccattcgattccattggataatgattccattcaataccattcgatgattccattctattccattcaataatgattccattcgagtccattcaatgattccattcaagtccattcgatgattccatctgattccattcaatgaatccattcgattccattatatgatgattccattcatttccatctgatgaggattcctttcgattccattcaatgattccattcgattcaatttgatgatgatttcaatcaatttcattcgatgattccattcgaatccattcggtgatgaatccatccatttcaatttcatgataattccattcatttcaattcgatggtgtttccattcgattccattcgatgttgattccattagtttccattggatgatggttccattcgagtccattcaatgatgatcacattggatttcattccataattctattcgattccatttgatgatgattccatctgattccatttgatgattccattcgattccattcgatgatgattccattcgtttccatctgatgatgattccattcgattccgttcaatatttattccattcgagtccatttgacgattccatttaattccatttgatgatgattgcatacgagtccatcaattattccattctatttcattagatgattccattcgagtccattcgatgattctcttcgattccattcgataactccgtttgattccgtttgatgttgattccatctgagtcctttcgatgataattccattcgaatctatacgatgattcctttccattccatttggagattattccattcgagaccattcgatgattgcattcaatccattcgatgacgattcctttcaattcccttcaatgattccattagattccattcgatgatgattccattcgattccatttgatgatgattccatgcgattccaatagatgatgactcctttcatttccattcgatgatgtttccattcgtttccgttcggcgatgattccattcgatcccgttcaatgattattccattcgagttcatttgatgattccattgggttctattcgatgatgattgcattcgtgtccatggataattccattccattccattagatgattccattcgtggccattcgatgatgctcttcgattccattcgataattccgtttgattccgtttgatgtttattcgatttgaatccattcaatgataattccattcgattctatgcgatgattccattcctttccatttgaagatgattccattccagaccattcgatgattgcattcaattcattcgatgacgattccattcaattccgttcaatgattccattcgattccatttgatgatgattccatgcgattccattagatgatgactcctttcatttccattcaatgaggattccattcggttccatttgatgatgattcctttgaattccatttgatgacaattccattcaataccaattgacgatgtttatttttgattccatttgatgatgattacattcgattccatttgatgatgattccatttgattccactcgatgattccattctattccattcaatgatgattccattcgagttcattgactattccattccattccattcgatgattccattcgagtccattcgatgattctatttgattgcattcgataattccattcggtccattcgataattccatttgattccatttgagaataattccatttgagtccatttgatgattgttccattcgattctattcggtgattccattcgattccaattgataatgattccattcgagaccattcgatgattactttctattccattcaataatgattccattcgagtccattcaatgattccattcaagtccattcgatgattccttctgattccattcaatgaatccattcgaatccattgtttgatgattccattcatttccatctgaagatgattccattcgattccattcaatgattccattcgattccattcgatgatgattccattcgtttccatctgatgaagattccattcgattccgttcaatgtttactccatttgattccattcgctgattccattcgattccatttgatgatgattgcattcgagtccatggattattccattctattttattagatgattccattcgtggccatttgatgattctcttcgattccattcgataattccgtttgattccgtttgatgttcattccattcgtttcctttcaatgattccattcaagtccattcgatgattccatctgattccattcaatgaatccattcgattccattctatgatgattccattcttttccatctgatgatgattccattcgattccattcaatgattccattcgattccatttgatgatgatttcaatcaatttcattcgatgattccattcgaatccattcgatgatgagtccatccatttcaatttcatgataattccattcgtttcaattcgatggtgtttccattcgattccattcgatgttgattccattagtttccagtggatgatgattccgttcgattccatttgatgatgatcacattggatttcattccataattgtatttgattccatttgatgatgattccatctgattccatttcatgattccattcgattccattcgataatgattccattcgtttccatccgatgatgattccattcgattccgttcaatatttattccattcgagtccattcgacgattccattcgattccatttgaggatgattgcattctagtccatggattattccattctatttcattagatgattccattcgagtccattcgatgattctcttcgattccattcgataattccgtttgattccgtttgatgttgattccatttgagtccattcgatgttaattccattcgattctatgcgatgattccattccattcattttgaagatgattccattcgagaccattcgatgattgcattcaattcattcgatgatgattccattcaattccgttcaatgattccattagattccattcgatgatgattccattcgattccatttgatgatgattccatgcgattccattggatgatgacccctttcatttccattctatgatgattccatttgtttcctccattcgacgatgattccattcgattccgttcaatgattattccattcgagtccatacgatgattccattcgattctattcgatgatgattacattcgtgtccatggattatttcattccattccattagaggattccattcgaggccattcgatgattctcttcgattccattcgataattccgtttgattccgtttgatgttgattccattcgagtccattcaatgacaattccattcgattctatgcgatgattccattcctttccatttgaagatgatgccattcgagaccattcgatgattgcattcaattcattcgatgacgattccattcaattctgttcaatgattccattagattccattcgatgattattccattcgattccatttgatgatgattccatgcgattccattagatgatgattcctttcatttccattcaatgaggattccattcggttccatttgatgatgattcctttgaattccatttgatgacaattccattcaataccaactgatgatggttatttttgattccatttgatgatgattacacttgattccatttgatcatgattctattcgattccactcgatgattccattcgattccattcaatgatgattccattcgagttcattgactattccattccattccattcgatgattccattcgagtccattcgatgattctatttgatggcattctataattccattcgattgcatttgataaatccattcaattccatttgaggataatgccatttgagtccattccatgattgttccattcgattccattcgataattattccattcgattccatttgataatgattctattcgagaccattcgatgattccattgaattccattcaataatgattccattcgagtccattcaatgtttccattcaagtccattcgatgattctatgtgattccattcaatgaatccattcgattccattcaatgatgattgcattcatttccatatgatgatgattccattcgattccattcaatgattccattcgattccattagatgatgatttcaatcaatttcattcgatgattccattcgaatccattcgatgatgagtccttccttttcaatttcatgataattccattcgtttcaattcgatggtgtttccattcgattccattcgatgttgattccattagtttccattggatgatgattccattcaagtccgttcgatgatgatcacattgggtttcattccataattctattcgattccatttgatgatgattccatctgattccatttgatgattccattccattcaattcgatgatgattccattcgtttccatccggtgaagactgcattggattccgttcaatgtttattcctttcgagtccattcgacgattccattcgattccattcgatgatgattccatgcgattccatttgatgatgattccatgcgattccattagatgatgactcctttcatttgcattcgatgatgattccatttgtttccgttcgacgatgattccattcgattccgttcaatgattattccattcgagtccattcgatgattccattcgattctattcgatgatgattgcattcgagtccatggattattccattccattccattagatgattccattcgtggccattcgatgattctttccgattccattcgataattccgtttgattaagtttgatgttgattccattcggtccattcaatcataattccattcgattctatgcgatgattccattcctttccatttgtagatgattccattcgggaccattcgatgattgcattcaattcattagatgacggttccattcaattccgttcaatgataccattagatttgatttgatgatgattccatttaatgatgattccattcgattccatttgatgatgattccatgcgattccattagatgatgactcctttcatttccattcaatgaggattccattcggttccatttgatgatgattcctttgaattccatttgatgacaattccattcaataccaattgatgatggttatttttgattccatttgatgatgattacattcgatgccatttgattgtgattccattcgattccactcgatgattccattctattccattcaatgatgattccattcgagttcattgactattccattccattccactcgatgattccattcgagtccactcgatgattctattcgattgcattcgataattctattcgattgcattagataattcccttcgattccatttgaggataattccatttgagtccattcgatgattgttccattcgattctattcggtgattccattcgattccatttgataatgattccattcgagaccattcgatgattccattcaattccattcaataatgattcctttcgagtccattcaatgattccattcaagtccattcgatgatcccatctgattccattcaatgaatccattcgattccattcagtgatgattccattcatttccatctgatgatgattccattcgattccattcaatgatgccattcgattccatttgatgatgatttcaatcaatttcattcgatgattccattcgaatccattcgatgatgagtccatccatttcaatttcatgataattccattcgtttcaattcgatggtgtttccattcgattccatacgattttgattccattagcttccattggatgatgattccgctcgagtccattcgatgatgatcatattggatttcattccatagttctattcgatttcatttgatgatgattccatctgattccatttgatgattccattcgattccattcgatgatgattccattcgtttccatccgatgatgattccattcgattccgttcaatgtttattccattcgagttcattcgccgattccactctattccatttgatgatgattgcattcgagtccatggattattccattctatttcattagatgattccattcgagtccattcgatgattctcttcgattccatttgataattccgtttgattccgtttgatgttgattccatttgagtccattcgatgataattccattcgattctatgcgatgattccattccatgccatttgaagatgattccattcgacaccattcgatgattgcattcaattcattcgatgacgattccattcaattccgttcaacgattccattagattccatttgatgatgattccatgcgattccgtttgatgatgattccatgcgattccattagatgatgactcctttcatttccattcgatgatgattccattcgtttccattcgacgatgattccattcgattccgtttgattattccattcgagtacattcgatgattccattcgattctatttgatgatgattgcattcgggtcaagggattattccattccactccattagatgattccattcgtggccattcgatgattctctccgattccattcaataattccgtttgattccgtttgatgttgattccattcggtccattcaatgataattccatttgattccatgcgatgattccattcctttccatttgaagatgattccattcgagaccattcaatgattgcattcaattcattcgatgacggttccattcaattcctttcaatgatgccattagattcgatttgatgatgagtccattcgatgatgattccattcgattccattagatgatgattccatgtgattccattagatgatgactcctttcatttccattcaacgaggattccattcggttccatttgatgttgattcctttgaattccatttgatgacaattccattcaataccaattgatgatggttattttgattccatttgatgatgattacattcgattccatttgatcgtgattccattcgattccactcaatgattccattcgattccattcaatgatgattccattcgagttcattgactattccattccattccattcgatgattccactcgagtccattcgatgattctattcgattgcattcgataattccattctattccatttgaggataattccatttgggtccattcgatgattgttccattcgattctattcggtgattccattcggttccatttgataataattccattcgagaccattggaagattccattcaattccattcaataatgattccattcgagtccatttaatgattccattaaagtccattcgatgattccatctgattccattcaatgaatccattcgattccattctatgatgattccattcatttccatctgatgatgattccattcgaatccattcgctgatgagtccatccatggaatggtatggagtggaaaggaatggaatggaaagtaaaggaatggaatgcaatggaatgcaatggtatggaatggagtcaaaccgagtggaatggaatggaatggaatggaataaatggaatggaatggaatgaaatggaatggagtggaatgtaataaacaccagtggaatgtaatggaaaggaatggagtggaatggaatggaatggaatggaatggaatggaatggaatggacaggaatggaatggaatggaatggaatggactagaatggaatggaatggaattaaatcaacccaattggaatggaatggaatgcaatggaatggaatggaatcaactggaaaggaacgaaatggaatggaatggaatggaatgaaatggaatggaatggaatggaaaggaatggaatcaacccgagtggaatgcaatggaatggaatggaatggaatggaatcaacctgagttgaacggattggaatggagtggaatggaatggaacggcatggaatgcaatgcaatcaactagaatggaatggaatgcaatggaatggaatagaaaggaatggaatggaatcgaatagaatcaacctgagtgcaatggaatggaatggaatggaatgaatggaatggaatggaatggatactaatacaatggaatggaaaggaaacaaccccagtggaagggaatgcaatggaatgcagtggagtggaatggaatggaatggaatggaatagaatggaatcaacccgagtggaatgcaatggaatggaatggaatggtatggaaaggaatggaatcaacccgagtggtatgtattggaatggagtggaatggaatggaatggcatggaatgcaatggaatcaactagaatggaatggtatggaatggattggaatggaatcgtacggaatcaacctgagtggaaaggaatggaatggaatggaattaaatgaatggaatggaatggaatggaaacaaatggaatggaatggaaaggaagcaaccagagtgaaatggaatgcaaaggaatgcaatgttatggaaagaaatggaatggaattcaatgtaatggaaacaaaccgagtggaatgtaatggaatggaaaggaatggaatgtaatggaatgtattggaatcaacccgattccaatgcaacggcatggaatggaatggaatggaatggaagggaacagaatggaagggaaagtaatggaatgaactggaatgtaatggaatggaatggaatttaatggaaaggaatggaatggaatggaatcaacccgagtggagtggaatggaattgaatggaaatgaatggaatagaatggaatggaatgaaaacgaatggaatggaatgaacccgagtggaatggaatggaatggaatggaatggaaaggcacggaatggaatggaatgaaatggaatggaatggaatggaaaggaatcaacccgagtggaatggaatggaatggaaacaaactgagtggaatggaatggaatggaatgcagtggaatggaatggggtgaaaggcattagaatcaactggaatggaatggaatggaatggattataatggaatggaatggaatcaatctgggtggtatggaatgtaatggaatggattggaatggaatggaatggaattcaatgtaatggaaacaaaccgagtggaatgtaatacaatggaaaggactggaatgtaatggaatggattggaatcaacccgattccaatgcaatggaatggaatgtaatggaatggaatggaacggaatcaaatggaatggaatcaacccgagtggaatgtaatggaatggaaacaaacagagtggaatggaatggaatggaatgcaatggaatataatggagtgaaaggcattagaatcaactgtaatggaatggaatggaatggattataatggaatggaatggaatcaatcccgttggtatggaatggaatggaatggaattcaatgtaatggaaacaaaccgagtggaatgtaatataatggaaaggactggaatgtaatggaatggattggaatctacccgattccagtgaaacgaaatgtaatgtaattgaatggaatggaacggaatgcaaaggaatagaatgaactggaatggaatggaatggcattgaatttaacggaatggaaaggaatggaatgaaatggaatggaatcaacgcgagtggagtggaaaggaatggaatggaaatgaatggaatggaaaggaatggaatagaatggaacggaatggaatgaacccgagtggaatggaatggaatggaatggaatggaaaggaatggaatggaatggaacggaaaggaatggaatggaatggaacggaatggaatggagtggaatgtaacggcatggaatggaatggaatggagtggaatcaacccgagaggaatggaatgtaatggactgtaatggcatggaatggaatggaatggagtggaataaacccgagtggaatggaatggaatgctatggactggaatggaatggaatggaatcaatccgagtggaatggaatggaatggaatggaatcaattcgactgcaatggaatggaatggaatggaatggaatggaatcaattcgagtgcaatgtaatggtatagaatggaatggaatggaatagaatcaaacacagtggaatagaacggaaacggatggaatggaatggaatggaatggaatggaatggaaaggaatggaatggaatgtaacggcatggaatggaatggaatggagtggaatcaacccgagtggaatggaatggaatggactgtaacggcatggaatggaatggaatggagtggaataaacccgagtggaatggaatggaatggtatggactggaatgtaatggaatggaatcaatccgagtggaatgtaatggaatggaatggaatggaatggaatcaacccgagtgcaatggaatggaatggaatggaatggaatggaatggaatagaatggaatcaattcgagtgcaatgtaattgtatagaatggaatggaatggaatcaaccagagtggagtggaatggaatggaatggaatgcaatggaatggaatggaatggaatgaaatggcatggaatggaatggaatggagtgtaatcaacccgagtggaatggagtggaatggactgtaatggcatgcaatggaatggaatagagtggaataatcccgagtggaatggaatggaatgcaatgcactggaatggaatggaatggaatcaaaccgaatggagcggaatggaatggaatggaatggaatcaacccgagtgcaagggaatggaatggaatggaatggaatagaatgaaataaacacgagtggaatggaatgaaatggaatggaatggaatggaattgaagagaatggaatggaatcaagtcgagtggaaaggaatgggatgaaaaggaatggaatggaatggaaaggaatggaatgcaatggaatgcaatattatggaatggaatcaacatgagtggaatggaatggaacgggatggaatggaatgaaatggaatgaaatgcaatggaatggacaggattagaatggaatggaatggagtagaattgacaggaatggaatggaatggaatggagtggaatggaatggactagaatggaatggaatggaatgaaatcaacacgattggaatggaatggaatgcaatggaatggagtggaatggaataaacaccagtggaatggaatggaaaggaatggaatggaatggacaggaatgcaatggaatggaatggaatgcaatggaatggaatggaatggaatggaatggaatggactagattggaatggaatggagtgaaatcaacccgattggaatggaatggaatgcaatgtaatggaagggaatcaactggaaaggaatgaaatggaatggaatggaatggaatggaatcaacccgagtggaatgcaagggaatggaatggaatggaatggaatgaaatcagcccgaatggaatggattggaatagagtggaatggaatggaacggcatggaatgcaatggaatcaactagaatggaatggaatgggatggaatggaatggaatggagtggaatggactagaatggaatgtaatggaatgaaatcaaccagattggaatggaatggaatgcaaataaatggaatggaatcaactggaaaggtatcaaatggaacggaagggaatggaatggaatggaatggaattgaatggaatggaatcaactcgagtggaaaggaaaggaatggaaaggaatggaatggaaaggaaaggaatggaatgcaatggaattcaatggtatggaatggagtcaacccgagtggaatggaatggaaagaatggaattaaatggaatagaatggaatgcaatggaatggagaggaatggaataaacaccagtgcaatggaatgcaatggaatggagtggaatggaaaggagtggaatggaatggaatggacaggaatggaatggaatggaatgaaatcaacccgattgcaatggagtggaaaccaacggaatgtaatggaatcaactggaaaggaatgaaatggaatggaatggaatggaatggaatggaatggaatcaactcgagtggaatgcaatggaatggaatggaatggaatggaatcatcccgactggaatggattggaatggaatggaatggaatggaacggcatggaatgcaatggaatcaactagaatggaatagaatggaatggattggaatggaatcgaacggaatcaacctcagtgtaatggaatggaatggaatggaatgaatggaatggaatggaatggatactaatggaatgtaatggaaaagaaacaacccgagtggaatggaatgcaatggaatgcaatggaatggaatggaatggaatggaattcaatgtaatggaaaaaaaccgagtggaatgtactggaatggaaaggactggaatgtaatcgaatggattgaaatcaacccgattccaatccaacggaatggaatggaatggaatggaatggaatggaatggaatggaatggaatggaatggaaaggaaaggaaaggaatggaatcaactggaatggaatggaatggaatggaatggaatttaatggaatggaatggaatttaatggaatggaataaaatggaaacgaatggaatggaatggactagaatgcaatggaatgcaatgaacccgagtgacatggaatggaatggaatggaatggaatggaattgaatggaatggaataaacacgagtggaatggaatggaatggaatggaatggaatggaaaggaatggactggaatggaatggaatcgaatggaatggaattgaatggaatggaataaacacgagtggaatggaatggaatggaatggaatggaaaggaatggactagaatggaatgggaaggaaaggaatggaatgaaatggaatgcaatggtatggaatggagtcaacgcgagtggaatggaatggaatggaatggaatgaaatggaacggaatggcatgcaattgaatggagtggattggaataaacaacagtggaatggaatgcaatggaatagagtggaatggaataaacaccagtggaatggaatggaacggaatggaatggaatggaatgatcaggaatggaatggaatggaatggaatggaaaggactagaattgaatggaatagaatgaaatcaacccgattggaatggaatggaatgcaatggaagggaatagaatcacctggaaaggaatcaaagggaacggaatggaacggaatggaatggaatggaatggaatggaatcaaatcgagtggaaaggaatggaatggaaaagaaaggaatggaaaggaaaggaatggtatgcaaaagaatgcaaaggtatggaatggagtcaacccgattggaacggaatggaatggaatggaatgaaatggaatggaatggaatggaatgcaatggaatggagtgtaatggaataaacagcagtggaatggaatgcaatggaatggagtggaatggaatggaatggaatggaatggaatggacaggaatggaatggaatgcaatggaatggaattgaatggaatgaaatggaatggactagattggaatggagtcaacctgagtggaatggattggaatggagtggaatggaatggaacggcatggaatgcaatggaatcaactagaatggaatggaatggaatggatttgaatgtaatcgaacggaatcaaactgagtggaatggaatgaatggaatggaatggaatggatactaatgcaatggaatggaaaggaaacaactcgagtggaatggaatgcagtggaatgcaatggaatggaatggaatggaatggaatggaatggaatggagtggaatagaatcaacccgagtggaatggattggaatggagtggaatggaatggaacggcatggaatgcaatagaatcaactagaatggaatggaatggaatggattggaatggaatcgaacagaatcaacctgagtggaaaggaatggaatggaatggaattgaatgaatggaatggaacggaatggaaattaatggaatggaatggattggaagcaacccgagtggaatggaatgcaacggaatgcaaagttatggaaaggaatggaatgcaattcaatgtaatgtaaacaaaccgagtggaatgtaatggaatggaaaggactggaatgtaatggaatgtattggaatcaacacgattccaatgcaacggcatggaatggaatggaatggaatggaatttaatggaatggaatggaatggaatttaatggaatggaatggaatggaatttaatggaatggaatggaatggaatggaatcaacccgagtggagtggaatgaaatggaatggaaatgaaaggaatagaatggaattgaaaagaacggaacggaatggaatgaacccgagtggaatggaagggaatcgaatcgaatggaaaggcacggaatggaatggaatggaatcaacccgagtggaatggaatgcaatggaaacaaactgagtggaatggaatgtaatggaatggattggaatcaacccgattccaatgcaacagaatggaatgtaatggaatggagtggaacggaatggaatggaatggaaaggaatggaatgaactggaatggaatggaatagcatggaatttaacggaatggaatggaatggaataaacgcgagtggagtggaatggaatggaaaggaaatgaatggaatggaatggaatggaacggaacggaatggaatgaacccgagtggaatggaatgaaatggaatggaatgcaatggaatggaatggaatggaatggaatggaatctacccgagtggaatggaatggaagggaatctgatggaatggaatggaacggaatgaactggaaaggaacggaatgcaatggaatggagtggaatggaataaacaccagtggaatggaatggaaaggaatggaatggaatggacaggaaaggaatggaatggaatggcatggaattgaatcgaatggaatggactagaatggaatggaatggagtgaaatcaacccgattggaatggaatggaatgcaatgtaatggaatggaatcaacaggaaaggaatgaaatggaatggaatggaatggaatggaatggaatggaatggaatggaatggaatcaacctgagtggaatgcaatggaatggaatggaagggaatggaatgaaatcagcccgactggaatggattggaatagagtggaatggaatggaacggcatggaatgcaatggaatcaactagaatggattggaatgggatggaatggacaggaatggaatggaatggaatggagtggaatggaatagaatggaacgtaatggaatgaaatcaacccgattggaatggaattgaatgcaattaaatggaatggaataaagtggaaaggaatcaaatggaacggaatggaatggaatggaatggaatggaatagaatggaatggaatcaactcgagtggaaaggaaaggaagggaaaggaatggaatggaaaggaaaggaatggaatgcaatggaattcagtggtatggaatggagtcaatccgagaggaatggaatggaaagaatggaattaaatggaatagaatgcaatgcaatggaagggagaggaatggaataaacaccagtggaatggaatgcaatggaatggagtggaatggaatggagtggaatggaatggaatggaatggacaggaatggaatggaatggaatgaaatcaacccgattggaatggagtggaatgcaacggaatggaatggaatcaactggaaaggaatgaaatggaatggaatggaatggaatggaatggaatcaactcgaggggaatggaatggaatggaaaggaatgaaatggaatggaatgaaatgcaatggaatggagtggagtggaataaacagcagtggaatggaatggaatggaatggaatggaatggacaggaatgaaatggaatggaatggaatggaatggaatggaatggaatggaatagaatggaatggaatggaattaaatcaacccgattggaatggagtggaatgtaatggaatggaatggaatcaactggaaaggaatgaaatgaatgcaatggaatggaatggaatggaatggaatggacaggaatgaaatggaatggaatggtatggaatggaatggaatggaatggaatggaatggaatggaatggaatggactagaatggaatggaatggaatgaaatcaacccgattggaatggagtggaatgtaatggaatggaatggaatcaactggaaaggaatgaaatgaatgcaatggaatggaatggaatggattggaatggaatggaatggaatggaatcaacctgagtagaatgcaatggaatggaatggaatgcagtggaatggaatcaacacgagtggaatggaatggaacagaatggaatcaacccgagtggaaagtaatggaatggaatggaatggaatggaatggaagggaataaacaagagtggaaaggaatcgaatggaatgaaatggcatggaatggaatggaataaacacgagtggaatggaatcgaatggaatgaaatggcatggaatggaatggaatgcaatggaatcaactctagtggaaaggaatggattagaaaggaatggaatggaaaggaaaggaatggaatgcaatggaatgcaatggtatggaatggagtcaacccgagtggaatggaagggaatgaaatggaatgcaatgggatgcaatggaatggaggggaatggaataaacaccagtggaaaggaattgaatgcaatggaatggaatggaccagaatggaatggaatggaatagattggaatggaatggaatggaatggagtggacaagaatgcaatggaaaggaaaggaatgaaatcaacccgagtggaatggattggaatagagtggaatggaatttaaaggcatggaaagcaatggaatcaactagaatggaatggaatggaatggaatggaatggacaggaatggaattgtatggaatggaatagaatggagtggaatggactagaatggaatggaatggaatgaaatcaaccggattggaatggaatggaatgcaacggaatggaatggaataaactggaaaggaatcaaatggaacggaatggaatggaatggaatggaatggaatggaatagaatggaatggaatcaactcgaggggaaagtaatggaatggcaaggaatggaatggaaaggaaaggaatagaatgcaaaggaatgcaatggtatggaatggaatcaacccgagtggaatggaatggaatggaatggaatggaacgcaatggattggagtggaatggaataaacactagtggaatggaatggacaggaatggaatggaatggaatggaatggaatggacaggaatggaatggaatggaatggactagaatggaatggaatggaatgaaatcaacccgattggaatggaatggaatgcaatggaaggtaatggaatcaacaggaaacgaatgaagtggagtggaatggaatggaatggaatggaatggaatggaatggaattaaccgagtagaatgctatggaatggaatgaaatggaatggaatgaaatcaaccctaatggaatggattggaatagaatggaatggaatggaatggcatggaatgcaatggaatcaactagaatggaatggaatggaatgaaatggacaggaatggaatggaatggaatggaatggaatggaatggaatcgaatggaatggaatggaatggactgcaatggactaaaatggaatggaatggaatgaaatcaacccgattggaatggaatggaatgcaatggaatgggatggaatcaactggaaaggaatgaaatggaatggaatggaatggaatggaatggaaacaacccgagtggaatgcaattgaatggaatggaatggaatggaatgaaatcaactcgagtggaatggattggaatggagtggaatggaatggaacggcatggaatgcaatggaatcaactacaatggaatggaatggaatggattggaatggaatcgaacggaatcaacctgagtggaatggaatggaatggaaagaatggaatggaatggaatggaaactaaaggaatggaatggaaaggaaacaacccgagtggaatggaatgcaatggaatgcaatggaatggaatggaatggaatggaaaggaaacaatccgagtggaatggaatgcaatggaatggaatggaatggaatggaatggaattctgtgtaatggaaacaaaccgagtggaatataatggaatgaaaattactgggatgtaacggaatggattggaatcaacccgattacaatgcaacggaatggaatggaagggaatggaatgcaatggaaaacaatggaatgaactggaatgcaatgaaatttaatggaatggaatggaacggaatggaatcaacccgagtggagtcgaatggaatggaaagtaaatgaatggaatggaatggaatggaacgaaatgaaatgaacccgagtagaatagaatggaatggaatggaatggaatggaatggaatcaacccgagtgaatggaatggaaatgaatggaatggaatggaaaggaatggaatgaaatcaacccgagtggaatgcaatggaatgaaatggagtggaatggaaaggaattgagtggaatggaatgtaatggaataaacccgagtggaatggaatggaatggaatggaatggaatggaatggaataaatacgagtggaatcgaatggaatggaatggaataaatacgagtggaatggaatggaatggaatggtatagaatggaatggaatcaactcgagtggaaaggaatgtaatggaaaggaatggaatggaatggaatggaatggaatgcaatggaatgcacgggtatggaatggagtcaatgcgagtggaatggaatggaatggaattgaatgccatggaatggaatggaatataatggaatggagtggaatggaataaacaccagtggaatggaatggaatggaatggaatggaatggaatggaatgaaaaggacaggaatggaatggaaaggaatggaatggaatggcacggaatggataggaatggaatggaatcaacatgactggcatggaatggaatggaaaggaatggaatggaatggaatggaatggtatggaatcagcccgagtggaatggaatggaatggaatggaatggaacggaacgtaaagtaatgaacccgagtagaatggaacggaatggaatggaatggaatggaatcaacccgagtggaatggaatggaatggaatggaataaacacgaatggagtggaatggaatggaatggaatggaatggaatggaatcaactcgagtggaatgaaatgtaacgtcatggaatggaatggaatggaatggaaaggaatggaatggaatggaatagaatggaatcaattcgagtgcaatgtaatggaatagaatggaatcaattcgactgcaatgtaatagtatagaatggaatggaatggaatggaatggaatcaaccagagtggaatgttatggacaggaatggaatggaatggaatggactggaatggaatggaagggaatggaatggaaatgactagaatggaatggaatggaatgaaataaacccgattggaatggaaaggaatgcaatggaatggaatggaatcaactggaaaggaatggaatggaatggaatggaatggaatggaatggaatggaaggcattagaatcaactggaatggaagggaaagaaatgaaatggaatggaatggaatggaatggaatggaattgaatcaaccccagtggaatggagtggaatggaatggattataatggaatggaaaggaatcaatccgggtggaatggaatggaatggaatggagtggaatggaatggaatggaatggaatggaacggaatggaatggaatcaccccaatggaagggaacggaatggaatggaaaggaatggaaaggaatggaaaggaatggaatgcaatggaatcaacccgaatggactggaatggaatggaatggaatggaatggaatggaatggaatcaactcaagtggaatggaaatgaatggaatggaacggaaaggaatttaatggaatggaatggaatcaacccacgtggaatggaatggaatggaatgcaatggaatcaacccgagtgaatggaatggaaatgaatggaatgtaatggaaaggaatggaatgaaatggagtggaatggaaaggaattgagtggaatggaatgtaatggaatcaacccgaatggaatggaatggaatggaatgcaatggaatggaatggaatggaatggaatggaaaggaatggaataaatacgagtggaatggaatggaattaaatggaatagaattgaatggaatcaactcgagtggaaagtaatgtaatggaaaggaatggaatggaatggaaaggaatggaatgcaatggaatgcacgggtatggaatggagtcaatccgagtggaatggaatggaaaggaattgaatgcaatggaatggaattgaattcaatggaatggaatggaatgcaatggaatggattggaatggaataaacaccagtggaatggaatggaatggaatggaatggaatggaatgaaaaggataggattggagtggaatggcacggaacggataggaatggaatggaatcaacatgactggcatggaagggaatggaaaggaatggaatggaatggaatggaatggaatagaatggaatggtatggaatcagcccaagtagaatggaatggaatggaatggaatggaatggaatggaatggaacggaacgaaaagtaatgaacccgagtagaatggaatggaatggaatggaatggaatggaatcaacccgagtggaatggaatggaatggaatggaataaacacgaatggaatggaaaggaatggaatggaatggaatggaatggaatggaatcaactagagtggaatgaaatgtaacgtcatggaatggaatggaatggaatggaatggaatggaatggaatggaatagaatggaatcaattcgagtgcaatgtaatggaataaaatggaatcaattctactgcaatgtaatggtatagaatggaatggaatggaatggaatcaagcagagtggaatggaatggaaaggaatggaatggaatggaatggaatggaatagaatggaatggaatggaatggcatggaatgtaacggcatggaatgcaatggaatggagtggaatcaacccgagtggaatggaatggaatggactgtaacggcatggaatggaatggaatggaatggactggaaacaaaccgagtggaatggaatggaatggaaaggaatggaatggaatcaacccgagtggaatggactggaatgtaatggaatggaatcaaccagagtggaaaggaatggaatggaaagcaatagaatggaatggaagggaatggaatgcaacggaatgcaatggtatggaatggagtcaacacgagtggaatggaatggaatggaatcgaatgcaatggaatggaatggaatgcaatggaatggagtggaatggaataaacaccagtggaatggaattgaatggaatggaatggaatggactagaatggaatggaatggaatgaaatcaacccgattggaatggaatcgaatggaatggaatggaatggaatcacctggataagaatgaaatggaatggaatggaatggcattgaatgcaaaggaaaggaatggaatgaaatcaacccgagtggaatggattggaatagagtggaatggaatttaaaggcatggaaagcaatggaatcaactagaatggaatggaatggaatggaatggaatggaatggaatggacaggaatggaattgtatggaatggaatagaatggagtggaatggactagaatggaatggaatggaatgaaatcaaccggattggaatggaatggaatgcaacggaatggaatggaataaactggaaaggaatcaaatggaacggaatggaatggaatggaatggaatggaatagaatggaatggaatcaactcgaggggaaagtaatggaatggcaaggaatggaatggaaaggaaaggaatagaatgcaaaggaatgcaatggtatggaatggaatcaacccgagtggaatggaatggaatggaatggaatggaacgcaatggattggagtggaatggaataaacactagtggaatggaatggacaggaatggaatggaatggaatggaatggaatggacaggaatggaatggaatggaatggaatggactagaatggaatggaatggaatgaaatcaacccgattggaatggaatggaatgcaatggaaggtaatggaatcaacaggaaacgaatgaagtggagtggaatggaatggaatggaatggaatggaatggaatggaattaaccgagtagaatgctatggaatggaatgaaatggaatggaatgaaatcaaccctaatggaatggattggaatagaatggaatggaatggaatggcatggaatgcaatggaatcaactagaatggaatggaatggaatgaaatggacaggaatggaatggaatggaatggaatggaatggaatggaatggaatggaatggactgcaatggactaaaatggaatggaatggaatgaaatcaacccgattggaatggaatggaatgcaatggaatgggatggaatcaactggaaaggaatgaaatggaatggaatggaatggaatggaaacaacccgagtggaatgcaattgaatggaatggaatggaatggaatgaaatcaactcgagtggaatggattggaatggagtggaatggaatggaacggcatggaatgcaatggaatcaactacaatggaatggaatggaatggattggaatggaatcgaacggaatcaacctgagtggaatggaatggaatggaaagaatggaatggaatggaatggaaactaaaggaatggaatggaaaggaaacaacccgagtggaatggaatgcaatggaatgcaatggaatggaatggaatggaatggaaaggaaacaatccgagtggaatggaatgcaatggaatggaatggaatggaatggaatggaattctgtgtaatggaaacaaaccgagtggaatataatggaatgaaaattactgggatgtaacggaatggattggaatcaacccgattacaatgcaacggaatggaatggaagggaatggaatgcaatggaaaacaatggaatgaactggaatgcaatggaatttaatggaatggaatggaacggaatggaatcaacccgagtggagtcgaatggaatggaaagtaaatgaatggaatggaatggaatggaaagaaatgaaatgaacccgagtagaatagaatggaatggaatggaatggaatggaatcaacccgagtgaatggaatggaaatgaatggaatggaatggaaaggaatggaatgaaatcaacccgagtggaatgcaatggaatgaaatggagtggaatggaaaggaattgagtggaatggaatgtaatggaataaacccgagtggaatggaatggaatggagtagaatggaatggaataaatacgagtggaatcgaatggaatggaatggaataaatacgagtggaatggaatggaatggaatggaatagaatggaatggaatcaactcgagtggaaaggaatgtaatggaaaggaatggaatggaatggaatggaatggaatgcaatggaatgcacgggtatggaatggagtcaatgcgagtggaatggaatggaatggaattgaatgccatggaatggaatggaatggagtggaatggaataaacaccagtggaatggaatggaatggaatggaatggaatggaatggaatgaaaaggacaggaatggaatggaaaggaatggaatggaatggcacggaatggataggaatggaatggaatcaacatgactggcatggaatggaatggaaaggaatggaatggaatggaatggaatggtatggaatcagcccgagtggaatggaatggaatggaatggaatggaacggaacgtaaagtaatgaacccgagtagaatggaatggaatggaatggaatggaatggaaacaacccgagtggaatggaatggaatggaatggaataaacacgaatggaatggaatggaatggaatggaatggaatggaatggaatggaatcaactcgagtggaatgaaatgtaacgtcatggaatggaatggaatggaatggaaaggaatggaatggaatggaatagaatggaatcaatttgagtgcaatgtaatggaatagaatggaatcaattcgactgcaatataatagtatagaatggaatggaatggaatggaatggaatcaaccagagtggaatgttatggacaggaatggaatggaatggaatggactggaatggaatggaatggaatggaatggaaatgactagaatggaatggaatggaatgaaataaacccgattggaatggaaaggaatgcaatggaatggaatggaatcaactggaaaggaatggaatggaatggaatggaatggaatggaatggaatcaactcgagtggaatggattgaaatggagtggaatggaatggaacggcatggaatgcaatggaatcaactagaatggaatggaatgtaatggattgaaatggaatcgaacggaatcaacctgagtggaatggaatggaatggaatggaatggaatggaatggaaactaaaggaatggaatggaaagcaaacaacccgagtggaatggaatgcaatggaatgcaatggaatggaatggaatggaatggaattcagtgtaatggaaacaaaccgagtggaatataattcaatgaaaaggactgggatgtaatggaatggattggaatcaacccgattgcaatgcaacggaatggaatggaagggaatggaatggaatggaaaggaatggaatgaactggaatgcaatggaatttaatggaatggaatggaacggaatggaatcaacccgagtggagtggaatggaatgggaaggaaatgaatggaatggaatggaatggaatggaatggaatggaaccgaatgaaatgaaatgaacccgagtagaatggaatggaatggaatggaatggaatggaatggaatggaatggaatcaacccaagcggaatggaatggaatggaatggaatggaatggaatggaatggaatggaacgaaaaggaatgaaggcgagtagaattgaatgtaacggaatggaatggaatcaacccgagtggaatggaatgggatggaatggaataaacacgaatggaatggaatggaatggaatggaatggaatggaatggaatggtacggaatggaatggaatcaactcgagtggaatgaaatgtaacgtcatggaatggaatggaatggaatggaatggaatcaacccgactgcaatggaatggaatgcaatcatcccgagtggaatggaatggaatggaatggaatacaatggaatggaatggaatggaatacaatggaatggaatggaatggaaggcataagaatcaactggaatggaatggaaagaaatgaaatggaatggaatggaatggaatggaatcaaccccagtggaaaggagtggaatggaatggattaaaatggaatggaaaggaatcaatccgggtggaatggaatggaatggaatggagtggaatggaatggaatggaatggaatggaatggaatggaatggaatcaaaccgaatagaatggaatggaatggaatggaaatgaatggaaaggaatggaaaggaatggaatggaatggaatcaacccgaatggactggaatggaatggaacggaatggaatggaatggaatggaatcaactcaagtggaatggaaatgaatggaatggaacggaaaggaatgtaatggaatggaatggaatcaacccacgtggaatggaatggaatggaatgcaatggaatcaacccgagtgaatggaatggaaatgaatggaatggaatggaaaggaatggaatgaaatcaacccgactggaatgcaatggaatgaaatggagtggaatggaaaggaattgagtggaatggaatgtaatggaatcaacccgagtggaatggaatggaatggaatggaaaggaatggaataaatacgagtggaatggaatggaaaggaatggaatagaatggaatggaatcaactggagtggaaaggaatgtaatggaaaggaatggaatggaatggaaaggaatgtgatgcaatggaatgcacgggtatggaatggagtcaatccgagtggaatggaatggaatggaattgaatgcaatggaatggaatggaatgcaatggaatggagtgcaatggaataaacaccagtggaatggaattgaatggaatggaatggaatggaatggaatggaatggaatggaatggaatgaaaaggacaggaatggaatggaaaggaatggaatggattggcacggaatgtataggaatggaatggaaacaacatgaccggcatggaatggaatggaaaggaatggaatggaatggaacggaacgaaaagtaatgaacccgattaaaatggaatggaatggaatggtatggaatggtatcaacccgaatggaatggaatggaatggaatggaataaacacgaatggaatggaatggaatggaatggaatggaatcaactcaagtggaatgaaatgtaacgtcatggaatggaatggaatggaatggaatggaatggaatggaatggaatagaatggaatcaattcgactgcaatgtaatggtatagaatggaatggaatcgaatggaatgaaatcaaccagagtggaatgttatggacaggaatggaatggaatagaatggactggaatggaatggaatggaatggaatggaattgactagaatggaatggaatggaatgaaatcaacccgattggaatggaaaggaatgcaatggaatggaatggaatcaactggaaaggaatgaaatggaatggaatggaatggaatggaatggaatggaatggaatcaactggaaaggaatggaatggaatggaatggaatggaatggaatggaatggaatggaatgcaatggaatcaactcgagtggaatggattggaatggagtggaatggaatggaaccgcatggaatgcaacggaatcaactagaatggaatggaatggaatggattgaaatagaatcgaacggaatcaacctgagtggaatggaatggaatggaatggatggaattgaatgtaatggaaactaatggaatggaatggaaatgaaacaaccagagtggaatggaatgcaatggaacgcaatggaatggaattcagtgtaatggaaacaaaccgagtggaatataatggaatgaaaaggactgggatgtaatggaatggattggaaaccacccgattagaatgcaacggaatggaatggaatggaatggaatggaaaggaatggaatgaactggaatgcaatggaatttaatggaatggaatggaacggaatggaatcaacccgagtggagtggaatggaatggaaaggaaatgaatgcaatggaatggaatggaatagaacggaacgaaatgaaatgaacccgagtagaatggaatggaatggaatggaatcaaccctagtggaatggaatggaatggaatggaatagaatggaatggaatggattggaaggaatggaacggagcgaaaaggaatgaagccgagtggaatggaatggaatggaatggaatggaatggaatggaatgcaatggaattgaatcaactagagtggcatgaaatgtaacgtcatggaacggaatggaatggaatggaatggaatggaatggaatggaatgaacccgactggaatggaatggaatacaatcatcccgagtggaatggaatggaatggaatggaatacaaagcaatggaatggaatggaaggcattagaatcaactgcaatggaagggaaagaaacggaatggaatggaatggaatggaatggaatggaatggaatgg

SEQ ID NO: 1577 - DNA, 3746 bp, Homo sapiens
atggaataaaccccagtggaattgagtggaatggaatggattataatggaatggaaaggaatcaatctgggtggaatggaatggaatggaatggagtggaatggaatggaatggaatggaacggaatggaatggaatcaacccgaatggaatggaatggaatggaatgtaaaggaatggaaaggaatggaaaggaatggaatggaatggaatcaaactgaatggactggaaaggaatggaatggaatggaatcaacacaagtggaatggaaatgaatggaatggaacggaaaggaatgtaatggaatggaatggaatcaacccaagtggaatggaatggaatggaatgcaatggagtcaacccgagtgaatggaatggaaatgaatggaatggaatggaaaggaatggaatggaatcaacccgagtggaatggattggaatgcagtggaatggaatggaacggcatggaatgcaatggaatcaactagaatggaatcaactggaatggattggaatggaatcgaatggaatcaaacagagtggaatggaatggaatggaatggaatgaatggaatggaatggcatggacaagattggaatggaattgaatggaacggaatgctgtggaatggaatggaatcaactggaaaggaatgaaatggaatggaatggaatggaatggaatcaacccgagtggaatgcaatggaatggaatggaataaaatcaacccgagtggaatgcataggaatagagtggaatggaaaggaacggcatggattgcaatggaatcaactagaatggaatggaatggaatggaatggaatggaatcagtggaatggactagaatggaatggaattgaatgaaaaaaacccgattggaatagaatggaatgcaatggaattgaatggaagcaactggaaaggaatcaaatggaatggaatggaattgaatggaatggaattgaatggaatggaatgcaatggaatggaatcaacccgagtggaatgcaacagaatggaattgaatggaatggaatggaatcaacccgagtggagtcgaaaggaatggaaaggaaatgaatggaatggaatggaatggaatggaacggaatggaatacacctattggaatggaatggaatggaatggcatgtaataaacaggattggaatggaatggaatggaatggaatgcaaaggaatggaatagaatgtaatggaatcaactcgagtggaaaggaatggaatggaaaggaatggaatggaaaggaaagaatggaatgcaatagaatgcaatggtatggaatggagtcaacccgagtggaatggaatggaatggaatggaatggaatgaaatggaaaggaatggaatgcaatggaatggattggaatggaataaacagcagtgtaatggaatggaatggaagggaatggaatggacaggaatggaatggaatggaatggaatggaatggaatggaatggaatggactagaatggaatggaatggaatgaaatcaaccagattggaatggaatggaatgcaatggaatggaatcaacccgagtggaacggaatggaatggaatggaatggaatggaatggaatggaatggaatggaatggaatggactagaatggaatggaatggaatgaaatcaaccagattggaatggaatggaatgcaatggaatggaatcaacccgaatggaatggaatggaatggaatggaatggaatggaatggaatggaatggaatggaatggactagaatggaatggaatggaatgaaatcaaccagattggaatggaatggaatgctatggaatggaatcaacccgagtggaacggaatggaatggaatggaatggaatggaatggaatggaataaacccgagtggaatgtaatggaatggaatggaatggaaaacaagagtggaatggaatggaatggattggaatggaatgcaatggactggaaaggaatggaatggaaaggaaaggaatggaatgcaatggaatgcaatggtatggaatggagtaaacccgagtggaattgaatgcaatgtaatgtaatgtaatggaatggaatggaatgcaatggaatggagtggaatggaatatacaccagtggaaaggaatggaatgcaatggaatggaatggacaggaatggaatggaatggaaaggattggaatggaatggaatggaatggaatggagtgcaatgaaatcaacccgattggaatggaatggaatgcaatggaatggaatggaatcaactggatatgaatcaaatggaaaggaatggaatggaatggaatggaatggaatggaattaaccccagtggaatgcagtggaacggaatggaatggaatggaatgaaatcaacccgaatggaatggattggaatagagtggaatggaatggaacggcatggaatgtaatggaatcaactagaatgcaatgggatggaatggaaaggaatggaatgaagtggaatggaatggaatggaatggaatttaatggaatggaatggaatggaatggaatggaatcaacccgagtggagtggaatggaatggagtggatataaatggaatggaatgcaatggaatggaatggaatggattggaatggaatggatctgcccaattggaatggaatggaatggaatggaatggaatggaatggagtggcatgtaataaacaggattggaatggaatggaatggaatggaatggaaaggaatggaatagaatgtaatggaatcaactcgagtggaaaggaatggaatggaaaggaatggaatggaaaggaaagaatggaatgcaatagaatgcaatggtatggaatggagtcaacccgagtggaatagaatagaatggaatggaatgaaatggaatggaatggaatgcaatggaatggagtggaatgtaataaacagcaatggaatggaatggaatggaagggaatggaatggaatggaatggattggaatgaaatggactagaatggaatggaatggaatgaaatcaaccagattggaatggaatggaatacaatggaatggaatgcaatcaactggaaaggaatgaaatgaatggaatggaatggaatggaatggattggaatggaatggaatggaatggaatggaatggaataaacccgagtggaatgtaaaggaatggaatgcaatggaatgcaatggaatggaatcaaccagagtggaatggaatggaatggaataaacccgagtggaatgtaatggaatggaatggaatggaatggaatggaatggaatggaatggaatggaatggaataaacaagattagaatggaatggaatggattggaaaggaatggaatggaaaggaaaggaatggaatgcaatggaatgcaatggtatggaatggagtaaacccgagtgcaatggaatgcaatggaatggaatggaatggaatggactggaatgcaatggcatggagtggaatggaataaacaccagtggaaagtaatggaatgcaatggaatggaatggaatggaatggattggaatggaatggaatggaatggaatggaatggagtgcaatgaaatcaacccgattggaatggaatggaatacaatggaatggaatggaatcaactggaaaggaatcaaatggaacggaatggaatggaatggaatggaatgggatggaattaccccgagtggaatgcagtggaatggaatggaatggaatgaaa

SEQ ID NO: 1578 - DNA, 14500 bp, Homo sapiens
  misc_feature (1)..(14500): DMR10:41901201
catgaatggaatggaatggactagaatggaatggaatggaaataaatcaacccgattggaatggaatggaatgcaatggaatggaatggaatgaactggaaaggaacgaaatggaatggaaaggaattgaatggaatggaatggaatggaatggaatggaatggaagggaatccacccgagtcgaatgcaagggaatggaatggaatggaatggaatggaatggaatggaatcaacccaagtggaatggactggaatggaatggaatacaatggaatggaatggaatggaatggaatcagctgcagtggaatggaatggaatgggatggaatggaatggacaggaatagaatggaatggaatataacggagtggaatcaacacgagtggaatggaatggaatcaaattgaatggaattgaaggaaaggaatgcaatggaatggaatcaacctcagtggaacagaaaggaatgtaatgaaatggaatggaatggaatggaatgcaatggaatggtatggaatggagtggaatggaatgggttggaatgggatggaatcaacccgagtggaacggactggaatggagtggaatggaatggaacggcatggaatgatatggaatcaactagaatagaatggaatgggatggattggaatggaatcaaatataatcaacctgagtgtaatggaatggaatggaatggaatgaatggaaaggaatggaatggaaactaatggaatggaatggaaaggaaacaaccctagtggaacggaatgcaatggaatgcaaaggaatggaattgaattcaatgtaatggaaacaaaccgagtggaatgtaatgtaatggaaaggactggaatgtaatggaatggatgggaatcaacccgattccaatgcaacagaatggaatgtaatcgaatagagtggaacggaatggaatggaaaggaaagaatggaatgaactggaatggaatggaacggcatggaatttaacggaatggaatggaatggaatgaaatggaatggaatcaacccgggtagaatgcaatggaatggaaaggaatggaatggaatggaatcaacccgagttgattagaagggaatggaatggaatggaatggaacggaatggaatggaatggaagggaatggaatggaatggaaaggaatggaatgaactggaatggaatggaatgcaatttaatggaatggaatgaaatcaacccgagtggagtggaatggaatggaatggaaatgaatggaatggaatggaaactaatggaatggaatgcaaacaacccgagtggaatggaatgcaatggaatggaatggaattcaatggaatggaaacaccccgagtgaaatggcatggaatggaaaggaattgaatgtaatggaatggattggaatcaacccgattagtaagcaatggaatggaatggaatggaatggaatggaatggaatggaagggaatggaatgaaatggaattgaaaggaaaggaatggaatggaatggaagggattggaatggaatggaatggattagaatggaatggaatggaatgaaatcaacccgattggaatggaatggaatgcaatgtaatggaatggaatcaactggaaagaattgaaatggaatggaatggaatggaacggaatcaacccgagtggaatgaaatggaatggaatggaatggaatgaaaagaaatcaaccaggctggaatggattggaatggagtggaatggaatggaatggcatggaatgcaatggaatcaactggaatggaatggaatggaatggaatggaatggaatggaatggaatcaaacggaatcaacctgagtggaatggaaaggaatggaatggaatgaatggagtggaaactaatggaatggaatggaaaggaaacaacccgagtggaatagaaagcaatggaatgcaatggaatggaatggaatggaatggaatttgatataatggaaaaaaaaccgactggaatgcaatggaatggaaaggactgcaatgtaatggaatggatcggaatcaacccgattccaatgcaacggaattgaatggaatggaaacgaatggaatgaactggaatggaatggaatggaatggaaatgaatggaatggaatggaatggaatggaatggaatggaacggaatgcaatggaatggaacagaacggaatgaacccgagttgaatggaatggaatggaatggaatggaatggaatggaatggaatggaaaggaacggaatagaatggaatggaatggaatggaatgaactcgagtggaatggaatggaatggaatggattggaatgcaatggaatggaatcaacccgagtggaatagaatggaatggagtggaatggaatggaatgggacggaatggaatggaatggcatggaatagaatggaacggaacggaagggaacagaatggaatggaatggaatggtctcaacctgaatgaaatggaatgaaatggaatggaatcaaccacagtggaatgcaacggaatggaatggaatggaatggaatggaatgaaatcaacccgagtggaatggataggaatagagacgaattgaatggaacggcatggaatgcaatggaatcaactagaatggaatgtaatataatggaatggaatggaatggaatggaatagaatcaacccgagtgaaatggaatggaagggaatggaatggaaaggaatggaaaacaatggattggaatcaaccaaatagaatggaatggaatggaatggaatggaatagaatggaatcaattcgagtgcaatgtaatggtatagaatggaatggaatggaatggaatggaatcaaccagagtgcaatggaatggaaagaaattgaaatgaatggaatggaatggaatggaatggaatggcatggaatggaatggaatggagtggaatcaacccgagtggaatggaatggaatggaatctaatggcatggaatggaatggaatggactgaaatcaacccgagtggaatggaatggaatggaatggactggaatggaatggaatggaatggaatcaacccgagtggaatgaaatggaatggaatggagtggaaaggaatacaatggaatggaatggaatggaatggaatggaatggaatggaatggaatggaatcaacacgaggggaatggaatggaatggaatggactggaataaacacgggtggaatggaatggaatgtaatggaatagaatggaatggaatcaactcgagtggaaaagaatggaacggaaagcaatggaatggaaaggaaagtaatggaatgcaatggaatgcaatggtatggaattgagtcaaccagagttgagtggaaaagaatgaaatggaatggaatggaatgcaatcgaatggagtggaatggaataaacaccagtggaatggaatggaatggaatggaatggaatggaatggaatggacaggattggaatggaatggaatggaacggaatgctatggaatggaatggaatcaactggtaaggaatgaaatggaatggaatggaatggaatggaatggaatggactggaatcaacacgagtggaatgcaatggaatggaatggaatggaatggaacaaaatcaacccgagtggaatgcataggaatagagtggaatggaaaggaaaggcatggaatgcaatggaatcaactagaatggaatggaatggaatggacaggaatggaatagaatggaatggaatggaatggaatggaatggagtggaatggactagaatagaatgtaatggaatgaaatcaacccgattggaatggaaaggaatgcaatggaatggaatggaatcaactggaaaggaatgaaatggaagggaatggagaggaatggaatggaatggaatggaatggaatggaatggaatcaacccgagtggaatgcaacggaaaggaatggaatggaatggaatggaatcaactcgagtggaataaattggaatggagtggaatggaatggaacggcatggaatgcaatggaatcaactagaatggaatggaatggaatggattgaattggaatcgaacggaatcacactgagtggaatggaatggaatggaatggaatgaatggaatggaatggaatggaaactaaaggaatgcaatggaaaggaaacaacccgagtggaatggaatgcaatggaatggaatggaatggaatggaatggaatggaatggaatggaattcagtgtaatggaaacaaaccgattggaatgtaatggaaagaaaaagactgggatgtaatggaatggataggaatcaacccgattacaatgcaacggaatggaatggaagggaatggaatggaatggaaaggaatggaatgaactggaatgcaatggaatttaatggaatggaatggaacggaatggaatgaacccgagtggagtggaatggaatggaaaggaaatgaatggaatggaatggaatggaatggaacggaacgaaatgaaatgaacccgagtagaatggaatggaatggaatggaatggaatcaacccgagtggaatggaatggaatggaatggaatggaatggaatggaatggaatggaacggaactaaaaggattgaacccgagtcgaatggaatggaatggaatggaatggaatggaatcaacccgagtggaatggaatggagcggaataaacacgaatggaatggaatggaatggaatggaatggaatggaatggaatggaatcaactcgagtggaatgaaacggaatgtcaattaatggaatggaatggaatagaatggaatggaatggaatggagtggaatagaatggaatcaattcgagtgcaatgtaatggaatagaatggaatcaattaaactgcaatgtaatggtatacaatggaacggaatggtatggaatggaatggaatggaatcaaccagagtggaatggaatggaaaggaatggaatggaatggaaaggaatggaatggaatgaattggaatggaatggaatggaatggaatgtaacggcatggaatgcaatggaatggagtggaatcaacccgagtgaaatggaatggaatggactataacggcatggaatggaatggaatggactggaaacaaaccgagtggaatggaatggaatggaaacgaatggaatggaatcaacccgagtggaatggagtggaatggaatggaatggagtcaacccgagtggaatggaatggaatggattggaatggaatgaacccgactgcaacggaatggaatggaatggaaaggaatggaatggaatgaaatgaacacgagtggaatggaatggaatggaatggaatggaatggaatggaaaggaatggaatggaatggaatggaatggaatggaatggaatggaattttatggacagtaatggaacggaatggaatggaatggaatggaatggaatggaatggaatggaattgactagaatggaatggaatggaatgaaataaaccggattggaatggaatggaatgcaatggaatggaatggaatggaatcaaccggaaaggaatcaaatggaacggaatggaatggaatggaatggaatggaatggaaaaaatggaatggaataactcgagaggaaaggaatggaatggcaaggaatcgaatggaaaggaaaggaatggaatgcaaaggaatgcaatggtatggaatggagacaacccgagtggaatggaatggaatggaatggaatggaatggaatggaatggattggagtggaatggaataaacactagtggaatggaatggaatggaatggcatggacaggaatggaatggaatggaatggaatgaaatggaatggaatggaatggactagaatggaatggaatggaatgaaatcaaccagattggaatggaatggaatgcaatggagtggaatggaatcaacaggaaaggaatgaagtggagtggaatggaatggaatgaaatggagtggaatggaatggaatggaatggagtggaatggaatggaattaacccgagtagaatgctatggaatggaatgaaatggaatggaatgaaatcaaccctaatggaatggattggaataaaatggaatgtaatggaatggcatggaatgcaatggaatcaactagaatggaatggaatggaatgaaatggacaggaatggaatggaatggaatggaatggaatggactggaatggactagaatggaatggaatggaatgaaatcaacccgaatggaatggaatggaatggaatgcaatagaatggaatggaatcaacttgaaaggaatgaaatggaatggaatggaatggaatggaatcaacccgagtggaatgcaatggaatggaatggaatggcatggaatggaatggaatggcatggaatggaatggaatcaactcgaggggaatggattgaaatggagtggaatgcaatggaacggcatggaatgtaatggaatcaactagaatggaatggaatggaatggattggaatggaatcgaacggaatcaacctgagtggaatggaatggaatggaatggaatgaatggaatggaaactaaaggaatggaatggaaaggaaacaacccgagtggaatggaattcaatggaatgcaatggaaaggaatggaatggaatggaattgaatggaatgaatggaatggaaactaaaggaatggaatggaaaggaaacaacccgagtggaatggaattcaatggaatgcaatggaatggaatggaatggaatggaattcagtgtaatggaaacaaaccgagtggaatataatggaatgaaaaggattgggatgtaatggaatggattggaatcaacccgattacaacgcaacggaatggaatggaagggaatggaactcaatggaaaagaatggaatgaactggaatgcaatggaatttaatggaatggaatggaacggaatggaatcaacccgaggggagtcgaatggaatggaaaggaaatgaatggaatggaatggaatggaaagaaatggaatgaccccgagtagaatggaatggaacggaatggaatggaatggaattgaatggaatcaactcgagtggaatgaaatgtaacgtcatggaatggaatggaatggaatggaatggaatggaatggaatggaatagaaaggaatcaattcgagtgcaatgtaatggtatagaatggaatggaatggaatggaatataacggcatggaatgcaatggaatggagtggaatcaacccgagtggaatggaatggaatggactgtaacggcatggaatggaatggaatggaatggaatggaataaaaccgagtggataggaatggaaaggaatggaacggaaatgaatggaatggaatcaacccgagtggaatggattggaatggaatggaatggaatcaacccgagtggaatagaatggaatggaatggaatggaaacaacccgagtgcaatggaatgcaatggaatgaaaaggaatggaatcgaatgaaatgaacacgtgtggaatggaatggaatggaatagaatggaatggaatggaatggagtggaagagaatggaatggaatcaacccgagttgaaaggaatggaatggaaaggaatagaatggaatggaaaggaatggaatgcaatggaatgcaatggtatggaatggagtcaacccgagtggatggaatggaatggaatcgaatggaatggaatggaatcgaatgcaatggaatggagtggaatggaataaacaccagtggaatggaatggaatggaatggaatggaatggaatggactagaatggaatggaatggaatgaaatcaacccgattggaatggaatggaatgcaatggaatggaatggaatcacctggaaaggaatgaaatggaatggaatggaatggaatgaatggaatggaatggaatggaatggaatgaatggaatggaaccgaatggaaactaatagaatgtaatggaaaggaaacaaccagagtggaatggaatacaatggaatgcaatggaatggaatggaatgcaatggaattcaatggaatggaaaaaaagcgagggaatggaatggaatggaaaggactggaatgtaatggaatggattggagtcaacccgattccaacgcaatggaatggaatcgaatggaaaggaatggaatgaactggaatggaatggaaagaatggaatgaactggaatggaatggaatggaatggaatttaatggaatggaatggaatggaatggaatcaacccgagtagagtgcaatggaatggaatggaaatgaatggaatggaatggaatggaatggaacggaacggaatggaatgaacccgagtggaatggaaagcaatggaatggaatggaatggaatggaatctaccctagtagaatgttatggaatggaatggaatggaatggaatggaataaacacgagtggaatggaatggaatggaatggaatggaatgcaatggaatggaatagaatgtaatggaataaactcgagtggaaaggaatggaatggaaaggaatgaaatggaaaggaaaggaatggaatgcaacagaatgccatggtatggaatggagtcaacccgagtggattggaatggaacggaatggaatggaatgaaatggaatggaatggaatgcaacggaatggagtggaatggaataaacaccaatggaatggaatggaatggaatggaatggaatggaatggaatggaatggacaggaatggaatggaatggaatggaatggaatggaatggaatggaataaaatggaatgaaatcaacccgattggaatggaatggaatgcaattgaatggaatggaatcaattggaaaggaatgaaatgaatggaatggaatggaatggaatggaatggaatggaaaggaatcaacccgggtagaatggaatggaatggaatggaatggaatggaatcatcccgagtggaatggaatggaatagaatggaataaaaacgagtggaatgaatggaatggaatggaatggaaaggaatggactagaatggaatggaaaggaaaggaatttaatgcaatggaatggaatggagtcaacccgagtggaatggaatggaatggaatggaatgaaatggaatggaatagaatgcaaaggaatggagtggaatggaataaacaccagtggaatggaatggaatggaatggaatgaaatggaatggaatggaatgcaatggaatggagtggaacggaataaaaaacagtggaatggaatgcaatggaatagagctagaatggaataaacaccagtggactggaatggaacggaatggaatggacatgaatggaatggacaggaacggaatggaatggaaaggctagaatggaatggaatggaatgaaatcaacccgactggaatggaatggaatgcaatggaatggaatggaatcaactggaaaggaatcaaagggaacggaatggtatggaatggaatggaatggaatggaatggaatggaatggaatagaatggaatagaatcaactcgagtggaaaggaatggaatggaaaggaatggaatggaaaggaaacgaatggaatgcaatggaatgcaatggtatggaatggagtcaacccgagtggaatggaatggaatggaatggaatgaaatggaatgtaatggaatgaaatgtaatgtaatggaatggaatggaatggaatggaatggaatggaatggaatggaatggaatgcaatggaatggagtggaatggaataaacaccagtggaatggaatgcaatggaatggaggggaatggaaagaaatggaatggaatggaatggaatggattggaatggagaggaatggaatggaatggaacggaatggattggaatcgaatggaatgggctagaatggaatggaatggaattaaatcaacccgattggaatggaatggaatgcaatggaatggaagggaatcaacaggaaaggaacgaaatggaatggaatggaatggaatggaatggaatggaatggaatggaatggaatccacccgagtggaatgcaatggaatggaatggaatggaatggaatcaacccgggtggaatggattggaatggagtagaacggaatggaacggcatgcaatgcaatggaatcaactagaatggaatggaatggaatcgaacggaatcaacctgagtggaatggaatggaatggaatgaatggaatggaatggaacggatactaatggaatggaatggaaaggaaacaacccgagtggaatggaatgcaatggaatgcaatggagaggagtggaatggaatggaatggaatggaatggaatggaatggaattcaatgtaatggaaacaaaccgagtggaatgtaatggaatggaaaggactgcaatgtaatggaatggattggaatcaacccgattccaatgcaaccgaatggaatggaatggaatggaagggaatggaatggaatggaatggaaaggaatggaatgaactgcaatggaatggaatggaatggaagttaatggaatggaatggaatggaatggaatggaatcaacacgagtggagtggaatggaatggaatggaatggaatggcatgtaataaacacgattggaatggaatggaatggaatggaatggaatggaatggaaaggaattgaatagaatgtaatggaatcaacacgagtggaaaggaatggaatggaaaggaatggaatggaaaggaaagaatggaatgcaatagaatgcaatggtatggaatggaggcaacccgagtggaatggaatgacatggaatggaatgaaatggaatggaatggaatggaatggaatggaatggaatggaatggaatggaatctacccaattggaatggaatggaatggaatggaatagaatggaatggaatggaatggcatgtaataaacaggattggaatggaatggaatggaatgcaatttaaaggaatggaatagaatgtaatggaatccactcgagtggaaaggaatggaatggaaaggaatggaatggaaaggaaagaatggaatgcaatagaatgcaatggtatggaatggagtcaacccgagtggaatggaatggaatggaatggaatgaaatggaatggaatggaatgcaatggaatggagtggaatggaataaacagcagtggaatggaagggaatggaagggaatggaatggacaggaatggaatggaatgaaatggaatggaatggagtgcaatggaataatcaacaaaggaatggaatgcaatggaagagagtggaatggaataaacaccagtggaatggaatggaatggaatggaatggaatggaatggaatgcaacggaatggagtggaatggaatggaagggaatggaatggaatggacaggaatggaatggaatggaatgaaatcaagcagattggaatggaatggaatcaactggaaaggaatgaaatggaatggaatggaatgcaatggattggaatggaatggaatcaacgcgagtggaatgcaatggaatggcatggaatggaatggaatcaacccgagtggaatggattggaatcgagtgaaatggaatggaacaacatggaatgcaatggaatcaactagaatggaatggaatggaatggattggaatggaatcgaacggaatcaacctgaatggaatggaatggaatggaatgaaatgaatggaatggaatggaatggatactaatgcaatggaatggaaaggaaacaacccgagtggaatggaatgcaatggaatgcaatggaatgcaatggaatggaatggaatggaatggaatggaattcaatgtaatggaaacaaaccgagtggaatgtagtggaatggaaaggactgcaatgagatggaatgtactggaatcagcccaattccaatgcaacggaatggaaagcaatggaatagaatggaatggaatggaagggaatggaaaggaatggaaaggaatggaatgacctggagtggaatggaatggaatggaatttaatggaatggaatggaacgcaatggaatcaacacgagtggagtggaatggaatggaatggaaatgaatggaatggaatggaatggaatggaatggaacggaacggaatgcaatgaacccgagtgaaatggaatggaatggaatggaatggaatcatcccgagtggaatggaatggaatagaatggaataaacacgagtggaatggaatggaatggaatggaaaggaatggactggaatggaatggaaaggaaaggaatttaatgcaatggtgtgtaatggagtcaacctgagtggaatggaatggaacggaatggaatggaatggaatggaatgaaatggaatggaatggaatggaatgcaatggaatggagtggaacggaataaaaaacagtggaatggaatgcaatggaatagagtggaatggaataaacaccagtggaatggaatggaaaggaatggaatttacaggaatggattggaatggaatggaatggaatgaaaaggactagaatggaatggaatggaatggaatgaaatgaacccgataggaatggaatggaatgcaatggaatggaatggaatcaactggaaaggaatcaaagggaacggaatggaatggaatggaatggaatggaatggaatggaatggaaaggaatggaatggaatgaaatggaatggaatagactggaatacaatcaactcgattggaaaggaatgtaatggaaaggaatggaatggaaaggaaaggaatggaatgcaatggtatggaatggagtcaacccgagtggaatggaatgcaatgtaatggaatgaaatagaatggaatggaatgaaattgaatggaatggaatacaatggaatggagtggaatggaataaacaccagtggaatggaatgcaatggaatgcagtggaatggaaagaaatggaatggaatggaatagaatggaatggaatggaattaaatcaacccgattggaatggaatggaatgcaatggaatggaatggcatcaactgcaaaggaacgaaatggaatggaatggaatgaatggaatggaatggaatggaatccaccctagtcgaatgcaatggaacgggaaagaatggaatggaatcaaccagggtggaatggattggaatggagtagaagggaatggaacagcatgcaatgcaatggaatcaagtagaatggattggaatggaatcgaacggaatcaacctgagtggaatggaatggaatggaatgaatggaatggaatggaacggatactaatggaatggaatggaaaggaaacaacccgagtggaatggaatgcaatggaatgcaatggaatggaatggaatggaatggaatggaatggaatggaatggaatggaattcaatgtaatggaaacaaaccgagtggaatgtaatggaatggaaaggactggaatgtaatggaatggattggaatcaacccgattccaatgcaatggaatggaatggactggaattgaatggaagggaatggaatggaatggaaaggaatggaatgaactggaatggaatgggatggaagttaaaggaatggaatggaatggaatggaatggaatcaacccgagtggagtggaatggaatggaatggaaatgaatggaatggaatggaatggaaaagaatggaatggaatggaatggaacggaacggaatggaaagaacccgagtggaatggaatggaatggaatggaatggaatggaacggaatggaatctacccaattggaatggaatggaatggaatggaacggaatggaatgtacccaattggaatggaatggaatggaatggaatggaatggaatggcatgtaataaacacgattggaatggaatggaatggaatggaatagaatggaatggaatggaaaggaatggaatagaatgtaatggaatcaactcgagtggaaaggaatggaatggaaaggaatggaatggaacggacagaatggaatgcaatagaatggaatggtatggaatggagtcaacccgagtggaatggaatggaatggaatggaatgaaatggaatggaatggaatgcaatggaaaggagtggaatggaataaacagcagtggaatggaatggaatggaagggaatggaatggaaaggaatggaatggaatggaatggaatggaatgcaatggaaaggagtggaatggaataaacagcagtggaatggaatggaatggaagggaatggaatggaaaggaatggaatggaatggaatggaatggattggaatggaatggaatagaatggaaaggactagaatggaatggaatggaatgaaatcaacccgattggaatggaatggaatgcaatggaattgaatggaataaactggaaaggaatcaaagggaatggaatggaatggaatggaatggaatg

SEQ ID NO: 1579 - DNA, 1000 bp, Homo sapiens
  misc_feature (1)..(1000): DMR10:44392901
ccttcacctttctctgctgaaggaatggccttctcttatgggcagggagggtttcctagggaaagcccacccaggcaggagatgaggagagcagcatctgagcacacttcatcccacagtgcccatcccatgagtatcctccataaattacaaagaaagaaaaaaaatagggaaaaaacaaacctttatttctctgtttacttctctgcatttaatgagcagttgttaacatgactgaaaccatctgatgatttttaccaaatggaaaaatctgcctacaggggcaataaaataaatattcagaatagagagaggcagtcataaaagacattacccggttgtaaacggaggcgggtggtggtgatctattacccctgcctcggcagctttcaacagagttctggaattccaggaggggccctgacccaaggcaatatttacttctgcggcttcttcatcaggtcagcatgggtataattctgtctaccagttgactggagctgaggtttcgagcaggaagtgcaaaccctgagtgcttataactcaggaggagtgaggcaccccttcccagagtatgccaagaaaagcacattgtactgtcctggctgcaggggtgaggcccctgcacacccaggccattatcagctttgtgccctggccaacagcgcctctggttggtgcatttgtcagctgtattttaccctagagctctgggaggctcatccttttttggtataccaccacgtggagagagcagagttttaatagtgtggctgcttcatgcaccttggtagagctaattagacccagaagagatcttgaagtctgaatagaaatttaaaatcaaagcttaaacttgcaaagacaggcattccttccccagggaccaaacatgaagctgcctttagagatggccacagttgtgccagcccctataacaacctcagcgtacccagatgttagatagacccaaaagatcgcataggcaggccacaacagc

SEQ ID NO: 1580 - DNA, 1300 bp, Homo sapiens
  misc_feature (1)..(1300): DMR10:45082301
cttccactatatatttgtgaaaatgaactttaagctgtgtgtgtgcgtatgtttgtggcatgtggtatgtggcacatgagtaacaattttggggatgtggtgggggcaggtgagacaattagccaagtggctaggcatatcataggctttaaagttagataacttttgggtaagaataccttacttttctcaactgtacaagggagtaataaaattatttatttcataaggtcttatgaggattacttaagataattattgcatgtaaagtacttagtataatccctagcacatggtaaacatgcactaaatattagtcactattctgtgtctacatgtatcatcatcatcatcactattatcacctttgtcctcttatttcaaaatacaaaatgaattttacacccttcaaaaatagctttctttaggtttattttctaataggtatttactgcattagaaacaaattaaatggtgtgtgtgtgtgagtgtgtgagtatgagcataagtattagtgtgtaaaagtgctgatgaatgtatgtgtgtgtgtatgtgtgtgttttagtggatccaatctttaaaaactccgatccacttaaattaattgcttcatttgcagaactaatgcctcgtattaacagagaatgactcctttcccccttttaaatatacagatacactgtcgaatatgttgttacactccatgttaaaatagtgactaatatacaaggggccaatttagtaggaactcttaatcatgacttcctgcaactgggcccctgatggaagtatataattatgggtcagaaattgtaaataacagaacactggaaaattgcatgtaggccaatgccaatagaaatcagcccccaagctcctttcaatatagagtttaagaaattgaagctatcttaggtataatcttgcttcatctttgtctctcctcttccactttttttggactcccagttcaatctcaccatccccaaccaacagttcataatggccagaacccaccatccctccctcccttcctcctccctctctccctccttcccttcctccctctctccttcccttccttccttctttcctccctcatcccctctctccttccctcctttcctatccctttttctctttcctctattgcccttttttccccagtatatcaactgggcatatactatgtgtcaagtcttgtggtagattaagtggtgaatagcacagacattttatttgctttcatgaaatttacagagcagacattaaaaaaatgcacacataattaatgttaacg

SEQ ID NO: 1581 - DNA, 600 bp, Homo sapiens
  misc_feature (1)..(600): DMR10:45865301
ggtacacctcccagacggggtggcggccgggcagaggggctcctcacttcccagaaggggtggctgggcagaggcgccccccaccgcccagacggggcggcagccgggcggaggcgccccccacctccctcccggacggggtggctggcggggcaggggctgccccccacctccctcccggacggggcagctggccaggcgggggctgcccccccacctcccggacggggcggctgtcttgcggagacgctcctcacttcctggacggggcggctgccgggcggaggggctcctcacttctcagagggggcagctgctgggcggcggggctcctcacttctcagacagggcagctgccgggcggaggggctcctcacttctcaagacacggcggctgggcagagacgctcctcacctcccagacggggtcgcggccaggcagaggcgctcctcacatcccagacggggcggcggggcagaggtgctcccctcacctcagacgatgggtggccgggccaagacgctcctcacttcctagacgggatggcagccgggaaaaggcgctcctcacttcccagactgggcagcccgggcagaggg

SEQ ID NO: 1582 - DNA, 1100 bp, Homo sapiens
  misc_feature (1)..(1100): DMR10:46310801
gatgctaaggacagaggcgctctggaaaaggagccccgtgtttcagggacctggccctgtccccaggctctagaggcaggtgtggctccatttggcctctctggatccatgtctcctggcagggacgaggggctggctggggttagcctctcaggactgcagggctgagggatgggggagtcctggtgggcaccgagctgggaaggacaccagcccagtgagcacaggggccaggagtccgggaacaagttgtggctcacctgggtcggggacccaccccaggggccatgggcagtggtgagtagctgaggcaggaggccctgggcctgggatggggtgggaacaggcaaccctggccaagggtggcctctgcggtgctgcagagtggtctaggggaggctgcatctgcaaccaggtggatacggacagtcacctgcaaatgctgggaccattgcataacccccagggcaggcctctttcaacaagggcagccacgggagaaccaaggggacagagacaaagtcgttggcatttacgagaagagccatgtctgccaactaggaggagtttgcgtgtttttcacatgaaggaccctccactgtggtgtgggtttctttctggtcctttcattccccagacacacatctgggagtggccagcactgtgccctgccagcactgtgagcagacagttgtttttctttttttaggagccagagcaggaaaaaccaccatcaccaccaccaccgcctccgcctccaccacctccactcccgcctccgcccccagctcctgtaaacacctgccccactgtgattatttgttgctgtggatgccaaggagtgggcgggatgagaaggatagaggtgagaagggcacagtggagaggggctgtgaccccagcatgggactgtgggaggagggggcagatgggtcccactgtggagacctgggccctggaggaaggcaggctctacaggggctggactttggacacttgatgtcaagagcaaccagatgcccacctcaccctcgtgccccagtggcaggcatatatgagggctcctgtcccctgcaccaccgggtctgtccccacacatt

SEQ ID NO: 1583 - DNA, 1600 bp, Homo sapiens
  misc_feature (1)..(1600): DMR10:46519601
atggggttgtttgttttttcttgtaaatttgtttgagtcataatttgttttttgttgttgttttgctattttttgagacagagtctctgttgcccaggctggagtgcaatggcacaatctcagctcactgcaacttctgcctcccaggttcaagtgattgtcctgcctcagtcacccgagtagctgggattagaggcacccaccaccacacccagctaatttttgtatttttagtggagatggggtttcaccatgttggtgagacgagtctcaaactcctgacctcaggtgatccacccgcctcagcctcccaaagtgctgggattacaggcgtgagccgccatgcctgacaggtaatttgtatttctaactgtagattgtagtcaaagtttgaacgggtcagccatgcgcacaatgccagcctgcctacaaatgtagactggggcctttgactcatgcctgtaatcacaatattttgggatgtcgaggcaggcagatcacctgaggtcaggagttcaagaccagtctggccaacatggtgaaaccccatctctactaaaagtacacaaattagctggatgtgttggtccacaccagtaatcccagctactcaaaggctgaggcacaagaatcacttgaacccgggaggtggaggttgcagtgaatcaagatcatgccattgcactgcagcctgggcgacagtgtgagactctgtcccaaaaaaaagaaaaaaaaagagtaggttgggaagccagtaactaggaacaggctccatttaatccatcacaaaaagaggatttgagcagagaaggcaaagacaaacccttgggcaggcagcatctgctctgctggacaagctgttttcaaccatacctaatgatggaagcagggactacattgtccaaagcaaggatcttgggacccagtgggggctcaacgcagcaaagggctgctgatatgctcatctaagatcctgatgggtgcccgtttcttacagaactgtgtgctcacagctgtgctcagtgggccacatggtcctgcccgtctggccagcccatcttggttccactgtgttcctggagtccttactgctaggctctggctgatgctagcccctgtgatgggctgcccgccccacatttcccctggctggtctccactctctcggctactccctgctctgtcccataaaagcactcaaggcagccttctcatctagatcattctttaggcctggagttctttaatctgagggcttttgcacaccctgaattggatgcaaaagggggtatttgtcccatgtgtgtttttctgggaaaaggactcacaattttaccagactctcaaaagcatctgtgccctcagcaaaagccccaagccctgcctcaggaagcctgatctgctcaggctgggtgactatctgtccgtgtctgtcccccccaaagtggcgttcagcaactgatgctggggcaaactgccctgccatctgccagaatgtaaagcatcagctgtgtggaggatgggcggggggctggaccccagccaggccctttcaaaggcactaggggtttggctctagcatgcatccctgttgtgggtg

SEQ ID NO: 1584 - DNA, 1400 bp, Homo sapiens
  misc_feature (1)..(1400): DMR10:47681401
tttcatcttttgtgggaggtgggtggagatgaaagcaagcacaggggttggcaggcatacccctggcacctacctgtgagttcatgattactagtcttaaagttcagtcctttttatttttactttttttttttttttttttttttttagagacagtgtctcactctgtcatccaggctggagtgcagtggcacaatcacggcttactgtagccttgatctcccaggctcaggtgatcctttcacttcagcctcctgagtagctgggactacaggcacataccaccctacccagcaatttttttaaaaaattttttgtagcgacatagtcttaccatgttgcctagactggtctcgaactactgagctgaagcaacctgtctgcctcagcctcccaaagtaaagtactgtaattacaagcttgagccaccgtgcgtggccaaattctggccttttgatgttgcatggtgtggatggggaggcaaagtgtgatattttaggaatttgaggatttcttcttcgaccttaggcgtgacattggacaaatgacatctgggctgagacattttctagtaatgctggatccaaaaaactcttatcccattgtctcatagcttcattacacagacctggcggccatgatcctcttttttcccccttagttgccaaacatgggttctctgtcttacctcatttgagtcttacctcagtcttgagagtctcaaatgtgtatcatagtttttagacaaaattcaaccttatttcaattagtatttcattgttatttaaatattttaacaggaaaactgagcaatgtttccctttacctgttaatcctgttataatattttagataaagtgtattagaaggcacattcttcattaatagaatatttattcatgtgtttatatggttcttaactaggaataccatatagtctatctccaaccctttgagaaggaaaaaagatcctgactaaacaggacaccagaagggcatgcctaaactaggactgttctgggcaaatcagaaggcatgttcaccttattctttttattctttctttttcttttttttttttttttttgtgacggagtctcgctctgtcgcccaggctggagtacagtgacgcgatcttggctcactgcaacctccacctcccgggttcaagcgattctcctgcctcagcctcctgagtagctgggactacaggcacatgccaccatgcctggcaaattttttgtgtttttagtagagacgggggttttgtcgtgttagccaggatggtcttgaactcctgacctcatgacctgcccacttcggcctcccaaagtgctgggattacaggcatgacccactgcacctggcctcaccctattcctaaggccagaaaaccagct

SEQ ID NO: 1585 - DNA, 900 bp, Homo sapiens
  misc_feature (1)..(900): DMR10:48516501
ctggatgacagagcaagaccctgtctcaaaaataaataaataaataaataaacaaaacctataactgtttgccaacaaattagatgacttagataaaggagacaaattcctagaaaggcacaaactaccaaaaccaactcaaaaagaaatttaaaatttgtattactgaacattttaagaattaataccaaatgttcacaaactcttccaagaaacagaagaaagggaatagttctcaattcttcctatggagccaatagtcctccgatatcaaaaaccaagacatcacaagaaaactacagaccaatatctcttataaatacagataaaaaatcctcaagaaaaactagcaaaatagaatccaaatctactgatgaatggataaacaaaatgtggcatattcatactatggaatattactcagccttaaaaaggaatgaagtagccatacatagatgaaccttgaaaacattatgctaagtgaaagaagtcaatcacaaaaatacaatatatttattgtatgaaaacagtttcatggttgcctaggctgcagggctggggacgaggggacacggggagggttgtttctggaatgagacatgactaccaacaggcatggggtttctttccggggtgatgacaatgttctaaaattagattttggtgatagttgcataactctgtgactacattaaaaactgctgaattatataaattcaaattcaattcaattcaattaatttctataatacatgaaatacacctcaatacagctgtttaaaagagtccagtgataggatgtttagaagagccggcaaaagacaacttaggcaggataagcattagctacatagctggctgggggtgggcgatagggagagatattttaggggttcattt

SEQ ID NO: 1586 - DNA, 1500 bp, Homo sapiens
  misc_feature (1)..(1500): DMR10:49334301
agtggccacagacgcagtctgtgtatcctaggtcactccaccataaggaaagccacatcagcccatatggagagatggtctggaggggccctgggaccatatgtacgagagggtatactaggctggttttgtgtgtgtgtgttttttggttttttggttttctgtttttgtttttgttttgagaaggagtctcattctttgcccagactggagtgcagtggctcaatcttggcttattgcaacctccgcctcctgggttcaagcgattctcctgcctcagcttcccgagtagctgggactacaggcaggagccacgatggccaggtaagttttgtatttttagtagagtttcaccatgttggccaagctggtctcgaactcctgatctcaagtgatccacccacttcaccttcccaaattgctgggattacaggtgtgatgattgctataaagaaatacctggggctgggtcatttataaagaaaagaggcttaattggctcacagttctgcaggctgtacaggaagcatagcggtatctgcttctggacagtggggtgggggatctaaggaagtttccaatcatggcagaaggcaaagcaggggcaggcacgtcacatggcaaaggcagaagcaagagagagagtggtgggggagatgccacacacatttaagtgaccagatctcacaagacctcactatcatgaagacaacaccaagccatgagggatctgcccccatgacccaaacacttcccaccaggccccacctccaacactgaggattacaattcaacatgagatttgggtggggacatatattcaaagcacatcagaaggagaggtggccagccagttaggcatgctcatccatactgtttcagctccatccatgggctgacagagaccaggttcctgactcacaaagctgtgaaaagcaatgaagattgttgttatttttactctaagccactaggttttgcagtgctttatgacacagcaacagataaccagagccctctctttctcccagtctcccttccctctctaccctcacacagtccctgaaacctcacccttttccagccttctcttgtccactccctgtgggtcctgacctacagccttctcttgactacttcctgtgggtcctgacctacagccttctcttgtctgcttccggtgggtcctgacctgcagcctcctcttgtctacttcctgtgggtcctgacctacaaccttctcttgactacttcctgtgggtcctgacctacaacattctcttgactacttcctgtgggtcctgacctgcatagagccttctcttgactatttcccttgagtcctgacctacatacagccttctcttgactacttcctgtgggtcctgacctacagccttctcttgactacttcctgtgtatcctgacctacaacattctcttgactacttcctgtgggtcatgacttacagccttcttttgttcacttcttgtaggttc

SEQ ID NO: 1587 - DNA, 4400 bp, Homo sapiens
  misc_feature (1)..(4400): DMR10:50523401
tgtagcaagaaaaatgttctctattagtggggcaattgcaaacaaatgacaaggaaatgtccctgtttcttccaaaaagctcacttcagatagccagctggctatcaccctaacatgcatttacatttatttccataactcttcctcctactggcataacaaaacagtagagcctaccctaagtaatgaaagttagttgctcttcttaatttctcttgtttatgtgcatattcttagggatggagaaaagaatccttttcatataaatcattttctggtgtatttccatgtctacttataaccactgttgagaaaataattagaaaataaacagtcaaaaataaaacttgcaaccccagatacaaagctaatcaatattagcaaagaagaataatattttatcaaatactgtgagaaaagatgattttgtaatcacaggaaaatggagaacaagtctttccctgcacaagccagtagatttgtgctcaaggcacacgtgtgcacatgcgcacacacacacgcagcattccaaacacagtttgcagactgaaatgtgggacaccctcttgctacttcttgggcagaatttcttcatattagaaatccacatttcagctcatctaattcattttctcaaaaggaatcaatgcatgacaagttatacctttctttggttctacttcaggtcccctagatcttaaaagtgagcatctgatgtaaacaaaatgctttattgtccttttgtacccctcactgtccaggcattcctaatattcttggggctcttagaacagtcttttcacagatcacaatgtctcctgtagatcttgttgaattctgtttcctcaagtctgcatgtgtccagcaccctaatgaggtacaaattcttctgtgcaacccatttcccagaaatgcagtctgagcctctgggcttgataaaacaagacctccatgaactgctcccagtcccccttaccatttcgtctcctaacactttatgctccatcactagtgaaaaacttgtagctattccccttcatgaaatacccttttcctcctttcttctcttgactgtgaaaattttttcatgctaaccattcaaagctgggttagtgccccagccctatgctcacctttataataaataaacttcactgagtgcttttgatatgctaagcatggatgggcacttaacatgtatgatcttatttagtgctactactaagtctgtaaagtaggtgatatttattattatcagcccatttacagatgagcaaacatgaagaaagactacacagcgtcccaatgtcacgcagctggggagtgctggagccacagagctcataggcttttcattacaaacagcatgaaacatagttagttgaaaaattaacagcataataggtacttccaggcaaaaggcccagaatgtcaatggtgaccctatgacaacactgaaagggtaaaaataagatgagagtaactcatcagaatccttcagaagagggtgcaaaaagagacctataaactaacatcaacgatatgcccataataaagaccaaaatattttaccaagacagggtgatcagcaatttctaagaatcaagtaatatacacatggctcaagcaaaataatgtttaaaagaagcggtggaaataggaaagaattttcttactagggattagagaaaaagcattaaatcaaagattaagaagagctctcagaggaaagaatctggaatatttgaataattaaatcaattccatcctcaagaagttcttatactgggtaacaaatagcatcctctattggagttacatgttggctcctacacaaattgaatgagtgaagattagtgaataggaaaaattctgttgtaccccatctaagccctgtgtgccgcagatccaatatgcccgtttctggctctagattgtgaaggtgggtgtaaaggaggcatgaacaggaatgctgatgatgtgctccttccaaatgccacccagacagcctcatgaagagcaaggcagagaggatcaatatttcagtacaggcatcactcaagcaggttacccttcttcactggtagagaccaagatgcttggtctcttggaccttgactggaagatgttaacctcacttcaaaataaaaatcaagcaaagtcaaagttatcaatgctgggctctacacttcttgggaaaattgaaaaacagaaaagaatcaaaagtagaaaagtaaaaatcactgaaacataatttgaggtacgaaattcccagagaaagttttgtctagggaaaacaagggagactctaccacttaccatcattttaagcactactctgctatgagcaatggatagcatttttccatttccaccaaagacagagcagtgaaaacaactttagcctaaagcataagaatttcagctttaagacaatgactttctccaaagcaagacattttaactaaggagtctatagtttgtacacccatgacaaaggttgctatgttaattattaaaacgtagaactctcaaattggtattcctgtagaatatgtgatttttgcctcagaagttgcgataataatcaataatacaaccatttattgagtgcttcgctacaggccaaaagtcactcagggaggcctgaggggaagcccagctctgctagtgctgtgggattcacgtgtgtattagtctgttctcaaagtgctaagaaaactacctgagactaggtaatttatgaagaaaagaggtttaactgactcacagttccacaagcttaacaggaagcatgactggaaggcctcaggaaacttacaatcacggcagaaggcgaaagggaagcaagcaccttcttctaatggcagcaggagggggtggtcggtgggggaagtgccacacttttcaaaccatcagatgtcatgagaactcactatcatgagaacagcatgggggatatctgcccccatgatccaatcatctcccaccaggtccctcccctgacacatggggattacaaatcaacacgagatttgggtgtggacacagagctaaaccatacagacacacaatctccctgtttcaatgcacaacctcttgactacagggataagaccaatgcaaattaaacttacacttacaaaataggataataactgctttatgaggtttgagaaaggattcagtttagttaatcttatttaccctgtgcctatcatgtagcaagcacttcataaatgttagctattattactgccaaataattttaactttacttgggtcaacttcttcctgttattcaatccctgattctgttaaaggcaagagagggtgtttaggtcaatgagagtaatataacttcaagatgaaaaagaactggctggccgggcacggtggctcacgcctgtaatcatagcactctgggaggccatggcaggtggatcacgaggtcaagagatcgagaccatcctggccaacatggtgaaaccctgtctctactaaaaatacaaaaattagctgggcatggtggcatgtgcctgtagtcccagctacttgggaggctgaggcaggagaatcgcttgaacctgtgaggtggaggttgcagtgagccgagatatcgccactgcactccagctgggtgacagagtgagactctgtctcaaaaaaaaaaaaaaaaaaaaaaaaaagaaagaaagaaaagaaaaagaactggccatgtattcaaccatgcagctcatccacagccatccactccgtaagtagacattgacggtgtgcccatcaagcatggagcagtggggtaggcctctgtggggaaagtcaaaatgaaaatggtgcagcccatagcattgctcaaaggacatcatcaccttattgttaatcaccaacacttgtggaatattccccatatgccaggcagtgctgcaagcaacatgtgtgtatgtgttcatgcacacacttgtaaacatatatatttactcttttaaacctcaagacaaccctttaaagtattacttattatccctaatttacagatgagaaactgaggcacagagagaaaatataacttgctctcggttgcacagcctgtaattggcagagctgagattcagctcctggctatctagtttcagagtcttaggcacctagccacttgatacgctgcctctccctagacgtgtccgctaagaactagagtgagaacagactatgataagggcccagtaggaacataaataaagtgtggcgtttgtgggttacttgtgctatcttgacacataacaggaagaagaaaaggcctttaactacaaaatgatgtgtttaagcactccgtagcaacccagactgaaagtcatccaaaaaacacttgtgtctgtcaccttgaagagccatcttct

SEQ ID NO: 1588 - DNA, 1100 bp, Homo sapiens
  misc_feature (1)..(1100): DMR10:50818801
gcccctgaggagctaatatgcaagaggctccacagtgtctgaagggcctaggctaagagatcctccctttgccatctggatccactgcctatggaattcaccacctaccagctccagcctgctctctgctctgggaagctgttctacatggggtcctctttagccttctagattgtgattgcatttagccaatggggaacactggtaggaggttggagaagagacaacagtgaattcggggcatttattctgctggacccgtctttgagaggtcaccttgggctgactgtgtcctttgaccaaaatcactgcttctttcttttctcttttctttctttccttaatggtggggtctcactctgttgcccaggctggagtgcaaaggcacaatcatagatcactgcagcctcagcctcctgggatcaagagatcctcccacctcagcccccggagtagctgggactactgtagtagtccatgctaccatgctcggctaattttttgtagagatgaggtcttgccatcttgtccaggctggtcttgcactcctgggctcaagcaatccttctacctcagcctcccaaagtgctgagattacaggtgcgagccactgcacccagcaacttcttgcaaagagatctgctctacacaattctctcccctttcaggatttctattaattctccagccccttgtacctttgactccagaatgctgtgagccccaaattctgacactcttttttgatttccctagtccccactcgcacttttgtaattaattcctttgctatttgttttcttttgggaccctgaccgatgccagatccgataggtaacacagtcccacgtgcattatgttccagccaagttactccacattttcctgttctccaatcttgtcttgctcttctcaaattctgtgcctctaagacttcctgtctttccatattttgatttttgaaattatacccaattttcgtggcttctcttaaatattatcttctcatatccatgaagatgttttattctttatagcccacttcttcctttgaacttgctcaccacgtttatctctctttatgatatttacttgcctat

SEQ ID NO: 1589 - DNA, 300 bp, Homo sapiens
  misc_feature (1)..(300): DMR10:51470301
gagtattgaccattttgagtatcattcaaaatggattcatccacttgggcgtaatagtctaattctgaggggaatatttttctacacaatagctgacctatccatgcttcttctttcttacatacctcggcttttgacctccttaaccctaacatcacccactttccttcatgattgaaaatgttgatgatcctttctcttttctattttccttgattagcctgaaagttatctggcatcttaatgcatttttattttcacagtggtaactaaatcctaggtagcattcaatagtttttc

SEQ ID NO: 1590 - DNA, 200 bp, Homo sapiens
  misc_feature (1)..(200): DMR10:52359801
caaaacatgagcaggaggtaagagtaagaggcaatgctgaaagaaaagtggagaaagacatgaaaatatactaaacagttaccttaaaatatgttaaataagaattgtaaaaaagcaaaaggccgtaatatagtaagcttaaaagagcaagatgtagaatgatatgttttcaactattattctctttccagaaaaataaa

SEQ ID NO: 1591 - DNA, 400 bp, Homo sapiens
  misc_feature (1)..(400): DMR10:55205701
ccctcaacacacacacataagaaagcatattgcatgtattttggtgtttttaccttccgtattagccgttttcacgctgctgataaagatataactgggactgggcaatttacaaaagaaagaggtttattgaacttacggttccacatggctggggaggcctcacagtcatcgcagaaggcaaggaggagcaagtcatatcttacgttgatggcagcaggcaaagagagagcttatgcagagacccctgttcttaaaactatcagatctggtgagatccattcactatcacgagaacagcatgagaaagacccacccccaagattcaatgatctcccactggttccttcccacaacacgtgggaagtatgggagctacaatatgcgatttgggtgggga

SEQ ID NO: 1592 - DNA, 100 bp, Homo sapiens
  misc_feature (1)..(100): DMR10:55563801
aaaaaatcaggagctgaaaattaccactgaatgaaaattccataacctatcccccagagaatatataaattattctcatacataaactaaggtagttcat

SEQ ID NO: 1593 - DNA, 500 bp, Homo sapiens
  misc_feature (1)..(500): DMR10:56763001
actgccctattctgagcccataaaagcctcgaactcagccacacggagagaaactatccaactgtgggggcaggagaccacctctctccactgagagctgttctgttgctcagtaaaattcttttccaccctcctcatccttgaattgtcagcatatcctcattcttcttggacatgggacaagagctcgagatccaccaacacaggtacaagaaataacataagtagggtgaggcactcctggcccagctgtgggataagctagtgtacaagtcagactcagccccggtggatgagtgggcagggcacctccagtggcaggttgtgtgcccaagtgagaccaaggcaggggcattgttgctggccagaggtccccagctggcaaagaggccaagaaaaatgctgcatcacatgaggatttcaaaaatttgtgacatattcttaagaatacactgtgccatacaattgagtagggctgtgtgcatggcaagagctgtgct

SEQ ID NO: 1594 - DNA, 300 bp, Homo sapiens
  misc_feature (1)..(300): DMR10:64560401
gacttttaggtgattcaaatgtgaagcataggctttggaagatagatcgattgttggaaccacatgtaggagcattgactctagattaagacaggaggtaaactgaagaaatttaaattgcctttctgcttcctaggcataaacaaaataataaagtattttacaaaggataataaagtactccacggcaacaatgtggtaacagttacgtcgttgaagattaacatataatcccctacttaagagatatttttaaattaattatgaaggccacttgtaagagatgtgaagaagcatgcc

SEQ ID NO: 1595 - DNA, 2900 bp, Homo sapiens
  misc_feature (1)..(2900): DMR10:64679401
ccacaacctccgcctcccaggttcaagtaattctcgtgcctcagcctcccaagtagatggaactacaggcatgcaccaccacgccaggctaatttttgtatttttagtagagatgaggtttcactatgttggccgggctggtctcgaattcctgagctcaggttatctgcccagctcagcctacaaaagcgctgggatttcatgcatgagccaccgcacccatcccagttcaaataatttttaaattatcatcttgatttcattgctgacccaacaatcattcaggagcaggttacttaacttcatgtatttacatgattttgagtgttccttttggagttgattaccaattttattccactgtggtctgagagagtacttgatataatttctattttcttaaatgtactgagaccagttttgtggtttattatatggtctatcttggagaatgttccatgtgctgatgaatagaatgtatgttctatagttgttgggtaaaatgttctgtaaatatcagttaagtccatttgttgtactgtatagtttaagtccattgtttcttttttgactttctgtcatgatgacctgtctagtgctgtcagtggagtggtattaaagtcctccactattattgtgttgccatctatgtcatttcttagatctagtagtaattgttttataaatttgggaacttcagtgttagatgcctatatatttagaattgtgatatttttctgttggacaagtctttttatcattatataatgtccctctttgtcttttttaaacagatgtagctttaaagtttgttttgtctgacaagaatagctactcctgctcgctttcggtgtccatttgcatggaatatctttttccaccctttaccttaagtttatgtgaatccttatgtgttaagttagtctcctgaagacagcaaaaatttgcttggtgaattcttatccatcctgccattctgtatcttttaagtggagcatataggccgtttacatgcaatgttcgtattaagatgtgaggtactattctattcatcatgctatttgttgcctgaataccttgttttttttttttcattgtgctatgtctcataggtcctgtaagatttatggtttaaggatgttctattttggtgtattttgaggatttgtttcaagaattagagctccttttagcagttgttgtagtcctggcttggtagtggtgaattctctcagcatttgtttgtctggaaaagaccgtatcttttcttcatttatgaaacttggagtcactggttacaaaattcttggctgataattgttttgtttaaggaggctacatgtaagactccaatcccttctagcttatagggtttctgctaagaaatctgctgttaatctgataggttttcctttataggttacctgatgcttttgccctcacatagctcttaagattctttccttcatcttgatttcagataatctgatgagtatgtgcctaggtgaggatctttttgtgatgaatttccaggtatattttgagcttcttatatttggatgtctagatatttagcaaggctggggaagctttcctcaattattccctcaaatatgtttccaaagttttggacttctcttcttcctctggaacaccaattattcttaggtttggacatttaacatagtcccaaacttcttgaagcctttgctcatttaaaaaatttttttttctttgtctttgatggattaagttaatttgaaagccttgtcttaaagccctgaacttctttcttctgcttgttcaattctattgccgagacttgctagtgcattttgcatttctctaagtgtgtccttgatttccagaagttgtgattgttttttatttatgctccctatttcactgaagaatttttctttcatatcctttatcatgttttggatttctttaagttggactttacctttttctggtttctccttgactaggttaataattgaccttctgagttctttttctggcaattgagagatttcatcttgatttggacccattgctggtgagctggtataatcttttgggatgttaaagaaccttgttttgtcatattaccagaattgtctttttggctccttcttatttgcttagactatgtcagagggaagatctgggttcaagggcagctgttcagattcttttgtcccatagggtgctcccttgatgtggtgttctcccccttcctctaggaatgtggcttcctgagagcaaaactttagtaattgtttttgctcttctgggtctcgccacccagcagagctaccagtggaggtaccagctccaggctggtactggggagtgtctgcaaagagtcctgttatgtgatccgtcttcaggtcttacagccatggatacctgcacctgctctggtggagacagcagaagtaaagtggactctttaaaggtccttggttgtgtttttgtatagtgcactggtttcgtgttggttggtctccagccaggagctggcactttcaagagtgtatcaactgcaatcctatagggaggattctgacatgcactaggattctcaggtggtgggcagggccatagagtccccaagagattatgacctttgtcttcagctaccagggcaggtagcaaaagaccaccaggtgtcggaagggataggcgtgtttgagctctgcttctcattgggtggggcttgctgctgctgctgtggaggatggggtgttgttcctagtccaatggagctatgttcccaggggattatggctgcctctgctgagtcatacaggtcaccagggaagtgggggaaagccagcagtcactggcctcactagattcctatgcaaccaacattcctaaaggccggtctc

SEQ ID NO: 1596 - DNA, 200 bp, Homo sapiens
  misc_feature (1)..(200): DMR10:65414201
aattttaaagctgggtgtctggggaagacatcacatgtcggcaggttccatgatgccccctgagccataaaaccagcaagttttattagtgattttcaaaaggggagggagtgtattaatagggtgtgggtcacagaggtcacatgcttcacaaggtaataaaacatcacatggtaaatggaggcagggtgagatcacag

SEQ ID NO: 1597 - DNA, 100 bp, Homo sapiens
  misc_feature (1)..(100): DMR10:66031501
cacactggggacacatggacataaagatggggaaaatagacactggagcctccaaagttggggagggagggagagagggagtaaagggttgaaaaactat

SEQ ID NO: 1598 - DNA, 1300 bp, Homo sapiens
  misc_feature (1)..(1300): DMR10:69565101
gatgaacatagtccctgcccttgaggagatctcacagatcaatggacagtgcagataaacaatcactacactacctgcaaaatgctacaatattcacatgcacaggatattatgggagcagggagcaaggaaggaggcatagtacagagaaagctcccaggcagaggtgatatccatgttgaaggtttggggagggaaaaaaagagagaaggtttagacagacagaacagtgtgtgtgtgggatggggggaaaagcattgaaggggtacctgagtgtgtgtaaagggaaaacttcaagcaggtcatcacttctggagggtaaatatcaaggcaaatgaggcattgtgagaaagagactggtgtggcaggactctggccataagcatacctgacttttgatgatgaaaacaaataataatagcatatgtaatccaatttaatccagaccacgatgctgtggtagagtctgcccactgcctgccagaatacattcttcacgtcttctaggcacatagtcgctcttccagctagatgaggccacgtgatcatattctttttgtgaaatgtgagcagaggtgatgtgtgctacttctgagcataagttttaaggctgtgggtaagcctcctccatgccttatttcccctttcccctggctggaacttatggcaatgaaacttcaaccatttggttggcaaggatctgggagctggtggaggaagaagatgaaaggatcctagtcccagaatgatgtcatggagcagaggttcccacccacctggaatactcacctcagattgaattattagagagtctctcctacagcaaccaagctttaagcttactagaaccctaaaaagtaatatcgctatccccattttatggataaagaaatggaaagaaagattaaggaatttgtgcatgtttatactgattgttagtgaaccagctggaaattgagcccagattcatataaattcacagctcacactataaaattattcctagttagaacatcagctttatcctatgcaatgatgggaaaccatttgaagattaaacaggagagttacaatgttatattcacatattagatgggaactctggctgctgcatggagggtacaatgatgagtgtcaagattagaggtggggccagatgtggtggctcatgcctgtaatctcagcactttgggaggccaaggtggaaggatcacttgagcccaggagttcaagacaagccaggccaacatagtgggaccccatctctacaaaaattgtttttaaaaattagctgtgtggt

SEQ ID NO: 1599 - DNA, 400 bp, Homo sapiens
  misc_feature (1)..(400): DMR10:70066001
tttctgtaagaaaacaaagtttaggccagatgtggtggcttatgcctttaatgccagcactttgggaggctgagatgggaggatcacttgaagccaagagttcacaggcggggggatcacttgaggccaggagttcaagaccagcctgggcaacatagtgagaccccatctctacaaaaaaatcagctgggtgtggtgtacacctatagtcctagctattcaggaggctgaggtagaggattgcttgagcccaggaggtcaaagctgcagtgagccgtgattataccactgcactccagcctgggtgacagagcaagactctcaaaaaaagaaagaaagaaaacaaagtttacttccctgtcctgtttctgaagagttacatcaggtggataccaacaaa

SEQ ID NO: 1600 - DNA, 900 bp, Homo sapiens
  misc_feature (1)..(900): DMR10:70907301
accttctgacttgcccactccccctttcttctctgtcctgctggaagcttggtgtcggcacagggaggtgcccattgtactttaaccccaagcctggggaatcccacggtgggtcgtctctgtggccacaacctcttggcggtgcccaggagtcagtagcatgtcgtggactctctgagcctctatttctcatctgtccccaccctgccaggtgggagtgcccagatcctgggtgcagggagccagccatgtgcggccttgggtggggttattattctgcagcccttccacagggcccaggctgagctgcgggatgatcctcagcccagcaggccgacccatgggtggcagggaggctgtctgggtgggagagaggctgtgccttgccgctgtcattttttatcctcgccgaggcctgcagggcctttcccccatccccggctccgctgccttttctctctttagacaactgccctcattctgtctcccgctcgccacactgcctatttttaacttttggctttgggggaggtggaggaagggaggtcggttggtgtttttttcctctgtcctcctccctggtctcatgtcctttctgggtcctcctctgggggtcttcctcgccatctgacctccccaggctcctcacagcccttctgtcctgcctgcctccttgcctgctcctctcctcctctctctgcctctggactcttctgcccaggcccctcatctgcttctgtttctgctgcctctcccaggggaccctcgcaggccccatccctgtccccatggcttctcttcagtggcagcagtggcagcagttggtcggagcacttgctcttgccacaatccctcctgacagctagtggtggctgacacaggtgacctctccctttttct

SEQ ID NO: 1601 - DNA, 300 bp, Homo sapiens
  misc_feature (1)..(300): DMR10:73117601
tgatgtgaaaatgtttacatatgtttaagaaaaaaggctacaaattagtaggtttgatggattctaaatatacttatatatgtattgatgtataatagtaatcgcttagagaattccaaagtgtaaacagtgattatccctgagtggtgggattttgatgattttcttttcaaaaaattgacaattgtatattctgattattaaagattgactattttttactgttaaaataaggaaaaagtttgttttaaaataatctaaatattttcaactttgataatcatagcaatttctatgcta

SEQ ID NO: 1602 - DNA, 200 bp, Homo sapiens
  misc_feature (1)..(200): DMR10:73473601
agattgtaccactgcactccagccagggcgacagagcgagactgtctcaaaaaaaaaataaaaataacaaaaataataaaaaagcacaaaggtttgaggtgtgaaaaaggcctaatcttgttctgtaacatatggttacttacaggtattagattaccattgctataataatttgagagagaaaagggataaacattgca

SEQ ID NO: 1603 - DNA, 200 bp, Homo sapiens
  misc_feature (1)..(200): DMR10:74470801
cttatttttccttttgttgcccatgcttttggtgtcttatctaagaaattattaccaaattcattgctgtgaaacttttttctccagtgttttcttcttggagttgtgtagttttaggttttaaatttaattgtttaattcattttgagtttatttttatatacacaataaggtaagggtctaactttattcttttgcat

SEQ ID NO: 1604 - DNA, 2700 bp, Homo sapiens
  misc_feature (1)..(2700): DMR10:75529401
ttgtaggtatgaaatgtctcaaaaattttaccatcttaggtaactactggaggaggagttcagtgaaaacaagagagtaaaccagaaaggagatgttctcattagagggaaagggcatctccagggtcatgggcgagggagatcccagaaggcagcctggagtgccatcagcctggagtggttgggagagaaagctccaggagcatcttccccagcatgatgaaggtgctgtaacacctgatgcatctggacatcttgagaggtgacttaaaaaattggctaagaaattgttattgaattatcagtagagaattcttaactcctgggaaaataaaaaacgtgtaggaaagaattagttttttatatcttacacaattatagcatgaggaatataattatgaacacaaaatatggtctaactcaaatacaacgtatctatattggaaaaatggaggcaggaatagaaagggtctatgcttgtggcacaggaagagtgaaccacagtaggaaatcaatggctaatgcctaaaactgaaaaatcaagggacatggaggaaaataccaaagcatcagctcagagagatggtggaaggagaaatgagggggaaagaaagggaatagagatttatttttgtaaccatagaatttcttgattctttaaaacatacatatattttaggtagttacatatttattttacatatttatatattctttaaaaaatatataaaactttgtaaaaaaaataaagaagaaggctaaaaacagattaaaaaccttgagagaaacatgccagtgggattatgggtcctgcctctttatatagtttatatttctcaaatttctacagtgatcatatttagaatttgaaaaaaaaaaataacattgattgatgagaatgatggatgggaattctcggtaagtctccctggagtaatgctcacagtgactctcccaagggaggagttcttaactgcatcacagaattgcaggaattcagggacggcaatgcatggagcaccttgggtcagttgacaagtgacgaatgcctgtgagtccttcccagaatggagggacctgtgttgccccctccttgctgctgacctcagtgttgactcatccctgatgtttcctggctgtgaagggcacccccattcctcaccctgggttgctgtgccaagtggtgtgtatttaacttctttagaatccttcctcataaatcagcctgcctcactccttcactgtgggaatggcttttctctgcattccctcccactaggcccttggtttcaggtaatggctcactgagactggggaagaacatggggccacttgaaacaaagagttgacattcctctcctcaccattcctgagtggttttattgggagtggaacctaaaggtgggcttcagggattgatcctggaggacaggatctcagaaaaccattgttgctggtgcctgggctccttgccccttgtactgaactctgttgtctatagttccggcactatgggctttttggtaactaatagttcactattagcaatctcaatgagaatatttataatttattgaatggggactatttcaggctgtgttatatatcatctgttgtcacaacagctcacatttcacatctgggaagatagaggctaagcaaggtctgctctttcactgggcatgtctcttgagtgtctgtgtgtgccaggcactgtgctggtctctagggttacagtggaggctgggatatcaccagctcttccttaatgttgttagccagtgggtagacagacacgaccacagggaggtataatacagcaggacgagtgctgaagagaggtggcagagggggtggttaacacagtcaggtggtcgaggagaacttgttggacaatgcaggttagttctgaaggatgaggcgttattccaaaaaagagggaaggacagctggacagcaggagcagtgggagctgcactaaagtttcccttccttcacagactcgtggtgagtgtggccttttagggtcagcagagtctgagcaaacctgagggtctcaacagccagaccctcccaaccctgtactcccatcctttgttgctttgcagcaggagctgagtgattggcacaagaatatgtggtgatgactggtttgttttgtacaaagcctggttgtaagtgccacaggggtttaaaaatgaggtggtgtttgaccttggttttctctggctctaaagccagcactcttgttctctggacagggtcttttaatcacctagtgtatgttcagttttaatgtagatacaagaaatgagacatacatttcctgcccacaaggaatttacagtccagctaggccaaaaggaattggccttagaaagtaatcagtgatgctaggtgcggtggctcttgcctgtaatcccagcactttgtggggctgaggcagaagagtcacttgagctcagcctggacaacatggcaagaccctgtctcttaaaaaaaaaaaaaattggtgtgcacctgtagtcctagcaactcaagaggcagaggtgggaggatcactcgagcccaggaatttgaggctgtggtaagctgattgcaccattgcactccagcctggcagataagggaagactctacctcaaaagaaagaaagaaaaaaaaaaaaaaaaaaaaaggaaagagccagtgagcagtaca

SEQ ID NO: 1605 - DNA, 900 bp, Homo sapiens
  misc_feature (1)..(900): DMR10:76378001
ctttttaatccatgggcatgggatgttttttctatttgtttgtgtcatctgtgatttttttcatcagtgttttgtagttctttttgttagagatcttttaccttcttggttaaatgtatttctaggtattttacttttttatagctattgtaaatgggattgacttttgtattttgttctgagtttgattatttttggtgtatagaaatgctactgatttttgtaggttgaatttttattctgaactttactgaagtcagttatcaaatctaggagtcttttggaggagtcgttaaagttttctaggtatcagatcatatcatcagaaaacagagataatttgacttcctctttcccaatttggatgccttttatttatttcttttgcctgattactctagctaggacttccagtactagaataggagtggtgaaagtggcatccttgtttagtcccagttcttagggggaatgctttcaatttctcctcattcagtatgatgatggctgtaagtttgttgtatatgtcttttattattttgaggtatgttccttctatttctagtttgttgagggttttaatcatgaagagatgctgaattttattgactgttttttttctacgtctattgagataatcatatggcttttgtttttatttgtgcttatgtggtgaatcacatttattgatttgcatatgttgcaaatccctggaataaaacccacttgattatgatatattatgtttttgatgtgctacttaattcaatttgctgctattttgttaaggatttttgcatctatgtacatcaggagtattggtgtgtcttttcttttctctctttttctttttttttcttttttttttttttttgagacgatgtcttgctctgtctccca

SEQ ID NO: 1606 - DNA, 800 bp, Homo sapiens
  misc_feature (1)..(800): DMR10:76974901
cagacccattctttcctgaagtctgctaaaacaaattctactgaataatcattatattccgagtcatcaatccttggtgataaacttttgctgtctgtctcgaactgccggcttggtcagcccccttagttgtggtatcagtgcctaacattaaatgccgtgagtttgccactcctcagaaagacagatccacggcatttccttcggccgtcagcgacaccagtgaaaagtgggtgtttcaaatgttgttttactaaaatgaagggtatggagtgatggtaaaattcctggaattttacaacagtcgtgttgcaaaatgtaattcaccatgaacaaaactcccaagctgacctaagctctctctgatatgactgtttaagactttcaccagaaagtttgtgcaagttaactctcaaagtcttacggcatggccacaagagcgcagtctctggattggaggatggaatggtgcctggctgtttctcacacgaaccagacgggtaagagggtgtggttgtttccttaagcgatgatgggaaaacaaccacaaaaataataatacatgccagctgaacaacccatactgtgaatttggtagtatgattcctgtaaaggagcacttgactgctgtttcgggatggatcccgtggtggggaatgccatgtgtccatcgacgaggctgagctattaagcacagctaggatcaggcaagccaggcaatggagccaagttctacgcccagagagtagtgggcagtatcagggtgcaggggagttaaagtgggtgatgtccttggaatg

SEQ ID NO: 1607 - DNA, 800 bp, Homo sapiens
  misc_feature (1)..(800): DMR10:78324101
gtttactagtgtgtagaaaaaaactaattttttttgacttttgaatgttgattttgtatcccacaactttactaaatttgtttatctagtctaagagttttttttggtggagtatttagtattttttagatataagatcatattatccgcaaagagagaaaatatgactttctcttttctaacttgaatgcctttcacttctttttctggcctgattgctttggttagggcttccagtactgtattgaataagagtggtaaaagtgggcatctttgtcttgttccagttcttagaggaaaagctttcagcttttccccatttagtatgttaggttagggtttgtcatgtgtggccttttttatgttgaggtatgttccttctgtgcttagtttgttgagttatcatgaagggatgctaaattttatcaaatttttttgcacttactgacatataatatggtttttgccttcattttgttaatgtaatgtatcacatttattgatttgcatatgtggatttgcatccctgggctaaatctcacttgatcatagtgtgttatctttttaatgtgttgtaggattcagtttgttagcattttgttcagaatttttgcatctatttttatcagggatattggtctgtagttttctttttttgttgtgttcttgtctgattttgatagcagggtaatgctggcctgatagaataagttagaaagaatttactcctcttcaattttttggaatagcttcagaagaatttgtgttagttttttaaaagtttggtagaattcagcagt

SEQ ID NO: 1608 - DNA, 3500 bp, Homo sapiens
  misc_feature (1)..(3500): DMR10:79143401
cactcacccctctctccacagcagagttgtgggtcttgtcagatgctcttccccttcagcgtgcagctctagtcccaccttctccagaaagcctcccttgaccactctgaggtcaaccagtgtttcctaagcacctgtgttgtgccaaatgcagggctcgagtcagggtgtgcagagatgacagtggagggtttctgcgctgagaactggcagtccagatggggtggtggggggacaggtaaagaacccacaccttccagcataacagtgagcactgcaggtgcccagcagagagaacggccttgacttggtcaggaacggctgcacacagtatagctgccctgaacaaggccagaggccgggcaggtgtgcaaggtgtgataggggctggggggtgggggtggagagaagagtgtgtccaggcgaaggagactcgggagcacagtccagcccgtctgcagagtgagtgcggtctgacatggccaggacgtgagaggaggctcaggagacttttccaggctgagaattgaatggagccaggcagggacttgtggacctcctctccctcgggaaagtcagggggagatgcccctccaactctgcatcggggactagggcagcagcagcagctgctctgatgatgcatggctccgtggcagagcggtggcaggaggcttcgggtaatctcattagtgtgcccggcggaggggacgagtaatcccgtgcctttagactcacttttctttaagcctgtccctatccattctctccctaaatccttgtactgctttggtgacatcaggcgggactggactggacttacctccattgaactgatgggtaaaacagggttagagaggaaaattcttgcatgatgccatagctcacaaggggcaggaactgcatccgtctgactccagaacccatgctcttataatcctctactatctcccagactgtcttagactatccaggcttatagactgcctccccactggccccattttgcaggtgaggaaaccgaggcccagagaaggtaagacacttgcctagggccacgcagcaagtcaaggacagcactggcaccagaagctcacctggcctgtttgtgtccccaccccaccccacaagcaggcacagggatccccctggtccctgcccatttctgcctggagcacccactgtgcttggtcttcctgcagtctttggcaccggctccggtggaaggcaccaagttcctcatcagaaggctccattgtgcctattgtttaaatatagattactaatgaaatgccttttcattgccttcccagtgaatagtttccgtgtaaagttaatttgcagtgttatgtaaattctgtttaacttcaatcaagtttctaattatgtttttaccgcagtaattcccatttgatttgtcatctcctgttaggtattcaatgttcggtgggcgggcttgctttccgtctgcctctcagttttccaaggccctgacctcctctctgctgtgtgtctgtctccgtggctcctggcttcttcatccacttcggcttcttggtggctcatttcccacctcctcgccatccctccatctatctcctgccctccaccttccttctttcttcctcttgcccagctgcaccttcttccccttctgttttcttcttctctgtctcccctcctccctccttcctgccctctttccccctccccctctgtctgtgtcttccttctctgtatcttctttctgtatcttcctttcttctctctattccgctcatggccttgcctctcactcttcctccctttctgtgtctttctccactgacaagactctctcctgcctcctctgctcacatttccatcccagtgctcctcctctcctgaggtcttctctccctcctcctccacagtagagcctttcccgaagctgcattccggagtgcctgcgaggtgtgctgggctgggggctggggccaccagaggagccctgtgcagccctgagttgttggggtgggggattggtgaagaacacagagtctagggttggggtctccgggttcaaatcccaccccaccccttgttaactgtgtgaccttccggttagttcacattgatttctgtgctgcatccataaaatggggtgataattttacctgcctccacagtaaagcccttcccgaggcttcattctgcagccctgagacagtggggtgggggattggtgaagaacacagagtcatggagttattgtgagaagtcagtgagataacctatgtgaagggctttagcggagggaggggcttggccagaattagcctttttactttcttaagagacaaggtcttgctttgtcacccagggtggagtgcagtggctcactgcagccttgacctcccaggctcaactgaccctcccacctcagccttctgaatacctgggactatagatgcattccagcatgcctggctaatttttaaaatttttattagagacaaggtctcactatgttgcccaggctggtctcaaactcctgggctcaagcagtcctcccatcccagcctctcaatgtgctgggattatagatgtgagctgccacacccagcccaggaattagcttttatttgggaactcttggccatgcctttcattttttgcggccttcctgagatgcatctgcagtgagtttctggagtcctgggggtcaggcctgaggccagggaagggtgggagctggctgcagacccccatagagctggcatttcccgctccccactctccacccctcagccttcctcccctagagcagggtctccgctctgcctgtcaagagatgtggcgtccttctgtcttagtgggcccatctcaggctgtgaggacaagcctgccaccctggggtagtagcggagacacagatccccaatgctggaaaagtgctcaagactctggcccgcagacctttcccaagcaacagaccaaaggcagagccgctcctgctgagttggactagacacccccttcttctaccctccctcaccccctagatgccccaaaggctataatataccatggactccagctacaaaaccactggtccaggtgcagcatgttggcagctctgccatttatcacagggacttctctctgagccttggctcccctcctgtgtggccccaacgttgggctttgggattctccctgagtttggggattgtccctgtagtcagggaacggctgggtggccacagtttcccagcagacatctgccctctgggtggggagggcggaaggaaaacaccagacacaggcagggctggggctgggcgggtgctctgccccctccctctgctcccgcttccgccccgactctgctgggcttcccacccagcaaacccctggcacatccaggaagcagaaaacaagtgcttggggagggcattcttctgggtgaagaagggcagccggtcacttgtccttcagagacacagaagcctgggcca

SEQ ID NO: 1609 - DNA, 400 bp, Homo sapiens
  misc_feature (1)..(400): DMR10:80723401
tggatattagccctttgtcagatgagtaggttgcgaaaattttctcccattttgtaggttgcctgttcaccctgatggtagtttcttttgctgtgcagaagctctttagtttaattagatcccatttgtcaattttggcttttgttgccattgcttttggtgttttggacatgaagtccttgcccatgcctatgtcctgaatggtaatgcctaggttttcttctagggtttttatggttttaggtctaacgtttaagtctttaatccatcttgaattgatttttgtataaggtataaggaagggatccagtttcagctttgtacatatggctagccagttttcccagcaccatttattaaatagggaatcctttccccattgcttgtttttctcaggttt

SEQ ID NO: 1610 - DNA, 5300 bp, Homo sapiens
  misc_feature (1)..(5300): DMR10:82366501
catttcttgatttttccctcattgcttttcttaacgactcttcatgggtttaaaggaaatattatttttcctttcctacttaatcagcgtaacgggccataattgtgtcaataacatgaaattgttgtcgattttgcaattttgtgacacaatacaataggctgttgacttttttatttttttattttttttgcagaaaagaaaaatacactttcatgtgaaaatgtacacactgaaaattatagattttacttgtggaaaatatatgattcaagaaaaatgaagtgatttacttttttcttaattctttcccaaaatagttttctgaaagtttagctatctgtatacttcagtgtttaaaatatgtaggcactaaaattcttaatggcataaaataaaaataatctgctttacgaaagcctacagaaaataatttaaaaggaacattttttaaacgcaggatatgttagcagcgaatatggaacccaagataagcaaggcgtgttcgactctacctagacagtgtcagatctctggcagttagtacattgctttggatatgtagcttttagctgctctcctttgtaagttttaagaccaggcttgtttatgtataactattcaatgtcatacacacacggagacgtgcacacactctttttgtttgctcccatgatgatttatttaccagctgtaaaatggggatgatgataactgtccttcctggcagtcattggaccataatatatgtgaatgtcaattggaagttgtaaaatgccatataaatgcaagatattgtagctatgcaaaacctaaaattacctaattgattttggtctgtcccttaacccttataatgagagtgctagcaactaaaacaccttgaaaattactggagtgtttttatagccaatagactccagaatttatatagcacttagaactttatcaaactttctttgtactagtctgattatttaaagaagatctcactatataatgatgtctttaaaatatttaattttaaaaagataaaaatctttttaaaagataaatattttttaaagataaataagaatatttttatttccttgcagactctttaaaaagtgttgtctttttgtcttctgtttttcctaataattcttatttggtctggctggttggattcaatgctccactgctactagcagacaaattatacatattcttgaccgaacgtggtggctcacgcttgtaatcccagaacttaggaggctgaggtgggcagatcacatgaccttgggagttcaagaccagcctggccaacgtggcaaaacccagtctccactaaaaatacaaaatattagccaggtgtggtgatgcatgcctgtaatctcagctacttgggaagctgaggcacaagagtcacttgaacctagaaggtggaactttcaaggatgcaataagccgagatcataccactgcactccagcctaggtgacagagtgagactccatctctaaataaataaataagtaaataaataaataaataaaacatattctctgtgattcagttttcttatctgtgaagtgggaaaaacaatattactacttcccaggattatttgaggcttgatataggtaaagttgagatgcctggtattgagtaaacacagggaatttggggtaagtccagtataatatagtaagttacaggtattgttactttatctgcacagctttgttgacaggtcagtgtacttgtgtcagaacttcttgataggtactcagagtctcccagcacagtgagtcttgtgcagagagttcaatttagatccactaatgggaataaaagagaacaggcacagatacattatttaaaaacacaataataccagatcgtgcacaagaacacattttagaatcaaggatcattgtaattattcaagtagtaaacttaaaagacaggcagaaataggaggccaccttttgttaggggaatgctcccttttgacagttcctgaagaaaaaacatgggaaaaacactccttaccacctacagtttaggccattcctgctgttgacccttcagatgtgtccccgaactgcctcaccaggcacctgcttcctgcctgagagtttcactatcttgtgagggatgggacagtctggaagcttctcccatgcagacagagcagagagagaattatgcaatattttgtatcccagataaaattatatagtttaagtggattatggattatttcaccaaatttattttaaaaattaagaacatatccataaatattattttagccagagatgatctatcagtacaaatgtgaacagtaaccttggtaccacaggccccgccgtgcaagcttcttgggtaaatatttcaataaaaccttctcaaaacaggataaagatggctcagctgttctgtggactctgccgaggcaatgagggaatttgccgtgtccttctgtggtctgcccatctctggggctactgaaaggattcttcctccaacctaagtttcacagcatcaggcagcacttctgggttcctgagcatgctatttctttccaaatcacttttgtctgatcatcatttacaaacataaaagatggcttaagggccaaatcacaatttttatgcgtaaaccaaaatgtcagtgtttgtgtaccagactagggaggctgacaccaggttctacatgcttcgcctccccactaaactctctcctttattgtcccagtggttcaggaattcaaactgcttcaaaataagacatttaaactctggctttatgtactctacttatttttagagataggttcttgctctattgcttaggttgcagtgcactggtacagtcatggctcactgcagccttgacctcctgggctcaagtgatcctccttcctcagcctcccaagtcactgggactacaagtgcacaccatcatgcctggctaattttttaaagtttttgtactggtggggtctcagtatgtggcccaggctggtcacaaactcctggccacaagtgatcctccttccttggcttcccaaagtgctgggattataggtgtaaaccacggtgcctggcttagctcccaaaacttttcaggcataatgggaaattttaataactttctctgtaaaataagcataatccaaggatgttccatgatgagtatgacatatacttgacctaattataatttgattacactcaaattcatagaaaagcaagactatcatatactatgtggatttttcttaatgtaactttcaccagaatgtacaacctctgtattgttatccccactttgcagaaatcagctgtgagtttcctgagtcactcagtgctagcaggctttggatgataatgaaacgagagagttccctgacatatgacaggggtgtggctcacctgtttttggtcgtcccccagctgaaacccctgaaggaggggaagcatgcagaagggcagtgcagaggcgggggcaggtgctttggctccacagtggtgtctggaggtggatacctgcaaccctccacgttacaaagctctttcagttttgccatctgcagatggcttgagtgttaatcagctcagtggaccctctgctttatcgcaagggcagggggccagtgtgacagccttctgtatcccaagctcttgcccagtggctcagaagaattggatcacatgcaggctggaaggatgagtgcaaggttttgttgagtggtggaggtggctctcagcgagatgatgaggagctgaaagtggggatggagtgggaaggtgatattcccctggagtggggctgcccagtggccagcctcctccagtcaccccctgctgaactcccctcagcatccagacatccctcctcttctctttctctgccgcgtcgttctgccattgctgatctgctggtctgccctggagcttgtggttcagggtttatatgggggcaggataggggaatggaaagccaaaaggcaactttttgggcatgaaaacagaaatgcctattcttattcagggatgcgggcatctaggcttaaaggtggggcctttgccagggaaccaccctcttcaacccagtattttcccatttcctgtccgtatcaataaggtagaagagagcgccctaaaacccattcttttcactgtatcccaactctgtgtcagtgcacgttaacatccaactactcttttatttcgttacctatgtacctacgtattacttgagaaaactaaaaaattgacagaagggccaagcattccttgttttatagaaaaaagccaaagacagtgtttccagagtttatctcagagtaaatctctaaaaatatgtttatttttttaatgctcacagcgattctggtggctttatgaatatcaggaaaatatttctactaaaggcagcttaaaatccaccttacaaacacacacacacacacacacacacacattcacacacatgcatatacacacagtctgtttactaggtatctggcatcatgcaagacactgaggttcagtggcaaatgagaccaaaagttccttcttgtcaataacttgctataagagcactgggaagccaacagaatctagtgtggaagggaacacaatgggcagattctgaccatactgggcagtgaagctcatatttgggattatagggaaacgcattctaggctggtaaactgagggaaaatatcttcctcaactatataaaatccctcatgcaagttttatcaaatgagaaattaaggataaagtgaaaggaataaaaaagatgagagcattacacctggtttggggaatatgtttttagaaatatacatgccatatgtgaggctatagaatggcactttttgttctattttatgtacactcagaagtaaatgacaatttaatacattcttttatcattctgccaatgtttattaagcattttcaatgttccgagtccactgtaaagtggtaagaatatagtgatgaatgttctcagaaaaactcataagagaggggttgagttggatattttctacttcaattcaatatgacaagttctgtgatagatatgagctatgctcatatctgttttgtgttgctgtaaaggaatacctgaggctgggtaatttataaagaaaaaaaaggtttctttggctcatgattctgatagttgggaggttcatgattgggcatctgcatttggtgaaggtctcagggtgcttccactcctggaggaaggtgaaggggagcattatgtgcagagatcacacaaggaaa

SEQ ID NO: 1611 - DNA, 300 bp, Homo sapiens
  misc_feature (1)..(300): DMR10:83964101
ttcagtagatatttgctgaatgaaaaaagaaaacatcgcttgtctgtaatgtggaggggagtaaatggagtaggaccacagtggagaaaggcagatggccagaagactatcacaaatggtccaggtgagaaacaatggtttggagtaaggtgatagagagggagagctcaagataagggaagctggtgatatacagtgggtagggataagaggaatgtatcaaggataattctcaggatatagggtggtgaggttcattgagttggagaacactggaagaggaccaattctaaagaggaa

SEQ ID NO: 1612 - DNA, 300 bp, Homo sapiens
  misc_feature (1)..(300): DMR10:84345901
gaagttatgtctcctttgctattgaattagagtaagactttctacatactgctgtatccaagggcaaaaaaagtaatgtttagtagagctgcaatcataagaaagatttttcagtgatatttatttcttcacccaatagcttttattaagtgtctttttatgtattagaataatcttttttgagacggagtttcactcttgttgcccaggctagagtgcagtggcgcaatctcggctcaccgcaacctctgcctcccgggttcaagcgattcttctgcctcagcctcccgagtagctggg

SEQ ID NO: 1613 - DNA, 300 bp, Homo sapiens
  misc_feature (1)..(300): DMR10:84777701
acaattatgtgtgttggagttgctcttctcgaggagtatctttgtggcgttctctgtatttcctgaatctgaacgttggcctgccttgctagattggggaagttctcctggataatatcctgcagagtgttttccaacttggttccattctccccatcactttcaggtacaccagtcagacgtagatttggtcttttcacatagtcccatatttcttggaggctttgctcatttctttttattcttttttctctaaacttcccttcttgcttcatttcattcatttcatcttccattgct

SEQ ID NO: 1614 - DNA, 1100 bp, Homo sapiens
  misc_feature (1)..(1100): DMR10:86691601
tctaggggtggaaatgtctccggcctaggcctggagttagcactggggaagggcagacctgagggatctgagcctcctgtctctcatgagggaggggagtcactgcttcactgcgaccaatctgagcaccgagaacccaggtcatgcccatatctcaggttctcagacagcaatggataaaggcaaggtggggacagaacgataggggccaccaatgggcatggagcagggacccagcagggtgggaactgggctccagcctagccctcgcccacggcctctctctgcattacaggagcctccctattaaggaccttgccgtagacagcgcctctcccgtctaccaggctgtgattaagagccagaacaagccagaagatgaggctgacgagtgggcacgccgttcctccaacctgcagtctcgctccttccgcatcctggcccagatgacggggacagaattcagtgagtgcaggctctcagggtggctgcagaggagggagatgctgaggggccaccagggacctgggcccagcactgcagaagccagggagtcctgctacctgcccttgaaggtgggccaggcttgatggtttgtcagtggctggcagggctccttctgggcctctcaggcaggctgtccggtgacagcagccttctgctccaatgccaactccagcagtgggcagcaggcttggtgtgcaacttccgggcgagatgattgcccagggctgggatgaggccctctcaggctaccccctgactctttcccaatgtcctctggggcctctgcccagcacacagtggacaggcaagggggcagtcaccgtgtggggcctggctgaatcctggggactcagtgcccacagagccccagcagctttccttgctgtgtctcccgtgagtcccctgaccagctcctttctaccaacagtgcaagaccctgatgaagaagctctgcgaaggtcaaggtaagtgcctggactcaggctctgtggccttgccctctagccccgtccctccccgggcagcccccaggtcacatcactcatggaagggacctctcaagttcatggatttggaaagcctggcctgcaaag

SEQ ID NO: 1615 - DNA, 2000 bp, Homo sapiens
  misc_feature (1)..(2000): DMR10:87482301
ttcagaaacagactgaaatatttacaaataaaatcatgtgttgtctgggacttacttcaaaataatgtgtgagtgtagggaatgggcagggttgcagtagggacaggattggccatgggttgatggttactgaggctgagcgatggcatgtgaggttttattattttattgtttactttcatctattttcaaaaagttaaaaaatcagccctccctttgctgaaaaaagaaaaaaagaaaagaaaaactacaggttttgtccctgcctcctggagctttcagttgtagagagaaagcaacacttactgagaaactaaaagatgatgtgtgttgtaaaatgagagtgcagggtgacattgcaattgagcaagctatcttgaggtagagagagaaggtagtcaaagattttgttgacagtttagttagaactaaaattgatagcgccattgtactccagtctgtcacagactgagatattatctcttaaaaaaaaaatggctgggcttactttgggaggccgaggcaggtggatcacctgagcccaggagttcaagatcagcctgaccagcacagtgaaactccatctctactaaaaatagaaaaaattagatgggcgtggcggcacacacttgtaatcccaactattcggcaggctgaggcacgagaatcgtttgaatctgggaggtggttgttgcagtgagccgagattgtaccactgcactctagtctgggcgacagagcaagaatctgtctcaaaaaaaaaaaaaaaaaaaaagcctataaactaaaattgagagatgggtggacttgtgtgggagagagaagataggggcatatgccagacagaaagcagcatgttcaaaggtctgaagcatatgtacatgtatgcagtttacatcctatataagtcaaaattggatgtaaagtttaaaagttagctgaatattttgtttacatatgtcatagcgtttatctgaagctgagcagggtatatccacattattctttgccatgtcatctccaattacatgcaagtaaattcaacaagatttgttctctgtatgagggacgtaaagttgaataactcatggtcacttaagaaccttacagtccaatggtagagacagatatatttgtctataccttagcaaagtaaaacatgaaaagatctgtactaatggaatgagctggatactgtgagtgtatttaggaggagtgattagttacgccttattagaacaacaaaaggctcagagaggagcatgccactagagctgggttttaaaagttaagtaggacttgattaggtagagaaggggaaagagaggccattctaagcagaaggaacaacgtgagcacagactcagactcaaaagtacatattgtatccaaggacctgcaggtaaatgatgtggttagaacacaggcttaaaataaaattaaaaatggcctggcgcggtggctcacgcctccagaactttgggaggccgaggtgggcagatcacaaggtcaggagttcgagaccagcctggccaagacggtggccaatatggtgaaaccctgtctctactaaaaatacaaaaattagccgggcatgttggcacgtgcctgtagtcccagctactcgggaggctgaggcaggagaatcgcttgaacctaggaggtggaggtttcggtgagccgagatcgcgccactgcactccagcctgggcaacagagcgagacttcgtctaaataaataaataaataaataaatacaatttaaaacatctgttcagtgctgtgataagatgtcatttgcatgtttatatttttctttttttttttttgagacagagtctcgctctgtcgcccaggctggagtgcagtggcgcgatctcggctcactgcaaactccgcctcccaggttcacgccattctcctgcctcaggctcccgagtagctgggactacaggcgcccaccaccatgcccagctaacttttttgtatttttttagtag

SEQ ID NO: 1616 - DNA, 300 bp, Homo sapiens
  misc_feature (1)..(300): DMR10:87825101
agtcctcctacagctgttgattttaagttagaggtttgccctatatttcattccttcattttttgcttacttttccttacttagactgctgagtggattttgcacaagaaaaattaatttagtagatgaaagtgagacgctgaacaagccttgagatttgagaagtcaatactttgcatgtcttatcttttctctgcaaatcttaacctttttttttttttttttttgagatggagtcttgctcagtcgcccaggctggagtgcagtggcgcaatctcggctcaccgcaacctccacctc

SEQ ID NO: 1617 - DNA, 800 bp, Homo sapiens
  misc_feature (1)..(800): DMR10:88089501
agaacacaatcatgccttcttctcatgtttgttcacctgttttcaattaatggcagggacctagtcccttagcttagttggattggtacctgcaggataggagacacagccaggtgggtgggaggagctgggtcacaagacacattggagctcagttcttcccagcacagctgggctgggtgtttgccttggcacccagtgccactccactcagctctgacatgatggctggaaacactggcctggaataaagtgggaagcattcatgcatattgtgccaacagggtgctgcatcagctgttctagctactgagtgctagtcatctagccttttgcctttggtgcaaataattaggcttattatgggtattgagttgtcaaaaaaaggcttctgttttatgaccagcaatatttattaaacataagaatagtgctacaatgtggggtcttaagaagttattagacagagtccttgccctcaagaaaagactcataatccagtggcagggagagaatgtgagagaaatagagaaatagtattttcaggcagcaagtggtgagtgctacatgaatagaacagaagttaaacattcatggtggtcagcagaagaagacatgactatgtgctaaagtggacatgagatcaaagcttcatgaaagagggagaatttggtgtgggacttaaaggaagtccagggtttagagaagtggagatgagagttagaaaatgtcaggcagacaagacagttcaggtagaggctctagaggtggaaaggagatgtgcaagaagtaatactggt

SEQ ID NO: 1618 - DNA, 200 bp, Homo sapiens
  misc_feature (1)..(200): DMR10:90412601
tgtctcttaaagggctctacccagcaactgggttttcttgtgcctgtctgtgtatgtgttgtgtgtaatgtctggaaaagagctctagttaatttggcctaaagaaagacaactgcttgcatctaatattttttaaagggaggataaaagctgtggtacttttcagaaataaaagcagccttcaatcttgttggtaaaat

SEQ ID NO: 1619 - DNA, 400 bp, Homo sapiens
  misc_feature (1)..(400): DMR10:90990401
tttcatgtagttaaatttatatgtcttttcaaggtttgtgggcatttgtcccttagttaataaatctgtttctaactctacattcaagatattctcccacattgttttctaaaaattctaaattttttttcccttcacatttaaatttttgtccatctggaatttacttttgcttatgtgatgagtagggatctaattttatctttttccaagcagaaagttaattgtcaaggatgatccagactttcccgctgtttgaaatgtcatttctggtgttttttttttttttttttttagatggagttttgctcttgtcacccaggctggagtgcagtggtgtaatctcggctcacggcaacctctgcctcccaggttcaaacgattctcctgcctcagcctc

SEQ ID NO: 1620 - DNA, 100 bp, Homo sapiens
  misc_feature (1)..(100): DMR10:91567801
accaagtgccatagatgccattccaagggttactatggagagccagactctgcccatgggataatcagagatgaaggtgacggacatcagtttagacccc

SEQ ID NO: 1621 - DNA, 200 bp, Homo sapiens
  misc_feature (1)..(200): DMR10:92218701
aacctatagagtaagaacaatagagattgtcatagggtgctctatagcatgaagagatgctctcattcactccaggtcctgacctcacagcagttccacttccccaccttttctttttttttttctcttttcagacagggtctcaaatctgccacccaggctggagcgcagtggtatgatcacagctcgctgcagcctcg

SEQ ID NO: 1622 - DNA, 1000 bp, Homo sapiens
  misc_feature (1)..(1000): DMR10:93619501
actgcaacctctgtctcccgggttcaagcgactcccctgcctcagcctcctgagtagcggagattacaggggcgtgccaccacgcttggctagtttttgtattttagtagagacagggtttcatcatgttggccaggctggtctcgaactcctaacctcaggtgatccgcctgccttggcctcccaaagtgctgggattacaggcatgaaccaccccgcccagcctcagaatgtgaacctttcatcaaagtaatctatgtaaagaaaaactgtatgttcctgtggatccagcaaaagggatttccttttttgggaatctgtcacataaaaataaaagcaagaaggattagtgcagtattgttggtagtggggaaaactatacacaggcaaaatcagtaaaggacagttgagtggatcataaagcacccagggtggagtagtgtgcacaaatctaagaggtgagttcacatccatatgcattggtcttcagggaagtccctaagacattgttaagtgatgaaactattataagcaattagaaaaggaaattttagaaaaaatagaaaactctttgttcaagcatggagaaaggcataggagacacaccagcagttagcacggatttcttctagtaggctagattggaaggaactgggggcaatgataatttttgctttatgttatgacatatgggttgatgatttcaagtgcatgttttccctttgtaatgagagagaagcgctctatgaactgtgtctgtattcctagctgtgctctccttccctgcatgtacttgctgtctattgtaaccttgtgccttcccctctcttcctcttagcacctcactttccacttggctgtctgatcacctcttttcttctggcccaacctcagcctaacctaaataggccatagctcaggttggcagcgcttattctgaaatgggcaattccattctatgcagtcataggatggcaggtggagtgggattgtttactgg

SEQ ID NO: 1623 - DNA, 800 bp, Homo sapiens
  misc_feature (1)..(800): DMR10:94091501
ttcattatataactatagtctacagtacctaagagacaggtggaatttgaggattctagtgacagcaggagacaggggtataaagaaaaaaagactgttgagtttcttaggaattgaaaatgctcttgagatagttggcaatgaagagtaagaagccagggtcatgaaacagagtattagagtagtgaagaaatccaaggagcttcagcataaaaatgccatcaggagaggcccagtgggtggaaatagggaaatagtcaatagttaatggaaaatatagcaatagaagggggttatgggccacctgacaaggataatgagattgagctggaaactggaataggactggccaagctaaaaaaaaatcaggccaattagcaataatgagagtgtttattcacttgtagattggcaaaatacctccctggaatgaactaggacaaatgatcatttcctgtgctaatgattttatagcagaaaagaaaaagaaataccatagaaggtacagggaggtgtctgtgtgtgagccactgtaatttaataaccctaagaaatgtaagattaacggtctgatgcaaggaacggaaaaccaagataatgtatacctgacgagaattttaaaagcatgaatagtaattatgaaaaatagtcaataaacctcaagaatcttgtcaatgaattttttttaaaaaaggttaactgccaaacaccttttcagaaacacaaaatatgacaggattcaaaaaatcattttgagaggcacgggtgagaagaactaggtttttttccctaccccacct

SEQ ID NO: 1624 - DNA, 700 bp, Homo sapiens
  misc_feature (1)..(700): DMR10:95171001
gaccactgccccctcacagaagatgccctgtcccttgcctcacattccagcagggcagaggctggcacctggggcctcacagagcatccctctgagacttctgtgtcctggccaaaaaatgggcacttgcgtcacccagcactgacagaacaaggaggaagaatcaggacccaggatgttttggggaagtgtttagcacagaaaaatgctcagaatacaaacacgacacaggggaactgttcatgtgggagccaatattttataacctacagccctaatctgagcactctcacctgtgcaatctgaaagaaacaggggacttgcaggaaggatagtgcctggatttaacttgaagtaaaatgttggaattttcacactcctgatatccttccaaatcaactctttcaatgctcccatcctcaccactatcatgtggggtaactgaggcagtcagggatttactgactcaatgtcattcagtcatttctgagttcactgctgactacatctgaccaaacttgaagttcccgtttaatcttgccagtgacggtttttggcagctctgggacaaactccacctggctgaagataaagcaaatctgtggtgacttagtcctgctgtcatttcctaccaatcccctactctcctcctctgcccctccacagtctcccacacaggctaacaccatatggtggcctt

SEQ ID NO: 1625 - DNA, 1500 bp, Homo sapiens
  misc_feature (1)..(1500): DMR10:95770501
tacagagaggtgtgtaacttcctggtgctgatgtccatccagactgcagacattttctgtgaaagaaaagccagaggcctttcagggccaggaagtatggtctttttcaattgtgtttttctcaaaaagcttgctctaagattcacattgtgaagacagcccaaactccaggcccctacctactgttactcttcccagaactgccttatggcttcagagagcagatctgtttgcaaaactaatggaggattagggctggggaggagtagaagatcacatttcaaatgtggtgtaggtatctatgcatttggcattttaaaaagactcagtggattttagtgctagaagagacttaaatatcctcaaatctcttaattaaaatgaaatcaattgcatttgctgttttaattacaaaaataatacaagtttataacaaaatttaaaatatataaagaataaataagaaaataaaaatttgtgtaagtttactactcataactctgtcatatgactttttagtctttctcttgttccctctctttggcttactttttattgttttttagtatttattttctacaaatttggatccatgttatgcataccaattgtaatcctcaattttactttacagtttgtcgtgacaattgaatggcttttaccatatgatcttttaatggctgcatataatattccatcatttgaacatgtaccatatgtctatttaaccatttccttttgggaaacatttgagaaacttccagttactttccaaattatttttcaaaaacatttgcaagttattttccaaatatataattatattataacttctgtggattaatctcatttcacatctttgacagtttctttaggatcaattcctaaaagtagaatttccaaatttctttccaaatttcagcagtgtatgagtgatagaaacattgaagtcctgaggtgggaaggaatgtgctcatgttgcacaactggttggtggctgagtgtgcccagttcccttgcctttttgaaagagcccctctccttttcttcctaccatgctttctatagcatttcagcctccttttagtgatgtcccgtatgactccttggaccttgatgacatttaaccttttcctgaaaactcttggctcccacttatcccaaactagtcccccagtgtatctctgggcatgaactctgaacaattagagatgtcctttttcatgagagaagatgtacacttctcagatacattttctctttaggggtacaaatgttttcccattagtcaagaactgccacccattagatattccttcatgtatccgaaggcttcctggagttttcctgacttctttttagctttactgatcatatattttctctctaaaatcttactcactgtagtacagacatactttaaagttattgcaagttttgttccagaccgctacaaaggaagtaacgtgattaaaagagtagtatgaatttttggtttcc

SEQ ID NO: 1626 - DNA, 900 bp, Homo sapiens
  misc_feature (1)..(900): DMR10:96629601
ggcatggtggctcacaactttaatcccaacactttgggaggccaaggcagaaggatcacttgagcctaggagttcgagtccagcctacgcaacacagtgagaccccatctctacaaaaaaaaaaaaaaaaaaagacagaaaaaattagcaaggtatagcggcacctgactgtggtcccagccacttgggatgcagaactgggaggattgcttgggccaaggaggtcaaggcagcaatgaactgtgatcatgccactgcactccagccggggcgatagagcaagaccctgtctcaataacaacaacaaccaaaaaaaaaaaaaaaaaaaaaaagaagaagaagaagaagaagaagaagaaaggaaaaaagaaaagaaaagaaaccctggaaggagatataagaaattaatatcagtggttttctgggaactgaaaagatggggataagtaatacagaaagatattccactgttcatcttcttatattttagcttttcagcctattcgaaaaaataaagaaatgcagtattctgacatgtttttgttaccttattatccaaaaaacacacaaacaaaaaacaacctccttatttctacttcttcagtttatgtctcctggcatagtggacgcgttacataaatataatgtaccttgatgtcctccagttcagggcactacgattccaaatgaggaaccagtaaatgaatcccgcccgcctgttcttgtcaccactgaattccataacagactagaaagtttagggtaattgtactaatcctgaagcatacctagagatgcattcattattttaaacatattctgataagaactcacgcctaattcattctttaaaaattcaagaccagaaaaattctacttatatgagactttcagtttaat

SEQ ID NO: 1627 - DNA, 700 bp, Homo sapiens
  misc_feature (1)..(700): DMR10:96690901
gacgtgaggtatggaagctcctaggggctgtaattcttcttcttggagatgactcatcagagagaatgatgccaatattcggagacatagaaatgagaagtgaagaggtaactccagggagttccagtccttggctccaggtatctctgaggaccaactgcacccgttccctgcccatagcttgcttaattcctctttttcccaggttggagttccctccttccaagcaaacaagcacaaagcaatacattagcctttcaaagcaggcctcacatggagacagctgaggcttgtctgtacctccccgaaaccctcaaactaactccccactctccccacctcccgcaaacagcaactccagatgggtaaatggagtttgtgtataatacaagaaaggatgttatatcttgctatatggccactgttcgcaagggaaactcaagatgcaccttagagcaattgtgcccccttgctgattcatactgagcatgtggtcacctcagaacttgagctgtttttcatgtaaactgtggaagccaagcctttccctttgccatgctatgattgtacagttgggttttattttatgtttttcttggatgggggaggtggtgggcaaggcttgggacctaattgcaataattcaacacttaacttagttaaatgttatacgttggactggggccagtgttccagccca

SEQ ID NO: 1628 - DNA, 200 bp, Homo sapiens
  misc_feature (1)..(200): DMR10:96753601
caggaaggaaaaaatagaagctgtttgtcagagatataattgtattagaaaagtcaagagaggcaactaaaaaccattagaattggtaagagaggtcactatggtagcaatattggataaatgtaaaaggtatgattgacaatgatacaaacaggcacttgttttatttttctttataaatatcaactttcctttgcaaa

SEQ ID NO: 1629 - DNA, 1400 bp, Homo sapiens
  misc_feature (1)..(1400): DMR10:97027901
agatacattaagggggggcggaaatgcaaaggtgtaaaatgtagactagatgctgaaaaggctaaggtggacagtgaaagtggacactcggctatgcccaggtgtatgcaacaaaagctatgtggtcccagggtagcagcagcccttggtgcccagcagagacaagcacaaatgcactctggagaggagcatctccaacttagctcttcagagttcctaaagacatgtcagcaaaaatgagcatgcaaccaaaaattacccaacacagatggaaacaagcccctgtgaattcaagtcagtaggaacaataaacaacactgtcccaacctggcctatgtccagaggcaccacctccagcagggctcactcctgcctcctcccaccccactcaccctctgtatgtcaccatgggctttccaggagtttcctgaaactcagttccccacaattccctttctttacacaatgaagtgcaaactccctagcaggcacaaatggtccttcacaacagaattccaatgtccctttccagattaatctcctcccaccccacattcctgccccaaccaaacaccctttatcctatgctggacaacgcagcatccttgaacatcccattttttcatgttcatgcctttgcacatgctgttccctcttcctagaattcccttcctcactttctccaactggccaactcctagttcctttccaatgacagcataaatggtacctcctctgtgaagccccttggacttgcccagagttagtcactgcttcctttgaattctctttataagatcccaaatggtcacagtgggcagaaaccttgtgttagtaaattcttcagcactagagtcactctggttacccaggatgtatttattaaggcaatagagtaaagaataaatagcgagctttggaatcagacacacctaaattcaaatcctagggaagctgcctaaatttttagaacctaggactgtaaaatggaaataataaatcaaatcctaccacctgaggcagagccccttacccctcccacttccatggcagacattacaaatcaatcacagcacccctcccactgagtccaggtccagccctggaatcttcagtgcggtcctcaagacagttcctgccaatcatgtggagctggctcataacataaaacgcacttcccggttcaatcatggggtaatcaagaccttgtagatgaggcacagagtatagtatttgactcaggcagaccctcaaagggcaacacctgttactattttatctcctgaagtctaagattgtttgatgcaccgctgatttaacatgctttctgaagggtggggaacattaccatattaaatatacactctggttttagagtttaaaatgtagaaaaggtgagt

SEQ ID NO: 1630 - DNA, 3000 bp, Homo sapiens
  misc_feature (1)..(3000): DMR10:97058801
tccagggcaccctgagtgtgctctctgtacagacaaagtgctgtaggacctcgggtagtgaggcccttggtgagtgggagagggaggtgcttcactaccttttgtatgttttattgacagacttccccagtagatcctgaaggaagggaaatactgaaggaggagcgggcaaacactgtcctagcagcacccaccacatcttgggattcattacatttgggataaaagatagcaagttgtggcagatgtcacaactggagctggtgctcactggccctgcggtgactgcagaggcctcaggagcacagcatgctgggcttcgggcgggggacggggccaagatggttgtgcaaagaatgctgggaaaatcctcactgtggcagggagtgcatcccagttgccaggggcaacagctctgcctagcttctccacacttctcccgctcccagcgtcggagggtccaccagtgaggaagagggagctggaacagcaaaccctttgcagccaaaggatgacccactgaggctggggtgggcaggggctgtgtggaggggggcatagccctgctcctcctcctgcatccaccaggaccctgggccctgccagcctcctcaggggatgccctgggccactgaggaagccttggcactgctactcacagcgagttcagggagcggaggccctggaaggcgtcgggtgcaatctcagcgatctgattgttgctcaggtctctgcaaggtgagcagaaggagagggggcatctgaatccctcaacagccactaagccctgcccagtcccctccacctcctagatgtcacaggagcagggtggagtgctttgaaatgagaatagtgagaggccagatctctcctccatttgaaaagcccatggccgctatttccctgtgcagtctgagggctgggcaggagggggcactccagcttgggaagttatggacaaagctttcccatgcatcctggcagtctcctagccccctcccatccttaattgctcctattggtacccaagctgaaacgggaggatgacaagcagctcccatcacaggccaggctcaggctcagcactcccttcaggcctcacgatagccctgcaaggaggtccccgcatcacagccaagcagcctgaagggcaggaaggtcaggtggctggccaaggccactcagctgtggggggctgagttagggcctgccccagggctgtgggaccacccaggatctccgtcagccctgtaccagctccccaggaagcagtgggaggcactcacatcctccgtagctttctgtagggtgagaaggctccaggagggatggacttgatgccgttcagctccaggcgtctgcggggagaaaagagaggggaagcccaagggcccaggtcagcccagccctgggtgttatctgctgggctcacctgccctgaataatcctttggcccctcttgcccctgctcccttcccacttccagaagttgaagtctggggtaaggacgccgggacagacagagaaaatgctgacttgcgctccattatcacaggcatttgtagctgaaaggggcccacaaatgatgctgagaacctgattctagcagactcacgcagctgggtgggaccccagagggacactccctccccagccctccagagtttcccagccctggacacaaagctcagcccagcagaggcaaactgtgtcttctctacggccactgaggggttggggcaagccctgaggcagcgcctactccagctcttcactggccctccagagccaggcctgccaaagggctgtgccccagcatctgccctgccccgtactcacatctccgtcatggtctcgggcaggttggccgggatggcagtgaggccttttccacgacagtccacgatgccattgctgcaggtgcacatggccgggcaggagccggaggacagggtgcaggtgggcacgcgccccgcttctccctggcctgcagaaacaggggggtgtggcctcaggctgtcatgcatcagcacctcccttgagcccagataccgactgatggatgggatagggtgtacactggcagtttctctcgataaggatgaaccagaggggatcactaatgaaataagattctggactttgatataactctgtgggtgcctggcacacagcaggttcttgtcagatgtttgctgaacttgaatctgaactgaactgcactggtgtgtgattcatacactaagaaatcctggcctagaattctgaagctctggattctagtccaagtcacttaacacttctgagcctgagtcccctcatctctcccatgagggtgataatgtttcctaaacactcaagcacttactgtatgccacatgctataataagtgcactacatgcagcattgcatttaagcctaagaggagcctattattgttgccattctacagctgagaaaacagagtcctcgatattaattaatttgtagaaattctcacagctaataagtggtaaaaccaggatccagcccagtgtctgaaataagagcctttgaaaaaatggaggtataacttatacaaagtgttctttctgaagcatgtagctggtgggaccactacctagacatagaacatttccattacccaagaagattccctcctgccccttccccaaagtaaccaccattctgagatctattgccaaagatttgttctgctcgtttacgaacttcacataaatgaaacagtagtttctcttgtgtctggcttttttgcttaatatacaatctttgagattcactatgttgctgtgtgtatcagtagtttgttctttttcattgctgagtagtattccattatatggatacatcataattagttggtggatattcaggttgtctccaatttggggctattatggaaaaagctgcctttaatatttttggacatttttgcagaaaaaatgcacacacctagtaggagttggagggtcacaggg

SEQ ID NO: 1631 - DNA, 2400 bp, Homo sapiens
  misc_feature (1)..(2400): DMR10:97311601
tctacttttccattcccattgtcacccaggtagcaaggatggcacagtcccagaaatgggagaacttactgcttcagcctacatggagtcatcatcatggtccctgagacttggtcctaacatggccgtcttttacctatgatcaacataccatgagggggccgggcacggtggttcatacctattatcccagcactgtgggaggatgggctgagcagaacacttgagcccaggacttcaagaccagaccggacaacatgacgaaaccctgtctctacaaaaaaaatcacaaaaattagccaggtgtggtggtgcacacctgtggttacagctacttgggaggctaaggtgggaggattgtttgagcacaggtggtggaggctacagtgagccatgattgtgccattgcacaccagcctaagcaacagagtgagaccctgtctcaaaaaaatgtatatatatatatatatatgcatacacacacacacacacacacacacacacacacacacacacaccccatgagagatttattgaccccttgtcttcccatctcctcgttcttttgcaggggatagagatggggtcttgctgtgttggctggtctccaactcttgggctcaagtgataccccggcctcagcctcccaaagtgttgggattacaggcatgagccccgtgcttggcctattcacacttgattcctgttgtaatggtagatcttgctgggtctgtcatgacccaacatccatcacagaggttctcaatcactgagctgccagcctgagctgtaaccataaaaaaataatctcatgcttctctgtccttggtgtttcttggtttgtggcaacatgcttgacatggtgttctcctcatgtgtctgtgtccaaatttccttctttttgtaaggataccagtcccctcattaggtcccaccctaatccagtatgtcctcattttagtttgattacatctgcacagacgctatttccaaataaggttatactcacaggttctgggtagatagaaatttaggggaagctactcaacccggtacactattccagcctccaacctgaggggtgcatccctctgaactatctccctaacctagagacctttctccttttataaatgacaaaatatcctcaggcaatgctgtgttaaaaatactttaaaaaggccgggtgcagtggctcacgcctataattcctgcactttgagaggccaaggcgggcgggtcacttgaggttaagagttcgagaacagcctggccaacatggtgaaaccccgtctctactaaaaatacaaaaatgagccaggcatggtggcgggtgcctgtaatcccagctactcaggaggctgaggcaggagaatcgcttggagtccggaggcggaggctgcagtgagccgagattgcaccagatagcaaaacattctacactgctccatcagtgttagctctgaagccatctagtcattttaactactggcttccagacccaactgttctaactcccacccccactccccactgtctaaccagtggtttatctttcctgcccagtcagcagcttcaggacatttttaacttttgccttccatggcttcctcagctgctaatctactgagatacgtttattttattttattttttgaggtggagtgtcactctgtcacccaggctagagtgctgtggcacagtctcggctcactgcaacctctacctcctggtttcaagtgattctcctgcctcagcctcccaagtagctgggaatacagtggcctgccaccacacccagctaatgtttttttctttttttttttttttagtagagatgggatttcaccatgttggccaggctggtctcgaactcctgacctcaggtgatccgcccccctcagcctcccaaactgctgtgattacagatgtaagccactgcacctggcctactgagaggtgtttaatatctcatcctcatctcttagcatctcagtttgagtcccgtaacctctctctctttttttttgagatggagtttcactcttgttgcccaggctggcgcccaagggcatgatctcggctcactgcaacctccacctcccaggttcaagcgattctcctgcctcagcctcccaagtagctgggattgcaggtgcccaccaccatgcccagctaattttgtgtgtgtgtgtgtgtgtgtgtgtgtgtgtgttgttgttttttttttttaaatttgagacagagtctcactctgtcaccaggctggagtgcagtggcacgatctcagctcactgcaacctctgcctcccaggttcaagccattctcctgcctcagcctcccaagtacttggtactacaggagcatgtcaccacacccggctattttttttttttttg

SEQ ID NO: 1632 - DNA, 1400 bp, Homo sapiens
  misc_feature (1)..(1400): DMR10:98543401
taggaagcaattgcatcaactaacgagcaaaataaccagctaacatcataatgacaggatcaaattcacacataacaatattaactttaaatgtaaatggattaaatgctccaattaaaagacacagactggcaaactggaaaaagagtcaagacccatcagtgtgctgtattcaggaaacccatctcacgtgcagagacacacatgggctcaaaataaaaggatggaggaagatctaccaagcaaatggaaaacaaaaaaaggcaggggttgcaatcctagtctctgataaaacagacttaaaaccaacaaagatcaaaagagacaaagaaggccattacataatggtaaagggatcaattcaacaagaagagctaactatcctaaatatatatgcactcaatacaggagcacccagattcatgaagcaagtcctgagtgacctacaaagagacttagactcccacacaataataatgggagactttaacaccccactgtcaacattagacagatcaacaaagacagaaagttaacaaggatacccaggaattgaactcagctctgcaccaagcagacctaatagacatctacagaactctccaccccaaatcaacagaatatacatttttttcagcaccacaccacacctattccaaaattgaccacatagttggaagtaaagctctcctcagcaaatgcaaaagaatagaaattttaacaaactgtctctcagaccacagtgcaatcaaactagaactcaggattaagaaactcacccaaaactgctcaagtacatggaagctgaacaacctgctcctgaatgactaccgggtacataatgaaatgaaggcagaaataaagatattctttgaaaccaatgagaacaaagacacaacataccagaatctctgggacacattcaaagcagtgtaaagagggaaatttatagcactaaatgcccacaagagaaagcaggaaagatccaaaatcgacaccctaacatcccaattaaaagaactagagaaggccgggcgcggtggctcacgcctgtaatcccagcactttgggaggccgaggcaggcggatcacgaggtcaggagatcgagaccatcctggctaacacagtgaaaccccgtctctactaaaaaacacaaaaaaaattagccgggcgtggtggcgggcgcctgtagtcccagctacgcgggaggctgaggcaggagaatggcgtgaacccaggaggcggagcttgcagtgagccgagatcgcgccactgcactccagcctgggcgacagagcgagactccgtctcaaaaaaaaaaaaaaaaaaaaaaaaaaaaagaactagagaagcaagagcaaacacattcaaaagctagcagaacgcaagaaataactaa

SEQ ID NO: 1633 - DNA, 800 bp, Homo sapiens
  misc_feature (1)..(800): DMR10:100530701
tatcagagcaataaaaatgcatataagctgggagctgtggctcacacctgtaatcccaacactttgggaggcctaggttggagaatggctggagaccaggagtttgagaccagcctgggtgacatagtgagacttcgtctctttttttttaagttataaaaagtaaacaaatatggatatatactatttaatatataaattttgggaaggactacacagcaacttgctgtcttgtaaatgacatcactagttgatgttcagaataattgcacaacatctgcattcaaccaatagcaaaccctgatccaatttaggtcaagaaacagagttgatctaatttatttatttttattaagatattattcacataccataaattcacccttttaggccgggtgcggtggctcacgcctgtaatcccagcactttgggaggctgaggtgggaagattacttgaggttaggagttcaagaccagcctggccaacacagcaaaaacccatctctactaaaaatacaaaaatagctgggcatggtggtgtacacttgtaatcccagctactcaggaggctgaggcaagagaatcacttgaacacaggagatggaggttgcaatgagccgagatcacgccactgcactccagcctgggtgacagggtgagactgtctcaaaaacaaaaaacaaacaaacaaaaacaaaaacaaaaaaaccttttaaagtgtacagtagttatttttagtacatttacaaagttgtgcaatcatcatcactatctaaaacatttttattgcttccgaaaaa

SEQ ID NO: 1634 - DNA, 300 bp, Homo sapiens
  misc_feature (1)..(300): DMR10:100659101
gatatataaaccactgcactcttgagtcctgcctgccggctggactgaaagtcaaggttccccgggcctagcttcagtcctaccattactaacctgtatgaccttggccaagaccttttcccgtgctgggcctcagtttccacatctgtgagagggttgagccaatgccctcctaaattccttccagacctccaacgaaaagacccaaagatctgtgatctctcccccaacgacccgcgcttctgacccctccctcaccccctggtggtccagcctcagccccagacccacgcagtgcct

SEQ ID NO: 1635 - DNA, 200 bp, Homo sapiens
  misc_feature (1)..(200): DMR10:100722901
ccccttctgaaatgtcctagtgtctgcaggcctgtcctagggaagcctcattgacctctgaaggtcagggcagagcaaggagggctcttccaggagctggatgggacagctgagatcttgctggttccagggaaactcaagccacaagttgttccaggagctgtggtgcctggcatgttctcatctgaagggtatgtgtg

SEQ ID NO: 1636 - DNA, 300 bp, Homo sapiens
  misc_feature (1)..(300): DMR10:101009601
ttttttttttttttttttttttttgagacggagtttcactcttgttgcccaggctggagtgcaatggcacgatctcggctcaccgcaacctccgcctcccgggttcagccgattctcctgcctcaccctccctagtagctgggattacaggcatgtgccaacatgtcaggctaattctgtatttttagtagagacagggtttctccatgttggtcaggctggtcttgaactcctgacctcaggtgatccaccctcctgggcctcctgaagtgctgggattacaggcgtgagccaccgcgc

SEQ ID NO: 1637 - DNA, 4000 bp, Homo sapiens
  misc_feature (1)..(4000): DMR10:101470201
gataccattcatttgtcagatatatgtactctgattatatctcacagtctatggtttgcctgtttatggtatgttttgatgagaagtttctaatagttggatgaaatccagtttaccaatttttctttctttttttttttttttttttttgagacggagtctcgctgtgtcgcccaggctggagtgcagtgacacaatctcggctcactgcaacctctgcctcccaggttcaagcaattcttgtgcctcagcctcctgagtagatgggattacaggcatgcgccaccacatgctaatttttgtatttttagtagagacggggtttcaccatgttggctaggctggtctcgaactccagacctcaggtgatccgaccgcctcagcctcccaaagtgctgggattacaggcgcgagccaccgcgcctagccggttttttcttttagaagggatacttcctttggtcctacctaagaaatctttgtctaccccatgattgtgaagatattcttctaagttttcttctgggagctttataagtttactatttatacttaattctatgatccatctcaaattaattcttatacgtgccatgaagtagagtttgggcttcattatttttgccgtaatttcattcagttgtttcagcaccattgttgaaaagactttcttttcccccattgaattacatgaattcatttgtccaaaccatttagttatataagagttatattctcaaacctcctgaagaaaacgttgctgctggacccagagcagtgggtgacagtgcctaaggtactgacccatccctattttatgtccctgtagacaaggcggacaagaaaaatgataggtgtctatccttgcaccaaataccatagtgtcttgattattgtcattttatataatgggccatgaaatcaggtagtgtgagttctctagatttgttgttttattttttgttattccagatagttcacatttctatataaattttagaatcaaccttgcactttctattaaaaagcagtctgtgaggggctgggtgtggtggctccctcctgtaatcccaacactttgggaggccgaagtgggaggatcgctggagcccactgagttggaggctacagtgagttatgatcacaccactgcactccagcctgggcaacagaaagagaaactatctccaaaaatagacagacagatagataactactttttttttcatctgagatatataggattttgcccccgttattctgttaatacgacaaattaccttgatttttgttaagagtttttgtgtctgtttcatgtgaggtactggtttgcagttttcttttttaagtgtttgccaggttttggtatcagagttatgctggtcttataaaatgaattgggaaatcttcctcccatcctcctctgttttctaaaagcacttgtgtataatcctggtggtgtttcttccttcagatttcatagaattcacaaaccacttgggcctgtagttttctttgtgaaagattttttaaacttattatttaaatttatgtggcaagatgttttagagcaatttgaatttcttttagaggtatagagctgttcagattttctgtttcatgtgtcaattttggtaatttgtgtttttgaagaaatgtttcctgtttattcaacagattataatatgttaatatcttttattttaatactgtgattgtttcatattgggctactgaaagcctctttcggcaggcttccatgccccctttgacgtatcttcatcgttctgagtatttccatcttatagtttccctggtcagtcctggagtcaaccatatttccatgaatgtatgattccctttagtgcagaatggtatttaaaaaccaagattcaaacactgacttttcttttacatctatatttatatactttgaaaccattagttcacattgataactccaattctaattcaaccccacagggtttgttctagatttctttctttccatatttcatttttctcccttccttccttccttccccttccttcctttttcttttcttttcttttcctctcttctcttctcttctcttctcttctcttctcttctcttctcttctctctcttctttctttcttgtttttggtagagatggggtctctccctatgttgtccaggctggtcttgaattccagagctcaagcaatcctcctgcattggcttcccaaaatgttgggattataggcatgagccaccccacccctttcctaacataggaaacctggtttaagatttttttcctttcagcactttaaaaatattgttcccagctgggcgtggtggctcatgcctataatcccagcactttgggaggccaaggttgggtggatcacctgaggtcaggagttcgagaccagcctggccaatatggtgaaaccctgtctctactaaaaatacaaaaattatctgggcatggtggcgcacacctgtagtcccagctacttgggaggctgaggcaggagaattgcttgaacccgggagacggaggttgcggtgaaataaaaatattattcgcttgtctcctagccttcatttttttatgaaaagcctgacattatttatatcgttactcctagatacctaacatcccctttttccttggctccgttcaaggttttatctttatcactcgttttcagcagttctgactgtgatgggcctatatgtgttgttttctttgtatttttaacatgactggggtttgctgatctgaaatcagaaagccgctagttttcacaaaatttggggaagtatttgatcactatttttataacttctttgctgtaccgttctcttctcccttccttggactccagccacgcatatattctagataatccagaattgtcccacacagtgactaagaccgatcttttttttttcttttcttaatctcctttttttctctctgttcttcagtttatatgatttcagtttatctatctttttttttttcggtttatctgtcttcattgaccttttcttctgtcacttccagtctgctttttaagcctctccagtaaattttttgatttttttgagatagggtctcactctgttgctcaggctgaagtgcagtggcatgaacatggctcactgcagccttgaccttctgggctcaagcaaccgcccaccccagcctcctgagtagctgggactacaggtgtgcaccactatacccaactaatttttcttttttctctttttttttttttttttttttttgagacagaatctcaatctgttgcccaggctggagaacagtggtgcaatctcagcttactgcaacctccgtctcccgggttcaagcgattctcctccctctgcctcccaagtagctgggattacaggcacttgccaccatgcccagctaatttttgtatttttggtagagatggggtttcaccatgtttgctaggctggtctcaaactcctgacctcaggtgatctgcccgcctcggcctccaaagtgctaggtgtaagtcactgggcctggccaattttttctattttttgtagagacaggatctcactacgttgcccaggctggtcctgaactcctgagctcaagctatcctcctgcctcggcttcccaaagtgctgggattacaggcatgagccaccatgcgcagcctgaatttttcatttcagataatgcacttttcagttctagaatttctatttagtttatttttggtttttcattttctggtagaatttttcatctgtttattcattgtgatcatatcttttattgctatgttcaagtttgaacatatctattatagcttctttagagctataatatgtgctaatttctacaactaggtcttctcagggttggtttttggttcatttttctcttgacaatggatcccatttatctcctttttctcatttttagtaatttttgatcatataaccaacattataaatg

SEQ ID NO: 1638 - DNA, 2200 bp, Homo sapiens
  misc_feature (1)..(2200): DMR10:101641701
taatgaacctggccccagatcagaaagacatttgaagttgtaaatcagaaattaggtacgaggaaaccaaagcttatttatggaaaatcacattattgtgtatcaaaataatatatgagatgttacataagaactctataaacatatcactgtatagtatatcaatagacacacatgtggccaggcacaggcacagtggttcacactagtaatctcagcactttgggaggctgaggcgggtgggtcacctgaggtcaggagtttgagaccagccttatcaacatggtgaaaccccgtctctactaaaattacaaaattagccataagtggtggcacacgcctgtgatctcaactgcttgggaggctgaggcaggagaaatgcttgaacctgagaggcagaggttgcagtgagccgagactgtgccattgcactccagcttgggcaacagagtgagactctatctcaaaaaagtaaaataaaataaaatagtccacacatgtgtatgtgtttaggatatatgtctatgaatatatacacatttaaaaattgaagcaaaacatgacaagtggccaggcacagtggctcacatctgtaatcctagcactttgggaagccgaggcaggaggattgcttgaggccaagagttcaagaccaacctggccaacatagcgggaccctatctctatttttttttttaattaaaaaaaaaacatgacaagtatctgagcctcaggttcctctgaagtcccatctccttacaggcagccactatgcagagcctgccacagtgagctgccccttcctgctcctctccaagctacaacacccctctgggacttccaaattccaagcagctcttactctctataaaacctcccctccatcctcctgctcaggactttgtcaacagcccacacacctccccactgccagtctgtaggcaccaaattctacctctgaagcctccttggtaggcaaataacacagcatatttgctttctgggaaaagtctgcccctcgatgtttaatttcacctctttggaacattggaataaaggccaaacacatcatgagccacaggggagcactggggccagggcagtgcctgaatcaatgccatgcccaccatcagcgccaccaggccctcctttaaagtgccaagatttagggcagggctgggcgtgatgcctacactacctgtgatctgggggtacgcacatacatacatacctgtaaactaccaaattatagactactgatgcacaggtcaacttccctccctgccatcctccccaaataatataaaataaggtcaccttatctttccaacttgtgctactcctcagaaataggagaaggcagggctttgccaacaggagactctcatgagccacatcagccaaactagagaccaagaaagcatgtgtccgcccaggccactgattcctttactgctgagtctccacacctcacctcatccaaacaacatgggagcaagattgtaatgattagcgtatctacccttcaattccccacacatcactcctagcccaggcccagtaggtggctgctggccattgagccttcagttgccaactgtccaaggtggaaagctgtgctatggctcaactcccaggtgctgggatttggcccctgggaagagagagaacatgggcctagtcacagccttgggaagaggtacatgccctctgggttgtcctgaccttgccatcctttgctgagaaggcacacacacacatacatgcagccgcgtttgctcccttcggtaagagggcacccaggatgccgcaggcatatgcacgctttgcattacatctccacttgtgctaaggagcagatagcggtctgtgggcacacatgtcccacacaaggaaactccacacagatcctgtagacacactgtgcccacaggggtctctttacctaaacttactgggcagttgtgattttgcactagcccaggtgttaagcccctgcagttttctcccccttaggccagtctctgtccctccctcttccctcccacggtaagtgctttcaggccacacaatgagtggaaggaggagaaacacttctattgaggaaggcgttttgttgtttcatccctaagggggcctggggtagggaagtgggggggcccacaaaatttctaataagcagtttctctcctcaaagcta

SEQ ID NO: 1639 - DNA, 2900 bp, Homo sapiens
  misc_feature (1)..(2900): DMR10:101652901
ctccttgctccactgtctttatttctgaattgtcctttggtgctaatccctcacattatttcaactgttgtccctatgctgaggccttctacatctcaaccccacgtgtgagttccaggcaaccattcctgggctgtctctggccattgccacctgactgtcccataaaacaaaattcagtcttctcaaacccagtgcctcctccatcatcaggctcacagaggtactcgtctcttccctctctccctgatgtgcagtcatgtctgactactgattttttcctacatagttttcctgaatgaaagttgtcttcccactgtccctacgagtctggtcccttcctgctaacaaagtgtattcctggaaaagaacagcctgtctctctcctccaaagaatcctatatgctgtagcacaacataaaccatttaactgcttcaatctggcccaaaacggtccaaagttccctattttcctcaagttaaagtcaaactctgctcttcaacaccctccaaaactagactccaaatttcccctccagcgagccagacttgtccactctgaactcccaaacctacctttagcttccccatctctttgtatgcctttgctcagaccagtccccttgcttgaagttcccttatgcaatttcaatacaggcatcatgtaagtcccacttcaacttccatgtcatccatgaagctcttctgacttaataacaaggctacagctttcctctgatttcctgtcaataaccccagtagttgctagcacttacactgcatatataaccaaataaattatcgtttcagtacatgcattgtttccgcaattgcactataagctcctacacggtaaaaacaaacagtctcttgtgtttcatacttcccatgtgatcttgcacacagcagcattcaatacatccataagacaggcactcggggccaggcgcagtggctcacgactgtaatcccagcactttaggaggccaaggcaggtggatcacgaggtcaagagatcgagaccatcctggccaacatggtcaaaccccatctctactaaaaatgcaaaaattagccaggtgtggtggcatgcatctgtaatcccagctacttgggaggctgaggcaggagaatcacttgaaccctggaggcggaagttgcagtgagccgagattgcaccactgcactccagaccggcgacagagcgagactccgtcttaaaaaaaaaaaaaaaaaaaatccaaagcttatattatccttttaaaaaattctagtatgtttacttatttctttccccaaaaaaggtcccaagcatgaaaccatgtttaatgatacaaaagcaaatgtaagggaagatcttctgaaagtgttagaaatgttctcaaatggaattgtggtgatagttgcacaactttataaattttctaaaaatcatggaattgtacacttaaattgtacattttaaatgggtaaattttatgatatataaattctacttcaataaggctatttaaaaatagaaagtaaatgtaggtctatatatccttaattttaaaaattatgtaagaaaaaaagggagtattctctccatagctgcctgatattaaaatagacatttaaatgtaatttcttttttctaattataaaataggaccattataaaaaatttaaatacattaaaagtaaaaagtaagtaaacatcaacagaaatccaccatataagaaaaaaccctgaagagatatttaaataaactgtcatactattttctgaccttttttcattccacaatctgctatgacatcttttggttccataaatgtatatctgtgtcatccttttaatggctacatagcattttattgagggaacatagtataaaatattttatcagaaccctactcatggatatttatggtttcttttggttttgttacttttttgagacagactcttgctctgtcaccaaggctagagtgcagtggcacgatctcagctgactgcagcctcaatctcctgggctcaagcagtccccccacctcagcctcttgagtagctgggactacaggagcatgtcaccatgcctggctaattttgtttttagatttttttgtggaaatggggtctcactctgttgcccaagctggtcttgagctcttgggttcaagtgaacctcctacctcagcctcccaaagtgctgggatgacaggtgtgtgccaccatgcctggcctatttatgtgttcttaatgtaagtctttgtacatatatcttgcagaattgtctggttattgccttacaatgaattcctagaagtggaatttctgtgtcaaaaggttttcatgttttaattttgatactcattgacaacctaatgcaatttaaaaactctaacttttcctctttttattcttgaactcatccttatcagcctgcaaagaaggattttccggaccaaagacttctaacaactggaagaatcctttgaataatttgtggttttttttcctattaatttttgtaaattctcaaccacagctcaccctggatactagtaagagtccaactggcagggaaagaacacttcaaaggcattaacacatgtgtgtcttcctctttgccaaatgttacaaatctcaccatcatgcccagctgacccttctcttaggtcatttaccataggaccccaccctaatcactcacttgttctcttctcattcaggcacaggaggaaagacccaggtttctctaggacagctaaagctgcagctgcaacaaggcggaaaatagcaggagaaggaaacaccctgcatgagtcgagtccttgggagaaagagacagtgagtctcgtgctctggactggaccctctccagcccggaagggccatgatgccgtaagtctgg

SEQ ID NO: 1640 - DNA, 300 bp, Homo sapiens
  misc_feature (1)..(300): DMR10:102227201
gagaagctattgccacattcttcttacgccacagccctggtatgcttctaggagccccaaccagggagaagctattgccacacttcttacaccacagccctgggctgcttctaggcgcgggccagacagccgtcacccacctctaaccccactgagagagcaataatcacagaaaccttggacatagctcctgccctgtgctagatactttgtatacgttaatacccccaggagagatgtagtattcgcgctctacaaatgaggaagccaaggctcagagaattaagttggtttttccaa

SEQ ID NO: 1641 - DNA, 2300 bp, Homo sapiens
  misc_feature (1)..(2300): DMR10:103799501
ctccctgcttgcgtatcccctttccacacacagggaatgagccctccaggcaagggaggtggtggtgggggagcagcattcctttctcctgagattctgcaatgcaggagtgggtgggggaccataagggaagagggggaagaaaagttctgatttggaagtttccactggctttcaggccccctccagctcatcaatgagtcctttcagggttccctctccccaactgagttatcacttcctgtccagcacactgcacccattgatggggtatcagcaaaccccaccagattacactggaattaaggagactggacatgaattgaggagggaagaggaagaaggctggagagtagggagtggctttcaatcccatattcaatgggatattcaatcccacattgttggattaagaaaggatttgtaatacaggaagctaggtcacccttggcttgtctcataggtagggcaatgaggacaatgagatagaattaggtattgggggcaagcacacggtacccaagatgacctctccaagatgactgacaaccaaaggcctgccaagaaaggagtggaccctggctgtgagggtagaagtgagtgtctctttgtgtttttattggcctaaaccaggctcacaaccccgagaggaatctagaacatcttggctctacctgaaagggctgctgctcaactcacactgattctcccttctctagtacttgcctgtgatccgcagaggtgggctccctagtggccatgtctgtgctaaaagaccctcaactcccagccatactgattggtccagagagggcatctgacccaagccagaccaatcaaaatcgtccctgggatttttcaacttggaactgggagtcaatttcccctctgttgggagccaaaagatataaaattctagagctgctgacagccatattcctcagggtgtgaggtaacagaagctgagggcagtgccagagggaagcagagacaagacagagggagagcagatcctggtttcaggcattcctgaagcctctgcctcactgcccttctcaccatgtggtcggctgcacaagcttccctggtccctccttccaatcacatctcctttgtgtctaagccagtgcaattgtaaaactatcacttgcaacccaaagaggcctgactaacttagctggcatcaaggggggtgtctgcaggggtagctgtgggacccatactaccattcccttgtgaacatgcctttgtgtcttagagacacacacctaccacgtacatgtacaaactgggtggcaagtgcctcattcggtcagacagacaccgtggtatgtatgcctagtttgtgcctgtagttgaaaaaattgcttattttctgtttcggtcttccctgagtgtttgcttttctttgcctgcaatgatgcagtggcttctgtctcaccctggatgtttatagacacacgtctggtcaggcacacagcacctcccaccatcctcccgcctcttcaccacagtttcctaccctgcaggcaagggagggtgacaaagcgttactgttaagaccatcagaggaggccaacaaagtcctgagtgtctgcctgcagtatgcaagattgagacgagcccagctccaccttccagcttccctcctctgtccctctgctcccacctggactctgaccctgacagctctcttgggggctccctggataagcgagggtatgagagaggccagcccaccagagagacttgggccactgtccgagctctgacaaactcacctgcaggtcaaagaacttgctgtacctccggtagatagtctgggaggtggagtcagaccaggtcacattgattatgtatacctgtgggaaaaaggtaagagcaggtgagcaaggctggatttcaagctgtctgtgccaggcatcatgtaacatgactgcaggtgttccatatggcaggaccactcttttactcatctcatctgtccctaggggctagcacagtatcagctaccatgtagatgctacaatatatgtctaaatacacacacacacacacacacacacatacccctagagggatatttcatcaaatgccaacaatgattatcttaggaaagtaggatcagaatgagtggttttaatttccttctttttatttgtatatatttcatacaataaacataaaattgaggtcactacatttttgtttgtttgtttttgagacagagtctcattctgttgtccaggctagagtgcagtggtgtgatctcggtttaccgcaacctctgcctccctggt

SEQ ID NO: 1642 - DNA, 1400 bp, Homo sapiens
  misc_feature (1)..(1400): DMR10:104181501
gaacacctgactcagttctcattacatgtaaaataaaattcaaactctttacctagtttacaaagcccttcgttacctggtctcctcccactttgaagacctcacctcccaccactttctccctagctcgcttcaactgcacaggtcttttttaggtcctaacataccacacgccaagctctttccccctttgccctgaatactcttgctaccctcccattgtctttgcatggtggtgttctcttttaattcagatctcagcttaaatgtctgcttggagaggctatccagcccaatactatcacatcaacctatttttattcactgaatagaacttgttactatctcattgtttcttctgcatttgcttgtttatctgtttctccctgcccatctccaacccccaattaggatgtaaactccatggaagcagaaatttttctttcttgttcatggctatatcccccacagcctagcactctgtaggcactctataaatatttgttaattgaatgagtgaatactgttctttagctagacacttcctaaataatatctgtaatatgaaagtatagagagaccattttgaccaagcacaagtgtgggtagaagatttttttttccaggcaagcctggatcttgtactatggtttaaatgagatctgaaatgtactatttgcaattgctttgagaaaggctgaatattttctctcagacgtagcttattccctttttgaaaatcatgggatacctggataaagagaaatattactaaatatctgcttaaagaaaaccacaaaccgaaaacttctgatttacaaagaaagaaatgtaagcaagcaagctagtcatataggaactcaactgtgtgttcagaatcggatcccaaatctacggaaacttttggtgttgtgcttaaataatgattctccttgtccatggcgctgctcagggaaattaatagtttctggtaatagtccagaatttcactggctaggtgtcctccaaatcgcctatattaataaaaaagaaaacacagaggctataaaaatcataatttaaaaaatcacatttagctgtattattttcaggtaactaaccatttcagtttataggtaactaaccaaggaaatatgtggacaattcttcacagtgccttgtggaaacttcttcagtgcctacttcttttgcagaatttcttcttttttttttaatttttattttttaaagagaaagggtcttgctctgtcacctaggctggagtacagtgatgtaatcacagcttactgcagcctcgaactcctgggctcaaatgatcctttcacctcagcctctagagtagctgggactacaggggtacaccaccatgcatggctaaaggactctgcttcttacaggag

SEQ ID NO: 1643 - DNA, 3000 bp, Homo sapiens
  misc_feature (1)..(3000): DMR10:104536501
ttcccagggatggcccaaaacaggcgcctcgttttgggggctgtgactgcaagggcagaataatcccgccttgctaattacttcccaaagtgaaggaggagaggagagagggagggagggaggatccagaaccagggagagaagagagaattggtggtgggcaggagggggtctggagagggctctagaaggagctgggctctagaaggctgacagatgtggggtcagtccagctgtaggaatcagatgtgggatcagcgcggctggaggattaggttctgagtactgtgtctggagagtctccaaggagcatgtctccccgtattgtcccaaccctaacattttgtcctcattgaggtatacggtagtaaaaaaaatggcagaccctactccaccactggagtgagttaccttgggcaagccctgggttacctttggtaaggcctgttcctgtctccatgcctcagtttccttttctgataaatgaggctgggaaatgtgtcttttgtagaattgttatgaagattgactgagataatgcacgtgatttgcccagcactgtgcatgacttagaggagacttttaaaagctgttagaaaacctgtcctcccaccccctcactcccccttggagaccgagtcctagggattaagtattgccccttttcaaaatgcagaggcaaatgctcctgctaaggggtcctgccttttatcatcacaacttggctatctctctgtttccatgaatttgacttttttagatcccacatataaggaagatcatgcagtaaggctgggatgggaggattagggagataatggtcaaaggacacaaaatttcagtgagacaggaagaaggatatgttcaagagacctattgtacatcgtggtgactgcagctaataacaatgtaatgtacacttgaaaactactaaaacggtagattttaaatattctcactacaaaaaaaggatcagtattggagtcatgcatatgtttattaacttgatttagcccttccacagtgtggacctatttcaaaacatcatgttgtacagaatgcatagatatgatttttatcagttaaaaaaataacataaatgagttggctctctctggggcaggaggtgccacaggttcttatgtgtgttgtgggtgggtagcagaggaagcaaggtgaggagaaggtggtgctgaggaaaggtggggagagggccctcaaaaggaagcaggggcaaatgtgcgacttggcacttgccaaaggccagtctagagacatacacacaccctcacgcatgcacacacatatacgtgtgtgcccagtctaggagttttatgaagccttctgggaccattcccacccactgcctgcactagcccagctgacccaatcaaagtggatgcatttatatctggaagatgagatgtaagcagaggttcatgtgtcagtttctgggaaactttcttaagacaactggcacatgcacttggctgtaatttgtcatctgggaggttcgtggacattaattctgtctctcccatgaggtagaggctctcttaagtcaagaatacctcttccatgtcatgcccctccctctcacccagggtcaggcacagggctctggatatcatcagtctgcaatgatccataggccatggcttgatcaagtggtgtaagcagatgtcacctcataatgttttgaaattggctaagaattaattctgggcactgtctgagtgaagacagccccagtgttgaggaaataaggatcaaatttgataaaggaagaaacaaggtgcccacacttaccccactcccagaaggagacttacctctgggttcagctcccatttcttggccagttctccccattctattccatgtgataactttatttctaggtcccctggaccttcttccccttcccctcaaccctctctaaccaggaagaaggtgaaaaaggtgcctagatattagtaacactggtgtcagtggttacttaatgtcttttccttccagaggcctgtgtagggcaataccttaacccagaaggataggcatgggggagtcttcagccctgtctagagtccgggctctggaaaatcatgcaagagctctgtcttcacagcccttcctattaaatgcaatcctcatggcctatatcactgttttaattttacagtcaattgagttaatattcatgaaaacctgtcttctctacgagattcaaggtctacaggggcagaactatgcctacctgggcttgtcacttagcccagggcctagcacagaataagtgctaagcaaaggtttgttgactgaaaaatgagtgaaataaatgcattgatgagaagaacctgctttagtgctctgtgcagcgagggtacatgatacccaggaaagcagcctttcccagcctccaagaaggcttattcctgccccctctctataactaaaatgtctgatgtgcccagcctctgtgtgtgtgtgtgtgtgtgtgtgtgtgtgtgtgtgtgtgtgtttaaggaggggccaatagggaaagcaattaaaatattaattaatacaagagtacaagactatgcagtttgttcttttcctcgattgttcattcatttatcaactaataagcacgtgccatatgccacaatgtattgggcaatgagagggattcacatatgaacaagacattgtcctgtcctgaaggaactcacagcatagtaggaggaaaatgtaattgcagtaacaaccaccctaacagttataatactaatggtaatttttgaacagcccctattcgccagatcttgccatgcaccctttaagatattggcctgtttattttcctcaacaactctttgaggaagaaatattattcctactttatgaattaagaaatcaagtcacagagaggttaagtcacttcccagggtcacacagcaaagctctcgactctatgctttgctcttgtaatacaaaatagaacaggttgagtgttta

SEQ ID NO: 1644 - DNA, 900 bp, Homo sapiens
  misc_feature (1)..(900): DMR10:106738101
acataaatggggaagaaaaaactggagatacacattaaaaattcataattgtagtcacttttggtagagtttgggggttgtgggtaatagtcaaagggatccttatctttatcagtaatttaagaacttttataaggaagatgtatatatgcgattgtctaataattaatacagctgtactattaataaaaagaaaatattctccatctggaaaataaaatctaagtgggtagtaaatgtgagcaaatcacaaagggagagaaaaaaggatgagtgacatttctgtagggaggagacctgggattttctcaaatcttgaatacttataagtcagacaccatcttagtgagagggccaggaaggtgaaagcctagaagagttgtggtcagagaagcagtgctaaggacttcctggaggggtgtgcttgtgttgatgttaaaatcagtgtgagaggaaggaggctggagatcctgcgtggggccagaggggccacagtgacagaagacagggagaagagagaacctctccacttctcctctctttatccatttctgttaaggacaaagaacttcagactagagggtagaacaaatataagtttaaaggaattgctcagcgcagtggctcacacctgtaatcccagtattttgggaggctgagatgggaggatcgcttgactccaggagtttgagaccagcctgggcaacaaagccagaccccatctctattaaaaatttttaaaaaggccaggcacagtggctcacgtctgtaatcccagggtctcactatactgccccggctggtcttgaactcctggactcaagcaatctgtccactttggcctcccaaagttctgagatgacaggcgtgagccgctgtggccagccagggattgtttta

SEQ ID NO: 1645 - DNA, 2100 bp, Homo sapiens
  misc_feature (1)..(2100): DMR10:106830101
tatggtgggtcagtcccttcaaaggtcagtcagtcttttcttattatttaagagcaagaaaatgtctcaataatcagtgagatttcatgaatttcatactccatagccttttccagtgttaagcaatcctgagtcaggaggacatgacttctcgacactgacactgttttttcctatagagcctctcagctttagccattggtcaataaattattcactcggattaaataaattgcttttaattaccttctctatgaaggtctactctatttcagaattttaatcttattatatcatcatgacaactatgtacaatagggattattatctgtctttgatgaaaatggctgaacttcagtgacttattcaaagaaatttaaaaaatttcctgataaatggacagctagaaattgaattcaggtattttcgcctaggccccatgttgctttcattatacctcagctttttttttttttccttttttttttttttaaaaaaatttaaagaatatagggctgggcacagtggctcacgcctgtaataccagcactttaggaaaccaagacgggtgaatcacttgaggtcaggaattcgagacaagcctggccaacgttgcgacactccttctctatcaaaaatgcaaaaattagcctggcctgatggcacatgcctgtagtccgagctacttgggaggctgaggcacaagaatcacttgaaaccaggaggcagagactgtagtgagccgagatcacaccactgcactccagcctggaccacagagcaagactctgtttcaaaacaaaacaaaaaaaggccaggcacactggctcacacctgtaatctcagcactttgggaggctgaggcaggcaggtcacgaggtcaggagtttgagaccagcctggccaacatagtgaaaccctgtctctactaaaaatacaaaaattagccaagcatggtggcagtcgtctataatcccagctactcgggaggccaaggcaggagaactgattaaacccgggaggtggaggttgcagtgagccaagatcgtgccactgcactccagcctgggcggagtcttgtccagagcaagactccatctcaaaaaaaataaataaataaataaaaaggacatagacataaaatgatataaaatttcctctcagctttcttttcttaggagattgtttgtaaaattcattcattcattcattcacatttgtagcactcctaagacttaccagacagtgttgctaagtgtaaggacatagcacacagcctctactctcaagtatgtcacaattttatttgaaagaaagaaatataaacaaatatttagaatatgttaagtgcaaagatagagatatgagttaacaatgcttagaaattaaagttgatttaattcgaaaaacacaaaaattgtaatcatcttaattaatttctgaaactggtaaaagttacaaattcctataggccataacgactaagcagaattgcatgttaacaacctcactaccatccattcagtatacacagtggaccaaacactggagcaagaaagctgcataaaagtgatcctggagctaggaattaaggatttattctggctggaaattcaagatatttcttcctaaaatttatacatagatggcaaacagaaaacggtcaacacttcagaggatttagatgccattcctaatcgctgaggaacaaagtactacgcaaaacttcttgaaagaactatgaaccttgaaaatgggtaagtttagaaaacaaaattagaaagagcatcacagactagatgttacctttgtaacaaaaatatatacctggcttatttcaggaccagtctctgcactactataatcaaacacacattagcttgatagtcaagaatatttgaggagcattccagagctatttcacaggatatcttattaatgaatcacaacaaaacttcttaacatcttccttccaaatctatctttttctccaaaattcatagcttgtttgagggaattccctggtattctctaagaaatatcgaagaattctttcctagcccagtccactttgttttcgcttttttttttttttttttc

SEQ ID NO: 1646 - DNA, 1200 bp, Homo sapiens
  misc_feature (1)..(1200): DMR10:107123001
tctccacccacaatttcccctttctttttttcactttgttaaaacatctaaaaatcatgaggcaaagacaaactggcaaaaaaaaaaaaaaaaaaggaagaaaatgaacaaacacaacaaaactgaatgaagcccaaagtgtctgaagagccaaagcagctcccaacttacaagggggtatatggtaaacattctcaatgatgttgcatctccccagtaaataataaaataattggtacttgtattcacagttttgcccacatctgatgttgaaagcttagactagatgaactaatatgcatatgtaataaagcaatatagaagataaccatactgttcaataaacagtaaaagaaactaaaatggactggaattatttgaatgttaattcttgaaagtaagttcaattacagaaccttgcagtggatagatggaaagtcacaaggcagaaccctttgaaagcagggaatatgtcaaaattagcccagtacttagcacaagagagaaacacaataaatagaatgtatcataagttaatgctgcaaatataaacaagaaactgagatgtgtccagagttgaagatgatatattggataacttttagaacgcttaatttaactcaaaatgtaaggattttcttttacctacaggatacagcttagtgtttaaatttgcaggccctggagacagaaaataagggtctaaatctatgctttgtcatttactagctaggggacttgaacatattacctactggaagcttcagttacttcatttgaaaatggagacaaggttgcaaggtgtggtggctcacgcctgtaatcccagcactttgggaggccaagaagggcagatcaggaggtcaggagattgagaccatcctggttaacacggtgaaaccccgtctctactaaaaatacaaaaaaaaaaaaaaaatgagctgggcgtggtggcgggtacctgtagtcccagctactcgggaggctgaggcaggagaatggcatgaacctgggaggcggagcttgcagtgagccgaggtcctgccactgcactccagcctgggcgacagagcgagacttcgtctcaaaaaaaaaaaaaaagaaaagaaaatggagacaatgcaaactgtgaaggttagagtgagaattaaataatatatgaaaactttttgtaccacgcttcagtgctagtgtgtttac

SEQ ID NO: 1647 - DNA, 1500 bp, Homo sapiens
  misc_feature (1)..(1500): DMR10:107919501
taagagcaaagagattcacaaatatacgtcatagtgaaaatgctgtaagaaaaaggcaaaaagaaaatcttgaaagaaacagtccccccagcactgtgtaactactctacgaaaatataatcaaattgtcttcataagaggatctctgttggggtgatcagacccaacaccagatcgtgggggtgacaaagtccagcggggttaaaggattgagaaaaagacagcttgagagagaaaaaaactaggaccagagagccatccctagcatatggaaaccgcgaaagcccccagctctgggagcccacgctatttattggtaagccaacagagaaacaggtggtgagaatgtggagctcaaaagtgcacgttgcattaagcacatgatttacagctgtgatggtttagcatctgctctgctacttgagataatggagagcaggttcttttaactcaagatacaatcaatcctgggagagcaaggagcaaggagccagcaagtctagacacattgcagagccacgagtcctggattctatccaggccacgagggattttatgccctgggtttagatgatggtgcgtcacggtagactcccaccctttagcacagagcttggtgttccaaaggccacagggggttttagaccctggaccccggacatgttccaaaactcctttacattatgtcagacatgtaagccctgcctcggcttctcccaacactcagcttttcccaatagatctctgatcccattccttcttactgggcaggacctgccaatcagggttctcagccaccctgccagtgctcttctactgatggagatttgaaacctccctggatggagatgccagaggtagtgacaggctgctatctttggtgtttggatgacatagctattccggccttcagactctgggtagtccaaggcgactggggactgaggtgcacccctggcacagaacaactaccctataaaaatgtggccagactgcttttttaaagtagctccccaatcccattcctcctcaccaggcaggacctttcaactggggtctccagccacctcctaaaggtgcatttcagccatcaacaggtctgtaccttcttgggacagaactctcagagcgagaggcaggctgctatgtttgctgttttgcagcttttgttggtgatacccctaaatactggaaaatctgaggtgactagggactggagtgggcccctagtctatcacagcagccctacagaaaagtggccagactgtcaaattggtgcccattcctgtatcccctcactgggcaggtcctccaggcctgggcctccagtctcctgccatcagagctattgagccagtagcaacttggcaactccctgaacagaacctccaggggcaactgaaagcttctctgccactgactctgcagtggaactctccttgctaccctcagactaaccaacgaacaaagaccctaagtgccttatccacatctccaaca

SEQ ID NO: 1648 - DNA, 2600 bp, Homo sapiens
  misc_feature (1)..(2600): DMR10:108783201
cctctactcctaaactccttgtgtgtgtcagtgttctaaattttcctagcatgagatgacgaaccccaggtatacaacacagacaacgtagctgtttcatattggggacctcatccaggataccaagttacaacagtcatcaaaatggtgagtagaggagtgaactccaactctgtcctttcattttggggctcttggactccattttaaaaccaaatcaaaccaaatactgggccacctttagccatttaaaaatgagtagcatggatgctagccttataagacttaggggacaggcttgctggggagaacatagagaatgccccagtacccgtgtgttgctgagcatgttggccatatttgtatcagcttcctttcatggaagacagccatcacttgaggctggaagaggttctggggcaactgaggatttctggctaccccccggtgttatccaaagacatctggactgacaccagcctccaactgccttatggggtgtcagcaacaagatctccaacttttctatcataatttcctcctttcctttccgcaaccaccatatcgtctatcctctctgtgtatgcaatgtgtgggaagttttacggttcagggaagtaatcttgttaggcaagatcagggaatgcatagtaactggggaagggaaggcatctttctgattttctacagagggtcccctccaccacagtgagcatcactctttgcccttggtctagagagcacaagtcattttcagattctctctgccctcgatctggagagtgcatcacacttccaggtctctctctgcagttggtctggagagcacatggcatttctaggtatctctttgcctttggtctggagagcacatggcatgtcaaggtctctctcccattggtctggagagtacatggcatttcaaggtcaacagcaccacctagtggaagagggaacctgtccatgaggcacattgtcagtcctttacctaaatattctatcttcccaattatcttccccttttgctcctttctactagaaattaggcttcatgttgcttctataaaccagaaaatcctgccttcaacaactaggagtaaaatattctccaaagccaaattttagtcttgatactgttccatagcaggaaaatggccatttggtccctccattcttttaaggcacctattcctcctcgaattagaatggtacttaattagtaaggggattttaagtttggaagttaaccagaaccattctctaagggtaaatgctttagtatgctatactaaatcatatttaaatttagcatactaaattatctggctataatagcaggatacagacctcaaaccagtatacttccaccattaaagaaggaagtgcaaaagttgcccaaatgtaattgtcacatagtctctcccaagatccattcttttgaggagccaggcgggtcacacaagtctaggaagtcaaagggaaatcacaggcagaggactagatctgcatgggtgagtgtgactaatcccaatatcttagttcctctggttccatggctgggggtcacacctggaacgatgggcattgcatctaacaaggtgcggggacccaggaaccaaggaaggaaaacagcaggggggccgtgcccatcgtcttcctctccaccctgggtcacaacaaaaggaaggagactaaagggatgcctttttctcacttctctttctagatgggtaagagattatcttcagcctatacccctctggagtgcattctgaagcactgggattcctttgaccctatgactttgaaaaaaaaaagtggctcattttcttttgcacaagggctttaccttcttaccctcttgaaccagcctggcctttggaagggagccttaattttaatatccaacaggtaggtcttttctgcagatgggagggaaaatggtccaaggtaccttatatacaggctttctttgccctgtgagacaacccagacttttgcaagtgttgcacaatcaacccagcccttttagcaatagtattaggcagccccaaatggaatgattccccaagactagaaaagcaacttctggggaaaccacctgaggcagctattgagtccgcgagcccttccagtcccccttatctaagaccacctccaacaatgccaccagctcttccacctctgccatttccaaaattctccactcccccaccctcactctgacccagacaggaagtgcccaatggaggtgatgtcactaggattcaagttcccttctcattgtatgaccttaggcaagtaaagggagacttaggctgattttctgaccctgacaggtatatagaggccttccaaaatgtaactcacatattttacctctcatggtggtatgttacgctgctcctaagccaaactctaaccataactgagaagcaggcagctctgcaggcagtagagaaattcagagaggagcaaaatgtctcctacagtcggcctaagaggaaaggagaaaatagggaaggcaaagagataatggaaacaccattctcaaatggaaaaggaagtagaaggaagtagttcctctagacaatgctaat

SEQ ID NO: 1649 - DNA, 1600 bp, Homo sapiens
  misc_feature (1)..(1600): DMR10:111441401
cagcaggaggagctgggatttgcacacagtgagtccggccatagaacctgagatcatagtcattattctctcaaggccatggggtagttgaggatttgcattctccctggggagatcagttaagctagaagtagaggatgaagaaatggaggcaagatgatggtgtcaggaagggggagggacctgggctaaactttgggcatggatgtgtacagggtggggagaagctctgcacaggtgggtagaaaaggttccagatcaagagaagagcaggagcagaggtgactgagagcatgactgcagttagagactaaggggtttgtagctgtccaaggaagaggactcatgaaatcaaaggctgtgttcatgcaaggacagggaatatagcactggggacagaacaaggacttggaatctaacagatctaggtttaaagtttgactttaccacatgttccctgagtgatcctgagcaagttacctgagctctattgaccaatttccccaaaaggaaaataagaagaatggctatggaagaataggaagaatattgcatcttgtaaggaattcacctatttatttattcaaaaatattcactgagtgccaatcgtgtgccatgtgttgccctagatgttgaaacaatgaacaagattcacatggtcactaccttcctagagtttgcatttcagctggtgaggcaaactaacaaataagcagaaaaaaagtccagattatgagaggagttttgaagaaaaactcagaaggcacctggaatcaatgtcttttacagtgtctaggacaatgtttggcatgtaggaggcaaacattttacatgacactaagcgccatcttggaattcagtacatgagaggaaaccatggtgtcagatcgcttcgctacccattcagaaggcattgctcctttccccattcctccttgcttaaaaatatttagtcaggattcatcttccagcataggaaagtatccccacttctttcaaagcacatggcagctaatcatggtaatcctatttgcctggccagggactggtttaggggaagtcatatgactcaggtctgacagagaagatgtgaggggaattctacagaggggacttctggataagagtttctcagtccaaaaacaatcaaccaaacaaaagacgcttagagaaaatgggctcttctctctccagctgacacttgcatatgaccatcaaaaatgttgtatgtagttttcttagggccatgaaagagccaacctagaggtcaagctagcatgctaagtgtgacagtgaagaatggtggaaagaatatgacttggtgatgctggtttgaacaccgaattagtccccttgggaacactccatcatacatcccatgtcaggtaagatacagaacatggtggtacttactgttgaggccattgggtttagattttctgttattggcagccaagaaatcctgacaaatagaagcatagtttgggaacattgagagatcataagaccagggtttggttctttctaagggttgttgataataggagaggaagagagtaagactgttattgatgtgcagctttggaagatcatacccat

SEQ ID NO: 1650 - DNA, 200 bp, Homo sapiens
  misc_feature (1)..(200): DMR10:111549501
tctgaccacctctgtgtcctggtgtcctatccttctccttgaatttctccctagtcacagtgagcaggaaccagaatgttacagatgaagaacattagcctcgctggcaaggctgatgagaaccttataagcccattacaacacctcagacaagccatttctgacatacactccttaaaccgacagacatgcccatccag

SEQ ID NO: 1651 - DNA, 400 bp, Homo sapiens
  misc_feature (1)..(400): DMR10:112485201
gaacccgggaggtggaggttgcagtgagccgagattgcgccactgcactccagcctgggcgacaagagcgaaactctgtctaaaaaaaaaagaaaaaaagaaaaaagaaaagaatgaagtttctgaaatggtccattgagcatatcttttgggaaatagccatgtataggaaaatatgacatgttcattgccagagaagagctgatatatatgatttgatgttgtattttagcaaacatttcaataactttttgacattttccccgtagtccttatttaccttatcagtagttatagtgacatatgattgtcaactttttatattaagaccaaactaataaattaaacatgttgtgtttatatctgatgaaagctgacgttttggaaggatgttaaaata

SEQ ID NO: 1652 - DNA, 200 bp, Homo sapiens
  misc_feature (1)..(200): DMR10:114685501
ttttttattttgttttgaaatgactcgggtagacagccatcctcatgggtcaccctatgtgcccttcccctggtccaggctactgcctggaacttggtgcctctgataacgtcctcctgacttggctgtagcaccaggcgccagacaaagaatcacaactggattgctcgttgataaaatgcttgccatttgcagagctg

SEQ ID NO: 1653 - DNA, 1200 bp, Homo sapiens
  misc_feature (1)..(1200): DMR10:117511001
ccttcttaggcactcaatacatgatagttattctagttattcactgtttccagtgaataactatcatgtattgagtgcttaagaaggtggcttttgtcccacacaggcactaccctgggctctggagactgagcaaggagcagcagaggccagctcaggccaattgcttgctgtcctgaaacttccatcctatcagggcaggcagctaagaagcaaatggggaaaaaaaaatccaaacaggaaaaggtcagatggaaacatcaaacagagtgacacggttgagacttccagggagatgggaggggggtactgtagcaggtagtcagggaagacttcttagaggaggtggtctggaactaaggcctgaccaagaggcaaagatgaggaatcccaacactcacttctttcaagaggcaaggtgaaggatggagaagcacgatttctgcctagacttggcaggtccgagctttgtaggaactagctagctttgctttagggccacaggtaggtaaactgaggtgatgtggtctgtctagggttgctcaagaagtcagtggcaaagccggcctagaactctgggtttgggctccgtgggcagtgctctttccatgctgtgtaccatcctgcctctcaggaaatgacttcctgaatgcttttatggacctctggccgcacaaaggatgtgtctctgtgtcaggcgggtctcagggatttccagaagtcctaaaatgtgcatggtgctatgccagaagccacgaggagtgtgacagtccaagctatgagggatctacactctcacaggaagatgaaagcagcagtatcagagggtgtgggtgtggatgtgacagtgtcccatcgtgctgctgagagaagcggtgggttgaaggggctcccgggaggagaggccacggcagttgggctgggagcttaacttctcatttactcacagacaacttctcagcccgcatttcaccggccccccagcccccagcatgggggcccagggacaggaggaggtcttggcacagctggggctggaggcctttgcttgagccctgggttgaggtgtcttcgacctgcagagaggtccctgcccagggttcctatgggactagccctgcccctgctcacttctgttccttgttgctgtgccaccgccccccacaccccccggctggctttgatgttagtcccactcag

SEQ ID NO: 1654 - DNA, 200 bp, Homo sapiens
  misc_feature (1)..(200): DMR10:118483601
ggtaggaggggtaatgtgcttcatgattggggctggccaacgtgacccagtggggtaggtggactccgtcagtaggtgaactgacccacctgtaggggcgctgctctgggatccagaagtccaatacgtggccccagaggggtctctcggtaattgatgggggaaggggtgtggtccacccaaaagagtggctccaataa

SEQ ID NO: 1655 - DNA, 2000 bp, Homo sapiens
  misc_feature (1)..(2000): DMR10:118656701
ggtctattagtaattgttttataaatttgggatctccagtgttaggtacgtatatatgtttaggattgtgatattttcctgttggacaaggccttttaccgttatgtaatgtccctctttgtctcttttaactgctgttgctttagtttgttttgtctaagaatagttacccctgcttgctcttgttgtccatttgcatgaattgcctttttccacgcctttactttaagtttatgtgagtccttatgtgttaggtgagtctcctgaaggcagcagacagtttgttggtgagttcttatccattctgaggttctgtatttaggccatttacattcaatgttagtattgaaatgtgaggtactgttgcattcgtcatgctctttattgcctgtgtactttgggtttttttgtttttgctttttaatttgtatttttgtttatagttcctgtgtgatttgtgctttaaagaggctctgttttgatgtgtttccaggatttgtttcaagatttagagctccttttagcagttcttgtagtggtggcttggtaatggcaaattctctcagcatttgtttgtctaaaaatgactgtatatttccttcatatatgatgtttagtttcgctggatacaaaattcttggctgataattgttttgtttgaggaggctaaagatatggctccagtcccttctagcttgttgggtttctgctgagaaatctgctgttaatctaatagattttcctttataggctacctggtgcttctgtctcacagctcttaagattatttccttcaccttaactttggataacctgatgacaatgtgcaatgaatttcccaggtgttctttgtgtttcttgtatcgcatgtctaggtctctagcaaggccggggaagttttcttcgattattctcccaaatatgttttccaagcttttagaattgtctttttcctcagggatgttgattattcttaggtttggttatttgacataatctcagacttcttggaggctttgttcatattttcttattcttttttctttgtctttgttggattgggttaattcgaagaccttgtcttcaagctctgaatttctttcttctacttgttcaattctattgctgagactttccagagcattttgcatttctaaaaatgtgtccaaagtttccttaattttttattgttttttctttaagctatctatttccttgaatatttctcccttcacttcctatatcattttttggatttcctggcattgggcttcgcttttctctggtccctccttaattagcttaataactaacctctggaattctttttcaggtaaatcagggatttcttcttggtttggatccattgctggtgaactaatgtgatttttagggggcgttgacaagccttgttttgtcgtattaccagggttggttttctggttccttctcatttgggtaggctctgtcagagggaaggtctagggctgaaggctgctgttcagatttttttgtaccatggggtgttcctttgctgtagactctcccccttttcctgtggatgtggcttcctgtgagctgaactgcagtgattgttatctctcttctgggtctagccacccagctagtctattgggctctgggctggtactgggggttgtctgcacagagtcccgtgatgtgaactgtctaagggtctcagccaccagtgcctgttctgatggaggtggcagagtgtgcaatggactccatgagggtccttagctttggtggtttaatgctctatttttgtgctggttggcctcctgccaggaggtgaagctttccagaaagcatcagctgtagtagtgtggagagggactggcagtgggtgaagccctagaactcccaagattatatgccctttgtctttccctaccaaggtggatagggaaggaccatcgggtgggttggagataggcatgtctaagctcagactctcctcaggcaggtcttgctgc

SEQ ID NO: 1656 - DNA, 1100 bp, Homo sapiens
  misc_feature (1)..(1100): DMR10:118903901
ggcaactcctaggtctgggtgtctgctctcacccctaccctgagatctgccagttcctctgctccctccaaagcaggccccaccctgtgctgggtgctcaggatccaacagggagtgaaacagataaagtccctgccctcccagaccctggaggcagctctacctgatttggcattgccatctgccaccctgatcctgagtgcttcaacacccggagcttgaattcagacaggtagccccaatggtcttccttcccagccctgcctagccccacactgccatctggtcccacaatgccttgcaacacaaagcctggcagtgtgcaggaactaggcttggctgccaccttgaaatgaagagggaaagacactaattgcagtgagaacaaaaataaattaatatctcgatacatcattgtaccacaaaatgaccagagaaaaatgcagggccaagcagcatagagcacactcaatgaaagagaggtcataggaaccagtcatggaagagagctggatgggcgtggctaggtggagggtccggaagcccagcggggagttcaccatggttcccatcttctaaaacctgtgttttgaattccagcgcacactgtgcaggaagacaggagagagcaaccagctgtgactcgcgcattggctgatgggagtgaaaaaagtacgatctgttcaaaagcaatttgtcaaaacatttcaagagccataaaaatcttctaacctttgatccaataagcttactccagggaatatatctgtaaggaatgaattcaataataagaaaaataggttataataagtgagcacctactctatgctagctgctatttcaagcactttaaatgcgtattttctaaattagccaggtgtggtggtacacatctgtaatcccagctactcgggaggctgaggcacgagagtcgcttggacccgggaggtgaaggttgcagggagccaagatcgaagattgcatcactgggctccagcctggactgagcaagactctgtctcaaaaaaaaaaaaaaaaaaaaaaatgtgtattttatcgtttaattcttaccacccttgaagtaaatcctgtcattacac

SEQ ID NO: 1657 - DNA, 1800 bp, Homo sapiens
  misc_feature (1)..(1800): DMR10:118996201
aatccagtctgagaatttctgttttttaaacggtaagcactatccacttacgtgtattgtgataactgaagaattcagatttccttccagcattctattttgtgttttgtttttactttgctttttctttgcttcttttttctccttttctgatttctatttggttaatcagggtttgttgttggtttgttttttttttttcaacaatagctgtttctcctaaattcggggttttttagaagattctttttctactgacttcaaatacttaaatgattttagctagtttctatcatattttaataaatatgtaacaagattccaagttacacagtgtcattacacattgtgtcacatcgatgacactaagaccttaggatctttcctccaatctcaccaccattttccaagttgttgtggtctagcacttttgaatccccaaaactggttgctatttaaccactgttttttatacactccgtgcttatttagatttaattaccaaattattgtctcacagttacttcttacgtcctattttttccttctaggcttaaattatatcttaatggaatgcatcctttagtgatgctttcagcaaggatctgtgagtgctagagtctcttggactttgtctgaacatgtctttttttcaccctcactggtagctggctacagaatttttgattaacaattatttgcagtggcatctttattatatcgttccattgtcttctggcctctattgttactaagtctgctgtgagccaaatcactgttattttgtaggtaattcatttatgtctggttgcttttaagattcatcgttgtttccggttttctgcaattttactccttgtatataagtgtagatttacttgtttttactttcaggggtaaaacactctcttttctccacttttaatatgaagattcgtatctttcatcaattctagaaaactctcagccatgatctctttaaatattacttctctgcctggcacagtggctcacgcctataatcccagcactttgagagactgaggtgggcagatcacttgatgtcaggagttcgagaccagcctggccaacatggtgaaaccccgtctctattaaaaatacaaaatttagccaggtgtggtggtgcatgcctgttaatcccactacttgggaggctgaggcaggagaatcgcttgaacccgggaggcagaggttgcagtgagctgatatcacaccactgcactccagcctaggcaacagagcaagactctgtctcaaaaaataaataaaatattacttctccctgagttgctccatgctgtgcttcctagaatacctattagatgcatgttggactttctcaccctatcttctatatctcttaacctctcttttatagtctcctttttatcattatgtattgcatttgggagaatctcatcactgattttctcctggtgtctaacctgctatttaacctatctactgagtgtcttcatttccttgttttaagctatctcttacagaaggatgaatggcttcatttcaatgactgtattttctagaaattaaatttggttcttttacaaatctgttttttcttttattatggtaccctgttttttccttattgtttcttttccttttttttttttttttctctctctctctttagtaaattcaaatggccccaggttcttagaatccttgtcctacgtctgatctcttcctcccggtgattcttcatgtcccttatgattctagactctgagctcatcttcagcagtcccatgggccctg

SEQ ID NO: 1658 - DNA, 1100 bp, Homo sapiens
  misc_feature (1)..(1100): DMR10:120591001
tcaagtgatctgcccacctcggcctcccaaagtgctgggattataagcgtgagccactgcacctggccaagagtgttgcttttgggcagttagcataacagactgcattttgagagactcaggtggctgcctaaatggtcagcttatcagccctgggctgcgtgtgcaagttagaagcatcagaatatctttgatcagccatttctgttaagctccatgggcttaagcttggagtgcatgtaccactgactatgctccatgagccccagtgcagccctctccagccctggtccttccaaactggctttggcacggtcatgtgattgtcccctggatggagtgggagagggggaggcttgaattgactttcatccaaagtcaagccattgattttttaaaaattatagcagttacattggcaagcaactttgaagatgaatgtgagatattttaagagataaatcatagcaattgaaaagacataattttaaattctgagctaaaattcatttaaaattagaaaattaaacaatactctaatttaactaaaaactctataattttcaaaaataaagcccaaaatagaaatgtaggaaaaagatcctttgctactgttaaaaaaaaaaaccccatcctgatgtggcccacattcttatttgattctagttttatctgagcaagaggaaaggaaaagggttgtacttcagttaataaagacttaaaattctggaccatcaagtgtaaatttaatataaataattttatttaaagataaatggccaggaagtactctgcaaagtaacaacagagtattactaatgctgataattacatggaaaatcctaatactggccatgtaaaagctttgattaaaatataattcaaattacagatgatgtaataacatgaagctggtggtaggatcctcaggagccataatgaacagtgtaagccagttcacaaaaggcaggcatttttacagatccttatgtttcaatttcatgctctattcacgtgaagtaaatataacatcacagtgtaccaattaaatggccataatgagaacgtttattcctcaacccctgatttttttttggatg

SEQ ID NO: 1659 - DNA, 1400 bp, Homo sapiens
  misc_feature (1)..(1400): DMR10:120790201
actctggagcgagaaggcatccatcattgattatgtttggccttgggtaccacctctgtgtgctggacctgctttcagccctgaggggatggaatagggcctaatcttttcccaccctcagggctggtagttgtatcttccttggagctgatgagatggtttgagaccttcctcagagtagagacaagactgtcagccccttatatccccactcctgctgctttgcagtgcttctgcccatctcctccttgctgaaaaatgttgtggggaattgcaagacaggccaaccctaataattcatattctccttcttcctctccttccctccctctaaagaaatgaattacatatcccataagcatatataattaaagaaaattaaatctaatgtatccctaacccatcatgttcatgtttatatactctctgtgcttattactggctattaatactcctattgatcttagcttagaccaggaattcgagggtggagattttagttgctgttgtaattgacataaacatccttctgcctacctattagatgactaaaatccaatcaagtgattagcatttactgtgaacctgctacgtgtcctgcactcagtactatgaacaacatggaagaaagataggcacgttgttctgacccactagccacgtgcccagccagtagccccaggctgaggatgagctagcactcaattagaacaagcccagagcatcacctccctttctatcccaactcaatcctcttgggccctctcaccctccactttctgaagaatccctgatccaaagcaggacattttgacacagctgtgttgatatggctattttgctttgaggtatgttttatgacatagttgcaatgtgtattaccaagaattatgcacagcaaacacttctaatctttttctctcccgttcccacccccacttcatctgggagacatttatttttctgcattgtctaaactgcttttgaagtattgtcttctatttagtggtgttttcttcaaaatctgttagaaaggaattagtctttatggatatgttcctgacttccaaaaagtctttataaattaggttaatgctattaaatataacttacatatactgctgggtactgaggatgattagaagtgtatttgaagcttccctctgcgatttggggaagagagtaagtgcttctttttaggagactgaaaggcaaatggcactgcggagacaggaggatggggaaggccagcttcttttggcgggtcacaggggtaggtcgagatggtttggatttggggaacttctgattttgtaggagtagcagaaacttctggcactcactgacatgtggccttgaccaagtccctcaacttctcagagcctcagttttcttatctg

SEQ ID NO: 1660 - DNA, 400 bp, Homo sapiens
  misc_feature (1)..(400): DMR10:122535701
acatgcatgtctgtctatgatagaatgatttatattcctttggctgtaaacccaataatggaattgctgggtcgaatggtagttctgattttaggtctttgaggaatcgccacactgttttccacaatggttgaactaatttacactctcattaacaatgtataagcattcctttttctctgtaacctcgctagcgcctgttattttttgacttgttaataatagtcatgctgactcgtgtgagatggtatctcattgtggctatgatttgcatttctctaataatcagtgatgttgagtttttttcaaaagttggggctaaatgatgagaacacatggagacgtagaggggaacaacagacactggggcgtattgggggaaggaggctgggagcaggga

SEQ ID NO: 1661 - DNA, 3200 bp, Homo sapiens
  misc_feature (1)..(3200): DMR10:122643201
ttcctgaaccgcttcccctccgtgtacctgcgttgtaaaatggtggtgtgcagagcgtatgacccctcttcccgctgctaccgaggctgtgtgttgaggtcgaagagggatgtgggctcctaccaggaaaaggtggacgtcgtcctgggtcccatccagctgcagacccccccacgccgagaagaggagcctcggtaggtggtcgctctcagaccccactgtccaccggggcgcagacccctgactcggggacttgggatgttcctcttggtgtcatattccaactcagattgagccctacattgtgctgcacctggtcatacggagttgaatcagacctggttcccgcctcccccaaggctcatggtccttggaggacccgttgcagggtgaggtcaagagagttctgacctggatggcccatagacctgacgtcccagaatccatgcttctcatctgcaaaatgaaaatgtcaatacttacttcttagcactgttgagagggttacttacataaaggaattttggtgaaactgcctcagcctgttcctggtgcaagtcattgagtgcttggtaaatggtagtttttgttactcctgttgttgtcacccatgttaacaacaccaatgatgacagtattcctcacaacgataataactataacagcagacgtgttgacatcagggtctagacagggccatggggacgccagctgcatggatttgtcctgatcgctggcaggctctactgggcacaagctatgtcacttttcttctccagaacagggagtgcatctgctgctgtgctgctgtgttgctgtgcggctgtgctgctgtgttgctgtgcggctgtgatgctgcgctgctgtgctgctgtcatgctgtgctgctgtgatgctgtgcggctgtgctgctgtcatgctgtgatgctgtgcggctgtgcggctgtgcggctgtgcggctgtgctgctgtgttgctgtgcggctgtgctgctgtgttgtgggcatggacgagggaatgaatgtttgcagagtgatgcccaggatttctggcccagtctggggctaggtcaacagatgtggtggccatggtgttgggggtgggtggggcagcagtagttgtcacaagccctctccttggtcagggcgctgcccatggggcatctttgacagctctttcctcttgattcctattcaggccgtctttatgtccacctgagtccagactctttcctcacttgttcattcattcaatgcatgtttaatgaaggactgttatgcaccaggaggcagataaagtcttggaggaaaagatgcaattcagaataagtctcatgaatggtgcatgcaatggggtcggagtgaggagcaaaggacatcagggcagggcgaaggtgcctgtgggcacaggctcacttccctcctctccctcctgttccctgcagctgccgtagtagctcacgtcctgggggcctcttacctgggactcttgtaatcatttcccagctggtctaaaatgcccaactctctcccctcccattcatctggagcctcaggccagatttgttctcccaaagcccagttcccagttcctgctaagaaaaacttccctgactctccttggctgataaacgtgaaatctctctagtctgacagtcagctgcccattggggtctggcctcagtttcccattcagcacttccttctccaagttttttatcctttcccaccaaacagttctgattgcctttactatgcccagggggccatggcctttacttgtcttcctctcctcctctgccaggctctgtcctggtgccctgtctgttattgtggtctcctctccttcccagacgtgttggtggctgatgtggaggagacagccagcacccaggggaggtatcacagcactgccatctcttctggggtcttcctggctgtggttctggttgtggcagccttcaccctggggaggaaggcacacagcaccagtggccggcctctgagctcctagatatgaagcccagagaaggtgtttagatattggctctgccagcccaggcacccgagagaggatggaagaaacaagggtgcagagcttggcgcccagcagcacctgaactccatttagcttggcacaggtgtatggtggggtgggtggaggtggggtgaagaaagatggggtgggtagaggtggggtgaagaaaggtggagcgaggttttccccagatccgaaggctcagtgctgggtcaaaatgtcaaaggtaaacaggtgctaacgtctaaagcctcacctgcaactctaagccaaacattagtaacagcagagctttctctaggtggaatttctgagcctttttttttttttttttgagacagtgtcttgctttgttgcccaggcttgagtgcagtgacacaatctcaactcactgcaacctccgtctcctgggttcaagcgattcttctgcctcagcctccctagtagctaagattacagacaggctagaccatgcccagctaagttttgtatttttagtagagacggggtttcatcatgttggccaggctggtctcaaactcctgacttcaagtgatctgcctgcctaggcctcccaaagtgccgggattacaggtgtgagccactgtacccggcctcttttctgaccttttataagctcgcttcttaggcctgtagcataaatctcagcctttccttagggtagagccagctgaataaagaacctttttcagagtaagtgtcaatttggccactgttgccttcgtttctcctaagaactagatcctttcaaattaagcagacaggtggggtggttgtcatacagaatgagaaggggcaactcgtgtgtcttcccagtgtccttggagtgttggttcttcccaaagcaggatatgcaggatgcagcctggagaaagacaagaatgctaaatgcattgtaagtttcagtggctgtgattgaaaattaaagatgattgcctccatttctctagggatctgcctcttttggtttttgacacttcatctccagaactatgggctggggcggttcagggaaagaagcaaactccttagggcccttaggaagggagtcctgtttgcatgaggtctccagagagaaggagattgacaggtgacccaaggagctcagaagaaacaaagggatgagctgggttccaaggaagc

SEQ ID NO: 1662 - DNA, 1100 bp, Homo sapiens
  misc_feature (1)..(1100): DMR10:123635801
taactcaaaggggaccaaaaaaaagaaaaaaagaagaagaagaagaaaaagaagaaagtattgtcactgttcagccttttcaagatgagtcacccagcagatatgctgactctaggtgacctctaccggcagcatatcccccaacagaaggagactcccaggcttggcattaatacctgccaggtgagtaagctgggctgagtttcatatattttcagagcacctctagattgacttaagtcaaaagatgtgcagggcagaggctagccttggtgaaggccatcactctttaaaagtttatatattgtctgcccaactagactccttgagaggctgtgtcttgttttctggacagtctgttggtaccaagcaggacctgccatggttgttggtaattgaatggcattcaccaacctctgcttggcagttccatgtagacacacaggcattgacctcatttattcattcatttattcatggattccattactgtaaactgatcatctgctctgttccaggcactgaggacataaaaatgaacatgccataacttagtcttcaaggtgtgcagctcagcaaaggatgtggagatacagagaaacatctcaggtacaagggtcagagcttccagagtgggatcctcagtgtgatgcagcccagagaaggggtcctgggagaacagtccaagtctgaggggctgagggaggcttaaaaatcaaagtggcattggagttgggtctggaaagatggccaaggccaggaaggacaagacttgcagaattatggagatgtaagaatgctagctagtgatcaaatgatttcatgggagcagaacacagggtgccgaggttgatgttggtggggctggatggggagatgaggccgggccttgggctattgggtggaatttggaaaatgggcagggggaggaagaaaagtagtaaagatttaaggctatagaggaggaggactcaacccaatggtggagtgggcagcagccaggaataggaggaagcagcacaaaggagggtgatcaggacactgtcacacacacccagacttgtgatgatgaagttctgaaccagggcagtgacgctagg

SEQ ID NO: 1663 - DNA, 800 bp, Homo sapiens
  misc_feature (1)..(800): DMR10:123691901
taaggagaaatgatcttagacacttggataaactctatagaaaattgagtgtttctattaataactatctaggtttcaattgtcttgtatctttccctaattctccaaacagttcaatctccagctttattcaatggctgggccattttgttcttggagggacaaaattgacctctccatgaaattgcaaaaacccatcttcattcctttttatggggctccaggtcataaggatgagatatatttggggtactggcagaggatggcagagctggctggctctgagccaggaagccttgttagaggaaggaactctggcattcagaggtgtccccttgggggcacttgcttgggtcttggatcaaactctactggggcagcctggctgtgggaggtgatgacatctgccacctctgccactacccagagcttgtcctgccctcttcccagccagcctcacacacaggagctgagccaggctgaggcaaggtcagcgagagacagttctccatgccagtatctgggtgtgggtctcttgttggctcccagctcatcccgtgtggctgacccttccaggtcacttggagcagccagtaatgacagtgtcctaacagctggtgggtatggaggaaagactagacatcaggctatggactcacatggagggccctggtgttggctctgggacctgggctgggccggacctggggagagggtgggtggagcttggcctctgcagtttgcgcttgcaggttcaggggagaaagttgtttgagatcagggtttaggggtagtgtttc

SEQ ID NO: 1664 - DNA, 2100 bp, Homo sapiens
  misc_feature (1)..(2100): DMR10:125554501
gttggagcatttttgcaaagttttctccatgtgacctgcaagttaaagatcagggggctcccttcatccaagccatccatgtgccaatcatccttacctaaaaatgaaagttacaaataagccagcgctgctatttataccctcctgcctggcccatcttcctcctgtcaatcttggtctttcattatggatacatacgcagcacctcttctccatcaagatcacagattagctgctcccgcttctccactgtttgttttccccttaccttttgtgacgttttataaaataaccatgttctcctggtcttcagggtttttctgtcaatagaagataattttttcccttctcctctgtccttcctttctttcttccctcccttctttcttccttcgttccctctcttttcttcctcctttcattatttcctaccttccatcttcctttgtccattttacctctcttgctcttccttccttccctccgtccctccctcccttccttcctcccttccttccttccctcttctgtgtcttcctcatcctctttcccttccatttcttctcggtcctcttcctttttctttgtccctcctttattcctcccttttcctgatattttcaagcaggaagtttggagatggcctgcccttgcccagccctttcctgtagtcctgcttgctgccagccccacgcagaaggccctgtctccccacacatcccctcccaggcctctcgcccagctgccagtctgaaccctgagcccaactgacaccgttccactcgccgttgactgagccacccacttctgagggattcatttccctgatagaactttcttttcctctcccctcaggtcgccttcccctctccacctgggggcctttgcttcagcaccgcaggggatctttcgtagctcatccaataaaagccaccctgcataaataccttgtttattcactcaaccagtattcactgagcaccttctacatgccaggctctgcagaggtgctgcggagagtcaggcagtcacagatcctactcacaagaagcgtgatgtttcctagggaaaacagacagtaagcaaatacctacccaaacttatttaatcacaactgtgatgcgtgtcacagaggaagagtctgtcatcagtcatacaggtccttgtgtgccccactccccacacggtcccccagggtgctgatggtcattagaggtgcctgtccttgaataacgtactctgtggggtacatggcgggggaaggtttaagacttccccaccctggaggtgagtctgctggcctggtgatttatgggacccctccgctgtgcccagacatcttccgaatgctgatgtggataccaggaaacagaacgggaaaaggtccactgtgcccatgtggtccttcccggggagctcaggcctgtttaccggccacgtctgaagtgttttgtactgtctcaagtgtgttctcaagtgttttgttctgaagtgaagcctgactgcattttctcagcctcctcttccacacggggaccgctgcttggcagcacatgctcgccagccatttgcactcacagggggcaaagcttaactatagattttgatacacgaacgtgagtactgagctgtgagagcccagaggtgcctgtacaactacagaaaggagaaaaaaaaaaacacgagagttttaaaaaggcacaagagcagcggggagaggaaagaaattcatttattaacttcatcagcctcacttttctcatgtgcaaaatggggctgctgattgtacaagagatgcttctaacgcattgcacatatcatgtgccaaactaaatgtcagtcttctttccctgatatttgcagttagaagtcccaatggagaatgtggctgtaactgtggaaactgtacagaaggcctcagcattcgtcggggtgggctctggaggcccccaccgctagggaaatctgtaaaaagatcctcaacattcaaatagggtggggagaaggtcgggggcgcatgtgtacattcctttttctactttatcctctactcggtggctgtcacagtgaaaggaggtgcgtgggggtaaactgaggaag

SEQ ID NO: 1665 - DNA, 1300 bp, Homo sapiens
  misc_feature (1)..(1300): DMR10:127261501
atgtgggtgtgtgtgtacctgcatgtgtgtgcatgtgggtgtgtgtgtacccgtgctcatctgtgtgtgtacctgcatgtgtgtgcatgtgggtgtgtgcctgcatgtacccgtgctcatctgtgtgtgtgcatgtgtacctgcatgtgtgtgcatgtgggtgtgtgtgtacctgcatgtgtgtgcatgtgggtgtgcgtgtacctgcatgtgtgtgcatgtgggtgtgcgtgtgtgtacccgtgctcatctgtgtgtgtgcatgtgggtgtgtgtgtgtgtacctgcatgtgtgtgcatgtgggtgtgggtgtgtacctgcattgtgtgcatgtgggtgtgcgtgtgtgtacctgcatgtgggtgtgcgtgtgtgtacccgtgctcatctgtgtgtgtgcatgtgtgtgtgtacccgtgctcatctgtgtgcatgtgggtgtgtgtgtgtgtacccgtgctcctctgtgtgcatgtgggtgtgtgtgtgtacccatgctcatctgtttgtgtacctgcatgtgtgtgcatgtgtgtgtgtgtgtgtacctgtgctcttctgtgtgtgtgcatgtgggtgtgtgtgtgtacccgtgctcctctgtgtgcatgtgggtgtgtgtgtgtgtacccgtgctcgtctgtgtgtgtacctgtatgtgtgtgcatgtgggtgtgtgtgtgtgtgtacccgtgctcatctgtgtgtgtgcgtgtgtgtgtgtgtgtacccgtgctcatctgtgtgtgtacctgcatgtgtgtgcatgtggctgtgtgtgtgtacctgtgtgctgaggtgttggtttcaagtaaagacacttttatttgcagagattcttactctcagaagctcaaacaaacccatattcctatcccagttgacacattcagcagaaacaagctcccaagcccacacagcacaagagtcagccaccgaggaggcattttaggtcctgattggagttggtcactgataactgtaacttttattcccacatccttctgcccccatatgctgccctttgtgttgaataaacaacatgaatgtttagaagctggatcaggtgggtttttgaagaaggttattgccttcatgtggtaagatacttgaaactgtctggagacagcttgttgagagacccttaagtattctttgacacctttgcttcaataccagcttcaaaatgaagggtttgcatcactttccctgtacattcccattctttgtgaggcattgcacgtttgcgttctggagctgagagtgagctaacattgggcatgcctcccagcaccaggc

SEQ ID NO: 1666 - DNA, 1800 bp, Homo sapiens
  misc_feature (1)..(1800): DMR10:127538001
ccccagactttcacggcagtttggcctcctcacccatgtcgagcctggcccccaccatggctggaagagagtgggggtgggtgatgggtggcacatcaggcaggcaagggaagggaggaggaagaagacaatccctgttgctctcatcgtttaggcttcctcttcgtccaccctgtggctggtgagaacagggcacggccccgagagaagctctaaaagtacttgttgcataaataaacacacactttctctagagtaaaactgaacatatgatctcccttgtgaaacaaaactttgccataatccttttgctgtttacgatgcactcattctcttctctttatttcattaatgaattcatttgacaaatgactattgagatatttctgttctggtctgcagaataaagcagtgaacaagatggtaaactacctgtttctggttggaatagggcaggataccaaaaataaacaaacagaagaaatgaagacatcaatgatgagggtgaagtgttgtggggcaggagagcatgaggggtgggtgactgggagcacttcaggtggaaagggactgagttgacatttggtgggggcaggtttttgagtggctgcagtgagctggtgataaagatctcctcatcacacccacacatccaattagtaacagtgtcagtttgctcctgtgcccatctcattgccaccgccctggtccacggccccatatgctcacctgggttcctaccacagcctgtagggtgggccctctgctcagtcgctgaccctcccatcccacttgcttctggcagagcgcgcttccaaaacacagatctgttctggccccgcccctgcttacggccctttttggcctctgtggccctcagaatcaagtccagatgctctggcctggcgcatatgcacgatggggacctgctggggccacccaaatcggcccttgcagcagtgagactgagccacatgcaggtcctcagatcactgtgggctccgtccctgccctggctgtagcacatgctgctcctgccccctcctgtgttctgctccaccccagtctcaccctgacattcccatatctcctgcttttacccctctttggtgtttgcttatcactgcaccccagaacctcatccagtccctggcacgtagaggaccctcactggttctttgagaaatgcataaattcagtgttggttcctgcgaagagtcttccttgaaaatgctttcaggaggctgtgctgtccctggcagggcaaggtgctttgtagcaggattttcccctcttatggtggttctttagaaaggccattacttggctatgcctgtaatctcagcactttgggaggctgaggcgggtgaatcacgaggtcaggagatagataccatcctggttaacatggtgaaaccccatctctactaaaaatacaaaaaaaaaaaaaaaagccaggcatggtggcacgggcctgtagtcccagctactcgagaggctgagcagaagaatcgctggaaccagggaggcagaggttgcaatgagccaagatgatgccactgccttcagcctgggcgacagagcaagacttcgtcaaaaaaaaaaaaaaaaaaaaggctattgcaagatccaggcatatacatagtaaaccatagataccacatcaatgattgatgggaatttactaaacagaatgccatttaggatacgatgaaatcatgcctagtgtaacatctgccttcttaaaaacaaattcagagtatcattaaaaaaaaaagtacaagaaaaataagaccatat

SEQ ID NO: 1667 - DNA, 1800 bp, Homo sapiens
  misc_feature (1)..(1800): DMR10:128384101
ggcgagacctaccacataatttgctggtctcctgttaaaaaattatgaagattttcaagaggactacaggagagcatgaaaccatgcttctggctttcgaaggtgggaacctgtgcaacagctcaggtcgggcatttgtgaagccggtcctgagtcctggggaatagaagtcaaagggcattgaccgcccccgccgcagctgacagtggagaggctatctaaggatgtggcatgttggggaattcagagtgggcctgggaaagaaactaccactgacatttggatcaaatccattcttcatattgacttgtggaaagggacacagctgaatgccgggtgatagagaaacacaacatcctcatgccggtgacaagaagaaggttgggctggtcagggcaggaacagctcgttagggcaagggccacagctcctccgtgtatgtgagcccgtggcctctgccatgtccactcaggggaaagggtggaggcagaacaaggtgttgcatgcacagaacaatccaaacaggaagaatgcaagaaaggaaaggaatgttctggaataatggaggggtgctacagacacatcagccagtagtgcccaggccaagtcagacagaaaaaaatttaagtccaagaaaatcgtgtggtgaaaccctgtgaagtggacattcccttgaacccttttagcaatcctgaaggtgttctccatttctgaggagtttgggtataccattttttgactctccctctctgtgactctcccattttcatctgttctttttaattactgtgttctggcctctcctggtttaattgctcagtgtctgtcatgtggcgggcatctcattaacaggacgccttcttcggttcttacttagcaaaagatgatccatgacccgcgctcagtgtgcggctttgcagagctggcttctgttccagatgacttgctgagttagcagggctggctggtctgctgaacagtcctcctggtgttccatatgcacggggatgctaattagtgaggaggaccctccgcaagttcacgccgagagaccatcaaagtttcagagcttctctccaaagggctggatctgtccacagcctctgtcttccatttcttcttttcctgtgccttattgagatatcgttttttttttcttctcattttgttcccctatccattcacctcctcagcacacagtggccaagtcttccatctgtcaccaagtcatccctcactccccggacacggagtgtctacgtaagatgcccatgccaatgctgggtcccaaggcgctgctggagagggggcagtggctgttattgaggttgttgtgtggtttacgtcttcgtgaggccgatggaatctgcctacaggagcctcagaaacatgtacatattcttctgtttttgactttttttttttttttttgagacggagtctcgctctgtagcccaggctggagtgcaatggcgcgatctcggctcactgcaagctccgcctcccgggttcacgccattctcctgcctcagcctcccgagtagctgggactacaggcgcccgccaccacgccctgctaattttttttgtatttttagtagagacggggtttcaccgtgttagccaggatggtcttgatctcctgacctcgtgatccgcccgcctcggtctcccaaagtgctgggattacaggcacgaaccatcgtgccaggccttgtttttgacttttaaaaaggagtctgaccacaatgagacaccacttcagatccattagaatggctcctagcaaaaaaacaaaat

SEQ ID NO: 1668 - DNA, 1500 bp, Homo sapiens
  misc_feature (1)..(1500): DMR10:128632101
tgtttcgaaaggctggtctcggtgcatctacgattgcggcgaatgacaagaaaacttctgtgggcatcagagggtttcagagaaacacggaaaagtggaggacgtttaaaaatacattttgcacatcagcaaggtcaggactagggtgcaggcagtgaggtgcctaggttgcaaaatttaaggaggttgggagtgagtgcctgctgaaattataggccctaggtgctccctggcctccccctcctcccagcccggggtgccagacatccaaactctggctggcatccaagtccagctaagggcccagggagggtgcggagcaggtagaaggaaagcagatgcaggagtgggcaggggagggacagggaggaggtgctggctcctcaggctctgctctcctctgaaatatggcctggagaaacgggagggaggccaaaagggagccgtagtcccaagctagaacccatgtttccatcggatgagccgtgaccatgggctcctggctgtctctgccatctgcctgatgctgctctaagaggcagagcaaaggtgctggacagcgagtccatttaagtggggagaataagcaggtggctggggtctggttttcggcaggtggccaaaggaaagcaggagagttccaggcctggggactccacttaggacaggggaccacctggcggaaatgtcagttgccagcagaatgggacctgaggggaactcagcaggtctctctgattgtcccagggtgtctacctggatcctgctccatcagcagcatgtgcaggggcctggggctctcccgcccggagggaccgtgctgggttcattgctgttgaaggcttgccccagtatgccgaagcaagtctgcagtgaaacctcaaccagtagaaggagggactctgcaaagtcacctaaccaaggacgtggcccagggaagggaacaaattgaggccatgaatgtaattgaccatatacatgtgggcaaggatgaggaaacagcggtgctcttatactctataggtgaaaatataaactggaaaaatggttttgaaggcaatttggcaatatctgtcaagatttgagaaacatgtccattgcaaagaacttaacctatagataggtttacaaaaacaccaagagatatgttcactgaagaatggtttgttagaagggaaaacattcaagtaaaggaacaaaatgaaattgatcagggactgtttaaataaaatataatatatacataaatcagaaaatgaaaggccatcagaaaggttgaggcagatctccatgtgatgacatggaatgatatttgcagtatttgtttagtgaaagcaaactaaaacgcagtgtgtttaatattatcttatttgtataaaaactaaaggatatgcttataggtacaaaatgaactgttgacagtagttgcttctggaaaatgagacaaagtggctaatgaaaaatagattataggttgactttctatttttgtctttcttg

SEQ ID NO: 1669 - DNA, 700 bp, Homo sapiens
  misc_feature (1)..(700): DMR10:128800001
agggaggacccaccgtggccaacggaggaccttcagcgtgaactgtaaccagtgctatttctgccccatctccccaaaataatgtctagctacttaaagatagaaaacaacatagaaaaagataatgatgacaaaggcagcaggaggaaggatgtgtgttggtaaggaagataatgtagattctggcatccaccatcatttggaggaagttcaacaaaaacaaaaaggacaacacaatggtttatacatccttccccttgaaagagtcaggacaccttatttctcatgaggagccttcaaaacaagacactgagcaaaaaagttgttgctgtcaggagcaactagttgcaatgaatccacagtgctgtctcatgcctgtgttttacctttcatactggctggagagttggccctgaaacacagctcagtaaaggtgaaatatacaaatttttctttggctcccagattgttgggtagaattcactctaaggacgagctatctaaccatgtctctgctgttttgcttattagatatcatcttgctcttattggctttggctaggaggttgtattagtcagtgttctccagagaaacagaatcaatagggtatgtacatatgtacaaagagagaaaaagaaagatgtttattttaagaaattggctcacacaattatgggtgctgctaagttcaaatgtgca

SEQ ID NO: 1670 - DNA, 2100 bp, Homo sapiens
  misc_feature (1)..(2100): DMR10:129343401
atcttccttccacctccctacagactgggagcgacttacagagtgagattgggtgcccctcacccctctatctccacacagcccagcccaactcccacaagcgttggagaaatgcttgctgagtgggaggtgtgggtggggaaggaggggccctgtgccccctccagaaaccgcacggccaggtggaatggggcacagacaagttcaagcccctggtccacacagagcaggtgcaggtaggatggggagagagagagcagcggccaggtgggaccccaggagaagccaggaagagcagaagaggctcacctggagagtcaaaaagggcttgggcctgtaggatagcatgaaattgaaaactgccaaaatgcccaacaataaaggatgggttaaataaagatggtgcacacattccacaaaatactgtaaaatcatgtgatagcaagcataaaacagcacacgcggcttaaccaccgtcctatacgcacggagggctgactgcatatgtgaaggtgaaggaggccacaggagttctgactgtgtggtgggatcagaggtgatttttttttttttttttttgagacagagtctcactctgtcacccaggctggaatgcagtggcatgatcttggctcttggctcactgaaacctccgcctccttggttcaagcaattctcctgcacgggcgatttttttattttgcaatttctgcttttctgtatgttccaaattctctagactgaatatacgatgttaaagaggaggaggcatgagcgataggacctgctcctggctgtgtctgggccacgagatcgctgtgaaaatccaagggcctggttgcctgctccatgccgaagtgtaagcagcatccacggacccagaagtcgggaaaggccggggctgccccgacggcctgcgacgggagcagtgcctccacagcacgtgaaagagagaggccttcacaaaaggcaaaggaagggcagggacccagcctccactggctccttcctccttcctctgcttcttcttcctcctcagtccagaaccaaacccaaaccagaggccaatcgatgagtcacggggctgcaccttccaccatcctcactgacctccttcctggtctgcctattctcaagagcatcacccccgaatcctgcaggacgcagacctgagcccagagcgccgcccaagagcgccttctcattccccaccctcgtctcccccagcctgagcacatcatgtctatcatggtccagtctgaagcagtgacccggaggtgaaaattccgtgtcccaggatcaaacccgtgggccagccagtcacctttatttatgggtcctgtaaaaagagcccgctgcaaatttccactccgccctccgatgcccactaatgagatctcatttaatatggacatatttccacattttgggggaccagctacttctcccccattcaggaaagccagggaagctttgcagatgctgttacagggcagaagggaccacagtgctccggggggtgcaagcgaaggaccctctttagtggcactaagcaccctcatgcccatcagtagcatcagatttcaagccgaagccaaaccagaagaaattgcatcccagcagcgctatattttatgtcttgtttttatttcctttacttgtctttcagtgtaaacagtcgatgttgttccaagaggtcagttttatatgccggagcaccaccaaactatttaggtttaaactgacactactgtttaagacccagtaattttcagaacatatgatttactgtcgcagcactccataagactcatttcatacctccaagaagaactagtcaaagtgttaaataaacatgaaggctgtgtcttgttttccttccaaaagtgcaaacactgtgtgagtctaatgattaaatactgctcgacacacacgcaagtgactagttcacagttgcttctttcctgtggcttcattttatgtattaattattttgtgttcagacaaagactttaattaggagtcataaagagtttctgaagagtgagtaagtagtttcatctgcattaaactgataataaacagacatttctaaagcaa

SEQ ID NO: 1671 - DNA, 1900 bp, Homo sapiens
  misc_feature (1)..(1900): DMR10:129801001
ggcctttaggcggccgcagctgcagactggacagacagctttgtccacggcgggcttctcttcacctgcctcagctccacaagggcagacaagccaactggatggagtccctggggctgggacctgcagcccagctgggaagcagacttgccaacagctgataccagcacgctgggcttgtgtggtctccagcatgtgcaataaccaggacagagaaaattcagttcatactcacgtgggtgagacgcagctcaccgctaagactgatgcccaagcagacaggccacacaagttagttcagcttcagaacttcgacgactgcatcctctctgcagaaactgtaagcggttttaattatgtttaaggcagatcaaacttatttcagaaaagtattagctcaagactaggcatagattccctagagagctgctggcttcagctcctcctttccaacagagctgcttttttattatttttgccatgattcctactgtttctctttattaatgcgatactgaactttcctccagaaaagcaagagatccttaagcccgtttcaactctattgttgatttgtttttataaatatgcagccaccccagcatgctgggagagcctgatgtgctccacgaggagcccccaaaagccgaggggaacacaggacacttccccgaaggcacaggggcctggtcctgcccctgggccactccaggtgggtcagagggaggatgagccagacaggtggcttctaggggttcagccagagtccgtgtgcccattcccactgggaacatgtctcccaggccaagctgggtgtggagttgaattaagtaacagctcaagcaggggtcaggagacccccgaccaaggtctgccccaaggctggaggggaggcagaagggggctctcctcccaggtccccaagggtggggccagcgggggtagggggaggtggcacagaggaatggaagatggccatgaagcctgccctggtgtgcacgaggggaataggggtgatctcaggacatgaaggttttctgtgtagcatttagtgagttcgaggtgtatacccctgtgtaaccaacaccccagtcaaggtagagaccttttctcgaacaggtatttgcacacccatgttcatagtagcatcattcacaacagctaagagaaggagacaacacaaaatgtccttggatagatgaatagataaacagtgtggcacatccacacaatggaatattcacccttacagatgaaggaaatgcacacacatgctacaacacggatgaaccttgaagacgctaggctcagtggtatcagccagacagaaaagaacacagaacgtgtggttgtccttacattcgacacataggattgtcagattcatggagacacacagtagaatagtggttgccaggggctgctggagaaggaagcaggaagctagggtataatgaggacagcatttcagatcaggaagatgaaaaagtgctggagacagatggtgccatgtttgaactgcagctaactggaatcccaccgtatactgtcctgagtcaggttccctcgtccaacagaatgctttgagattcagccttgttgtctgtttcaaaagtccaaacatttttgatggctgattaatattccattttaagagcatgccacagtttcttcattcattcttttgttgatggacgttgagttgtttccggctcttggcttttataaatcaagttgctgtagacattctttctcaggcctctttgtggacaggcattttgtctcccaggtgcatgcatgggaggcgatggctgggcagctgtacatccacctttagagacactatcgggtttccaaagcggctgcaccattttacacacccaccagccaggtatgttgc

SEQ ID NO: 1672 - DNA, 1100 bp, Homo sapiens
  misc_feature (1)..(1100): DMR10:130440901
ggtacctccagtagacaggaaaaggactccccaaatgttcatgtcctaatctctgaaaactgactctattgccttacgtggtagaggggactttgcagatgcagtgacatgaaatatcctgagagggagagatcatcttgaattacctggctgggccaatgtcatcacaagaagggtccttacaagatagaggcagacccaaggcagaagaggagacacggcgccagagcacaggcttcttccgccggccggagggatgcgccgtgaggtggagggaggagtctcgagccagggagtgcagatgctcctgggatctggggaaggtcaggaaacagacgctcccttagagcctccagacggaacttagccctactcgcgccatgatcaagtgtctgacctccagcgctggaagggagaatcttcagaagagtatctattttctaaagccactgagcttgtggtaattgtttacagctggaataggaaacggatccagcacctgatcctcccagcatggggaagcgtttatagagaaagagagagctgcagcaggcaaagcccccgaaatgcggttttcatgtgaaatcaatttcagaatgagtgctggtcagctctcccaagtctcctcctcacccgactccagtgaagaccattgatggtgttttgctgcaggaagtggaatatgcatatgcacggaacaattctggctaaaagcagcctatgcctcccaattgcagcaccgcgtaaaatgcccattaaacggaaacctacgggttcctttcatgaagttttcatgatgtgtttaaagtaaaaattgtgagaatgtcaccctatcatctttttcaaaggtgcagggaaaaggtaagaaaaaaggaggagtaaagtgatgtttccaacttttgaaggcgtcatttttctgagcactcaaattctccatggaagacgtaacacacacctttggtctaaaaggatgctttgtagttttacgttcttttgtcctctgtattttatatctcagcatgtcctttctttgtgttcagcgtgttgtctttatttcaattaactagatgccaaatatatcttcagagaggtttccgagg

SEQ ID NO: 1673 - DNA, 300 bp, Homo sapiens
  misc_feature (1)..(300): DMR10:130671501
ccaaatgatgttttttgactccaagtctcacatccaagtcatgctgatgcaagaggtgagttccatggtcttgggcagctctgcctctgtggctttgcggggtacagtgtcccttccggctgttttcatgggctggcattgagtgtctgtggcttttccaggtgcatggtgcaagctgtcggtggacctaccattctggggtctggaggatggtggccctcttctcatagctccactaggcagtgccctagtagggactctgtgtgggggctccaatccaacatttcccttctgtatggc

SEQ ID NO: 1674 - DNA, 1000 bp, Homo sapiens
  misc_feature (1)..(1000): DMR10:131339001
ggctatatgttttcatttctttttagaaaagatatgaatggaatttctgggttttgtgaaaagtgtatgtttaactttataataagttgtcaaactgttttccaaagtggttgtaccacatttaatctctccggaaatgtaagagggtttcaattgcttctcatcttcaccaaaaatgtgattttaaaattgcatccatgatgatgttatgcagttctatctccctggggccttaacttgccctttcatgactgtaaatgatactaagcagctttctgtgtgcctaatgctcattcatgcacgttccttcaacaaacccctcttcaaatattttgctgggtttttaatatcgaaatttaaaatcaattacttgaggtgtaatttacatagggtaaaatgcactcatttaaagcatatgctttaatgtcatactttgttgaagtgtccgttccagtcttttgaccattttttattaggttgtttatcttctcattgagttgtatgggttatttatgctttggatttaatttcaagattcagacatttatcacggataaattgctcctaggattgttgcaagcttgtggttaatttacagggtcctgaaaaaattgattttgacagtactatagagtgttctgattgcctttatgaagcagtggatttccagagttcccagcccctctggaagaggctgctcaaagaatgttcgctgtccatgaattaccttggcattgtattctgttcactggggctactagtctacccttatgcaaattatacattttcttattaaggtagctctatcttaagtcttaaaatcagatagtatgatcacatgaaaattaaaactacctagaaaaatgaaaacaattttttttttttttttttttgagatggagtttcactcttgttgcccaggctggagtgcaatggcatgatctcagctcatctcaacctccacctcccaggttcaagtgattctcctgcctcaacctcc

SEQ ID NO: 1675 - DNA, 1400 bp, Homo sapiens
  misc_feature (1)..(1400): DMR10:131406801
cctgcactcccacagggtcccggaagttcccccactcagcggcatctctgcatgtgtcgggagaaggacgggacatgtggacgtcatgaccgcagagcaccgtgagccgtccttgggagcagagcaccacttagggtttgggtagaaggttgagggtgcacccacctggagagagcctggatgggcaccttcctgcaggttacatgtgtggacaggtgtcctcggaggcgagccacctctgcctggggacagcctcgctggtattttaaggccagacaggctttgtgagtggcaccaaggagggagcacaccctcctggtcactgtgctctttgcacctgtgtgggggacattccagcaaatgagtacctggcgaggggaccagcactcagcagtgaggtcttgtctccaagtgcaaggaggggctgcccaagcagcccagggcattccatggctccatgggggcagggagacgatggacattgagccacggaaggtgggcgtcacctctcatgagcaaagggggagcccaggaagagacgaggagccaggagctgcagttgcctgagccacaagcctcagacatcccaggcaacggcacagccccagccccaccatgagcctgagctgtcctgggacctctagggccaatgacagagcctctctgtgcctcgacttctctaccaagaaaggttgacaggagtgcgcttgtggggaagtcgtgagaatcaaaatgaggtgacagaaacacactgagtgcagtggcccacacctgtagtcccagcattttgggaggccaaggcaggtgaatcacttgagctcaggagttcaagaccagcctgggcaatgtgaagtaatgctgtctctaccaaaaatataaaacttagccaggcacggtggtgcgcacctgtggtcccagctactctggggcccaggaagttgaggccccagtgagccataatctcactactgcattccagcctgggtgacagagtgagaccatatctcaaaaaaaaaaaaaaaagaaagaaagaaagttaacagacacaacaaagcctaaagggctgcgggcgctgcacagacgcaaagcttcctgcatcacgcctcttacctgcatcctccttttctccctctgcattttcttgaaagggagttgtgattcctgagttcatcctaagctctgtgagcattcagactcaagccagcatttcagccacaggaaacagacagccctttaggaattgctctgcccagataatctgatctaagtcctgcccttaggtggggattcgggagggctgagcatctctctaaacctattacgattctctcccaggatggggatcatggctgttcagaaactgttcttgtttatgcttcatttgaatggttaatattaaa

SEQ ID NO: 1676 - DNA, 1500 bp, Homo sapiens
  misc_feature (1)..(1500): DMR10:132849101
tgcgccctccacacgggacttgacgtctgctctgccctggcccctcctcgctggagcaccatcagcagcattcatggatgaggacgcagctcacaggaggccctgccgaccctcgcttctggtccacacccacccgctacctgagcaggccaatggaggctggttgcatgcagagcctcgattccatcaattcactcgaggtacatcaagtcctgtgctaggtcctgaagacgcaggacagacatttcagggccgacccagggctgcacggcacctggtggggggattgccctgggcatggagccaggcacatatggcgtggttgctccagtccctgagggcatcttccttaggagctggtgtgtggggacgagcccagcttctctgctggggcaggtgccttccgggggaggagctggcatctgcacaagtgtttaggaaggtgacctggggccttgcgtggcttgtaggggccatcaccagggtcctgagggagcaggtcactcctgcagctgactcagcccagctgggcagccttgcagccttctggagaagggtgggccctgggctgagagtgaagaaggtcccgaccgcccttctcagagccacctgggcatggaggcagcagcctccctgggctgtagggggtgggggatggaggggagccaaggctgcctagggctggccctgctgtgcactggcatgggggccacggcgcccggtgctcaggcccaccctaggccgctcctgcagcttctgagctccccaggtccctgtgcggggcctggccagagccgctgctgcgggacacaccagttgcgttgctccacgctcgccagcacagggcttgattggggcgggccgcgtgctggggcgggctggctctgtgctgctgtgggccgacccaagtgcccgcctgccctccttgcctactccacagacactgtgtttccctcccaggtctgttccggaaggcctgagttttgccagccccatttcttccctcacgcctacttcctacatttttctctcttcctggggccactgctgcaatcacaggagtcctaaacacttcgcttgtgtttttcaggcacgggtgactggtgttggagccagacttgggatagaagcaggagcacctaccgaggggcccgcctcccagtagcaggtagggtgcacagggtcagcttgcatggccagcaggtgcagggccctcccggccaggcccaggagccgggcgcggatctccacacagcccacgctcagcggctgcaggctccccagctgtgccagtgccccgtgtgctagagtccgcttcagcgtgaaccattgcttcgaaaagacagacatgttacagctgccaccccaagggcaaccgcccaccctgcccaggggacccagtgagcccgccctctgctgtgccctgtgggtgggaacactggggagctctgagaaagccttgccccgcagggagggtctccagggctctggtgtgggggt

SEQ ID NO: 1677 - DNA, 4000 bp, Homo sapiens
  misc_feature (1)..(4000): DMR10:133029701
gttctctccccaaaggcagaggctgctcctgagccttgggccataggaattcagggcatcacactcccagagggccgtgaaacagctggacacctcaccgcatgcctgggctggagtggtgtcacaagaacagagattgttgcaacccaacaacgtgccgggaaacccaaaccacaggttcccccgttcctccaggacacccaacaacgcgccaggaaacccaaaccacaggttcccccgttcctccaggacacccaacaacgcgccgggaaacccaaaccacaggttcccccgttcctccaggacacccaacaacgcgccgggaaacccaaaccacaggttcccccgttcctccaggacacccaacaacgcgccgggaaacccaaaccacaggttcccccgttcctccaggacacccaacaatgcgccgggaaacccaaaccacaggttcccccgttcctccaggacacccaacaacgcgccgggaaacccaaaccacaggctcctcctgttcctccgggacacaggaggccacgcccaccacgggggaggcgccggggtcccgtgtgccggggtctctcagtgacacgggagctccttgtccacaagggcaggcacctcagagccacctgagtttcaggacgtccctgttccattgcagaacgcatgggtggtcctcgagcccggctctggcctggtcccaccgaacccctgggtgtccaagggctcttcacagacagacacaccctcaacccaccaggcgcgggcaggttgggagacgcacaagaagctttggaagctggacttcaattcgtcttttctcattcaacacaaagacgtcactcattcgcaggacggactctgcctcccaggcctggaccccagtcactgggattggacgttccagttaaaaatacaactttagaagcacctcatttgagctggcctcgagaacaacaaaatagtctcacacagaaactccaggaccactcgcagctagcaccagtacatgcggttctcgtcctctaacagcaaaaggtttgttaaaaaaaaaagagtctgcactttccaacaaaagccaaggacgcctgtcactgtgcaaccatcaaagggaaggcggatgcatccctcattatgcgctggccctcagagtccgctccgttttatttgtgaaccacgcatcaaaagcccactggttcctccggtgttgaaggcaggaattcaagaatgcagctcaacgggcccgcccactgcgggccaggaagccggctccgagctgcctttgaggacgcacctgccgctggccgagctccgcggcgctctgaggtctgatctcgcagcagatggaagagtggaaggaacatcggaaagacaggcgctgcctcctgggattgcagctggagaatgctccgtgccgcggaggccgcgttggaggcccaggtggtttttataattgatggtggatgagaagaccgggccgcgggtggcatgtaggcacctggcacacacgtcgtctttgacctgcttttaaagcacattcccgtgtgtcgtgaacaacgctgtccccggcgtctgctcatcaagaggtgcgaggtgcttctgccggtttctcctccgctggggacgcaggccgggagtttgctgctctttcacttgtttaaagttttcgttgtccttcttcatccggagcccgcgttctgctctccgtgtgtcttccagcgtgattagcgagctgtgggaatgggggcagtttttcttccaagcttccgctccctgggaactgcaggaaccctacaggcggccagagatgcaggaggctctgctcttgcagtgaggtggatccccagccgggattgccatttagggtgagatggaagaggggagccgcgctccatgtcccctctgaggggcccagccactggccgacttgtccacctggccggaggcacctgcccagccttgttcctctccagccccgcagagctcaggcccagcatccccataactggacagggtgatgggactcccagcaaccacaggcactcatcgccagagggggaccagctccttcaggcctctccctgctgaacggggctgcactgggccggatccagctccttcaggcctctccctgctggacggggctgcactgggccgattccggctcctgtggggccccacgaggctcctggctccggttcctgctggctgtccatcctcccggcctggccacatgttcctgctccgatttctctgagcccagctctttctcgccctgggcccgtgtcctggctcatccccctgccaggaatcagcctcccccactcctggtataggggtacagcatggccgttcccccactccccagggctcagttcaaggcctctcccaagagaggccatcctgtctcccacactgtgtgctcacttgggtcccccagcaggagctccgaagacaggggccagtctgacttgtcgacgctgtggtcccagcaccagcccggtctttccatggaggctcccacaactgcctgtcagatcaatcagtcgattggcctggagcctgggggtaaggcaggggcatcccacctgagccgatcaggggagccggcacccagcccttgtaagggctccatcctgggatttgagatctgtctgtgggtgcaggtggcgggaggcgtgtggggtggtgggggtcattgaccggccacctagaaagtaacagaggggcaagagctagccggggcacggaggccatcactgggcaccaggtgctgaggcaccagacaggtggggctcgcctgctccagaggcctgggcgcagagggcgtctttgccaaacagcccagagtttctatagtagctcccacctgagctcacagcctcatggagcacagaggccggagggccatgtcactggcgtggggagtggggagtggggctgcctctgctggagccccccaggcagctcacgctgaaggccagcccaggaggggcctctctgtgatggacactgtcctctccctgcccccttctccctcctcatgggaatgtggctatcccggggtcactgtgggtcaagggagaaagtggacacgggtgtcccggggagcagacacctgcaggtgtgcagagagcagggcctggtcacagcgcctcggtcatgccagcccagggaaccctctgctgtggtgcgacctcccaacctcgtgttgcaatgtgatcccccgtgttggaggtgggacctggtgggagtgtgtgggtcacaggtggatccctcaggaggggcttggtgccctccctggggcagtgagttcttgctctgagttccccagagagcggcctgttgaacagagcccagcacctccctcccctctctcttcctttctccgtccccatgacatgctggtttgcgttcgccttccaccaagagtggaagcttcctgaggcctcaccagaggcagatgccggggccacgcggcctgtgaagcctgcagagctgtgagccaaaggaagctctttttaaataaattaccagcctcaggcagtcctttatagcaacacagacggactaagatcccctctcttccaagggggtgggcacctccaccctccatgctccttgggcagcctgggggcctcgacagcagacccccactcagctcctgcatgtctgagacctgaccctgtctgcatgctctgtggccaccaggcctcacgaccaaggcccaggcgtgtggggtcaggcagccaggagggccagctctgcccagagatgcggccctggaggagtggaggcattgacagtgctggtcagggtcgtgcaccccctctgcaacccagccttctcaagaccacacaggaaggccagccgagccacagggcggggctgcaaaccctgactgaaaacccactagcgtcagagtcctggggaggcgtgagagcgaggcgtgatgaaggcaggaggggaggggaggtccacagggcctggagggaaccct

SEQ ID NO: 1678 - DNA, 200 bp, Homo sapiens
  misc_feature (1)..(200): DMR10:133111701
caccagaccacctgcccgccacgggcacctccctcctaatcccaccagacaacctgcccgccacagacacctccctcctaatccctccagaccacctgcccaccacaggcacctccctcctaatcccaccagaccacctgcccaccacgggcacctccctcctaatccctccagaccacctgcccaccacagacacctcc

SEQ ID NO: 1679 - DNA, 4300 bp, Homo sapiens
  misc_feature (1)..(4300): DMR11:484301
gggatgctccaggctcctcctgtccactccccaccctggtcctggaatcagccccttctccaagagccttgggtccttactgaatattaggaactgaggcctgggtgttgggtgggctgcgtggtcctgggtgccatagctcacagaggacgggcatgtgtgcactcactgtgtgtgcaggcgtctgtaaacacagccagtgcaggggtgcgtgtgtgctgtgtgcgcaggagagtgtaaacagtgcacgggcgcgtgtgtgctcactgcgcaggcatctgtaaatagtgcatgggcgtgtgtgctcactgcgcaggcatctgtaaacagtgcatgggcatgtgtgctcactgtgtgcacaggcgtctgtaaactgcacgggcgtgtgtgctgtgtgtgtgcaggcgagcgtaaacagtgcacggatgcgtgtgctcaccgtgtgcgcaggcgagtgtaagtgcacgggtgtgtgtgctgtgcgcaggcgagtgtaaactgcacgggcgcgtgtgctcaccgtgtgcgcaggcgagtgtaaacagtgcacgggtgcgtgtgctcactgtgcgcaggcgtctgtaaacagtgcacgggcgtgtgtgtgctcactgcgcaggcgagtgtaaactgcacgggcgcgtgtgtgctcactgtgtgcgcaggcgagcgtaaactgcacgggcacgtgtgctcactgcgcaggcgagcgtaaacagtgcacgggcgcgtgtgtgctcactgtgtgcgcaggcgagtgtaaactgcacgggcacgtgtgcttactgtgcacaggcgagtgtaaacagtgcacgggcgcgtgtgctcactgtgtgcgcaggcgagtgtaagtgcacgggcgtgtgtgctcactgcgcaggcgagtgtaaactgcacaggcgcgtgtgtgctcactgtgcgcaggcgagtgtaaactgcacgggcgcgtgtgtgctcactgcgcaggcgagtttaaacagtgcacgggcgcgtgtgtgctcactgtgtgcgcaggcgagtgtaagtgcacgagcgcgtgtgtgctcactgcgcaggcgtctgtaaacagtgcatgggcatgtgtgctgtgtgtgtgcaggcgaccgtaaacagtgcacggacgcgtgtgtgctcaccgtgtgcgcaggcgagtgtaaacagtgcacgggtgtgtgtgctcactgtgcaggcgagtgtaaactgcacaggcgcgtgtgctcaccgtgtgcgcaggcgagtgtaaacagtgcacgggcgcgtgtgctcaccgtgtgcgcaggcgtgtaaactgcacgggcgcgtgtgctcactgcgcaggcgagtgtaaacagtgcacgggcgcgtgtgtgctcactgtgcgcaggcgagtttaaacagcgcacgggcgcgtgtgtgctcactgcgcaggcgagtgtaaactgcacgggcgcgtgtgctcactgcgcaggcgagcgtaaacagtgcacgggcgcgcgtgtgctcaccgtgcgcgcaggcgagcgtaaacagtgcacgggcgcgcgtgtgctcaccgtgcgcgcaggcgagcgtaaacagtgcacgggcgcgcgtgtgctcaccgtgcgcgcaggcgagcgtaaacagtgcacgggcgcgcgtgtgctcaccgtgcgcgcaggcgagcgtaaacagtgcacgggcgcgcgtgtgctcaccgtgcgcgcaggcgagcgtaagcagtgcacgggcgcgcgtgctcaccgtgtgcgcaggcgagtgtaaacagtgcacgggcgtgtgtgttcaccgtgtgcgcaggcgagtgtaaacacagctggtgccctggtgcgtgtgtgctgtgagcacaggtgtctgtaaatgatgtaaacctcccttgacgtcaggcccaaaagcctgccttgccctaaggtcaagaggtgtatctggctgatgccagcgtctgggtgaggaaagagcaggttccacaagggcgactcctgtgagggtgttggcctgagcgcgcatgcggggaggggtcggggtgggggcggcgcgccgcagtaactcagggccccatcccgctcccgtctgtccagcggtcctagacccccatgtcctgaagcgcacctgtgcccacctggccccggggagcgcaggtgtggagatggggtgtcgtgcctgggggttccttccccacgcgctgccccaccaggatttccctggggtggggagggctgctgagacagggcgctgccctcctccagggtgactgagatgcagtttacaaccatgatctcctggccgggcgtggtggctcacggctgtaatcccagctctttgggaggccgaagtgggcggatcacgaggtcaggagatcaagaccatcctggctagcacggtgaaaccccgtctctactaaaaatacaaaaaaaaaatactagccgggcgtggtggcgggcgcctgtagtcccagctactcgggaggctgaggcaggagaatggcgtgaacccaggaggcggagcttgcagtgagcccagttcacgccactgcattccagcctgggcgacagagcgagactccatctcaaaaaaataaaataaataaacaaccatgatctcccgtttcaagttgccaccactaactgtagccccgctgacgggggcactggccttgcagactgtccaggacggccggcagtttctaaagtatgttgaccccaagctgggagtcccactgccagagagagactacgggggaaactgcctcatctacgacccagacaatgagactgacccctttcacaacatctgggtaagacgccgggggccctgaggcgagcccctccccaggtgtggccccgtgccggaccaggcgccatccacgctcctgcctcgcacccctcagcccacacttggggtctcctggtgcagagatgtgctgaggccctgtccgtctggatggtgctcatggtgggcagggggcccctgctctctaggctgtcgtggacgtggtctccacaggccacggcagcacctgtgagtccctggccttcttcccggggtctggcaggtgctgctcaggtgtgggctgatctgccggtgtggggagtgggggtggctgtgccccagggtcaagggtcataccctgtcgcccacaggacaagttggatggctttgttcccgcgcactttcttggctggtacctgaaggtacggcacctcctcttcccggcctccccgccccggttctgaggcctgccgtgggctctggaccgtttctgtccatggagttgagctcagggtgctctgagtgtggtgggagggtgtcgcactgcagccacccagaggttcgagaagccgtggggctcccggacctcccagaagccctgatcctggtcgggtccccgctccgtcctcagggtcggggcggtggaaagaggcggcagggcaggaagtcccgcccctgcctgggcttgggcactgccccatcccacttctgagggaccctgtgctacctatggggctaagagcagtgcctgcttgaccctgcagcccaccctggcagagtttggtgtcaggccccgggcacggggatgctgccttgtttgctgacagtcgtacatcgaggctgctggaggggcagccacccaccccacgctcaccctgagacctcactgggggccctgccagtgctgtcgactccaagaatgctgccagccggggtgggggctgcacgcacccgtgggcagggccgggcgtggcctgcgtcccatactctggctgccagccgggtgggggctgcacgcacccgtgggcagggccgggcgtggccggcgtcccatactctggctgccagccggggtgggggctgcacgcacccgtgggcagggccgggtgtggccggcgtcccatactctggctgaccctggcgcccacagaccctgatgatccgagactggtggatgtgcatgatcatcagcgtgatgttcgagttcctggagtacagcctggagcaccagctgcccaacttcagcgagtgctggtgggatcacgtaggtgccagcacagcccccggggcagtcggtgcaggctgaggggcattctcggaacccctgtgcccagcgcggcccctggaccccctcattctccccggggggcagtgggtgcaggctgaggggcattctcggttcccctgtgctcttccggggtcctcctcggggggctcgttacccctcacccctgcaacgagtgctggcccctccctgcagtggatcatggacgtgctcgtctgcaacgggctgggcatctactgcggcatgaagacccttgagtggctgtcc

SEQ ID NO: 1680 - DNA, 4500 bp, Homo sapiens
  misc_feature (1)..(4500): DMR11:549601
gtgatgcctgcagcctgccagggaggggactgagccacccactatgagggcagcgccttgggcacagctgagccaccggtcacgagggcagctccccaagccaggccctccagggcttggagaaggtgggggacactgtacccacaccagagccagaaggccaaggcagagagccccttcctcagtctagaggccaccataggtggtcacacctgcccctacccctgaagacagccaaaggcaggtggtggctgagcacagggctgggcacatgttgaccaccaaaccctgccttctgcagggacttgggcacgtctctgggccacctgcaggtgctgtggctggctcgctgtggcctcgctgacctggatggcatcgcctctttgccagcacttaaggtgagtctgggcaccctgggctggggaggcctgggctgggccgggccctggctcagagccccgcgctgcccaggaactctacgcctcctacaacaacatctcggacctgagcccactgtgcctgctggaacaattggaggtgctggacctggagggcaacagcgtggaggacctggggcaggtgcgctacttgcagctgtgcccacgcctggccatgctcaccctggagggcaacctggtgtgcctacagccggcccctggccccaccaacaaggtgcgtgtcccgggcacccggccagcatgtgcatggccaggagaggctccctgtggctccagccccggggcccctcctctggccaggtacttctgtgcccacccgcaccctatggcctgctcaccatgagttcacctcctctgtcactggaagtctgacggctcccaggacaccctcctggaccagccccgctagatcccacagggtcacctgcacacacgccatgtcccttaacccacatatgcacctgtgaggtccacacataagccacgtggaaacacaaagaaccacgtgtacacggatgtgtgcacacacacacctgtgtacgccctgtccagagccacctccagccccacaggccccacagaccaccctatgcagtatctcggggctctgcgtgccctgctcagagctggcacacctgtgcgtgcaggccctggcgtagctcacagaccctacacagggcacatctgccctgagctcacagtgctagcctcattagctgctgcttggtgctgccacatgctgaggtcagcgtctaccagtgcccagtagctactgctccgtgggccagagccctgagctgagggcagttccatgggccagagggcatccctggacccggccttgggtctggagagtggggtcctacatcctgagcaggtgagagcccagtccctcagtccctggggtgtgagagtgacccaagcccacccctgcagggtaggcagcatccccacctctgggcccctgccctgccccacggtgggtctgggaaagggagccagggaaagagctggccggaaggaaacactggacccagacctgccctccctccccctccccctccccctgcaggtgcccaggggctacaactacagggcagaggtgaggaagctcattccccagctgcaggtcctggacgaagtgccggccgcacacacaggcccaccggcccccccgcggctgagccaggactggcttgcggtgaaggaggccatcaagaagggcaacggccttcccccgctgggtacggcagctgcgcccggaggacccactgctgagccccagctccccccaggaagaggcccccaccccaggcttctcagaaacggatagccacatctcatgcgcttctccagccttgaccccggtccccagagctgtgcacacccggccccaggccaggacactgtctctgagcagcccacagagggagaggaaggtctgaagatgagggcctctctagaaggctgcagcgtgagaggccagcctcaggccatgcagcatggggattggggcccctggtctgtggacagagtctggggggcgctctcaggctgggccttggtgacctctgcttctgaacctcgggcagactgtccccgtggagcccccatccggagacttgaccccgagctgtccctgcctgagacgcagtcccgggcctccaggccctggcccttctccctgctggtccgtgggggccccctgcctgaaggcctgctttctgaggacctggccccagaagataacaccagcagcctcacccatggtaactgacttgcctcaaagctgaccctgcagcccctcggccccgaaccaggcccagccatgctgtctcttgcaggtgctggccaagtcctctgtgggaaccccaccaagggcctgcgggagcgtaggcaccagtgccaggtacagcccacagggaccagccccccacgagaaccagtgtccagggttgcggccctgacagtgccctgccctgccgccattccagggccagaatccctaaagcagtcccttttcctccccaggccagggagccccccgagcagctgccccaacacaggccaggagatccggccgccagcacttccaccccagagcctgaccctgcagacagctctgacttcctggccttggctgggctcagggcctggagggaacatggcgtgcggtgggtgtccctccagctcttccactgggtgtgtcctgtcccgtggggaaatcagggctggggctaccttggctgagtcatccccagtcccaaggctcgtggaccatccctgcatgtcctgtcccgtggggggatcagggctggggctaccttggctgagtcatcgctggtcccaaggctcgtggaccatccctgtgtgtcctgtcccgtggggggatcagggctggggctaccttggctgagtcatccccagtcccaaggctcatggaccatccctatgtgtcctgtcccgtggggggatcagggctggagcttctcctcctctccccaccctagccccctcccctataggcacccggagtcccaacaggaaggggctgtagccccctggggcccacggagggtccctgaagagcaagtgcaccaggcagagcccaagactccctccagccccccaagcctggcctcaggtactgagcctgcccgcctgccccccagtgcctgggagtgaccaacaccccacttctataggggggcccttaccccagatcagatgtgtcaacctggccctgcttcctcagccatgctctgagagggactgtaacagggaggcccccttctgggggtggggggctcacgaccaagggaggcccaacccaagtcctctcccaagccacggtccaatccctgtgaccttgtgtgccacccgggctggacgaaagagaggcgttccacaaaagggggtatgaacagagtccagaggagtcgggacagaaagaaggagccaccccagggcaccagcaggcagaacatggccactgggcagctttcagggacacaggcatgagtccgggggctgggaggaaaggcggccagcagccccactgggagaccaaggcaggagggtgctgccgcttcaccctgaagatggcacgcgcacttggggacatagaattaagccatgcagtgccctttacgaaggacactgacttcagtgtgatcacagctgcaaagcagagaggaccctccctcagcgggcaggcaggccgggcagggggcagtgtaagcaggggcgaccccacggtgggcagctgaccctcctctgtgcaggagcctggttaagggggctgggatgggcagggaacagggcaggccaagcctctgctcttccatatggtggtgggtgtctgtggagggggcagacagaggggtcaacagctggttacctagtggccgtgacctgcaggggtggagggagggcaggcagggcggccaggaggaggggagctgcagtggcctcagggcagggtcaggacaaaggcatgccagggctccagacaccggtggaggcgggtgctgggggacccaaggcttgggaaccggcccggggcggtcagccagtgaacaggctctcagggtcaggacacagatgaccgagggtcagagccaggccttgtggtctccttctcagggacaggacacagaggacccagggccagaaccaggcttcgtggcctccttgcctgccccagaggtgggcccgcccatgcgagtcaggggtcacagggctgggaacacagaaagtggggtgcaggggtgctgctgcctgtggacccccaaggaccactgcctcggggctgcagggccacgggtgggctgtggcctccccaccgggtgactcccttccctgacagcctttctgacgtcccatcactctgcttgctttctagagccctccgggacctcgagccagcacctggtcccttcacctcccaagcacccaaggccacgagattctggcagcagctccccgcggtggtcgacagacctgcagtccagggggcgtcggctccgagtcctgggcagct

SEQ ID NO: 1681 - DNA, 5000 bp, Homo sapiens
  misc_feature (1)..(5000): DMR11:672601
ctttgggagactgaggtgggtgaatcacctgaggtcaggggttcaagaccagcctggctaacatagtgaaaccccgtctctactaaaaatacaaaaaatcagccaggtgtggtagcacatgcctgtaatcccagctattccggaggctgaggcaggagaatcacttgaacccgggaggaggaagctgcagtgagctgagattgtgccattgcactccagcctgagcgacacagcaagactccgtctcaaaaaaaaaaattttttttaaatagataaataaataaatacgtataatcccagcactttaagacgctcaggcgggtagatcacttgaggtcaggagtttaagaccagcctggccaacatggtgaaaccctgtctgtactaaaaatacaaaaattagccaggcatggcagcaggcgcctgtagtcccagctacttgggaggctgaggcaggataattgcttgatcccaggaagtggaggttgcagttagccaagatcgtgccactgcactccagcctgggtgatggagcgagactccgtctcaaaaaataaaataaagtaaaataaagcagcagctgaaaaaaaaataatgataataaaataaatacataaataaaaagttcttctataaaaagtagaagctgggcatggtggctcacatctgcaatcccagtactttaagaggctgaggcgggtggatcacctgagctcaggagtgtgagatcagcctgggcaacatggtaaaaccccgtctctaccaaaaatacagaaaattagccaggtgtggtggtgggtgcctgtagtcccagctacttgggaggctgaggcacaagaatcgctggagcccgggaggcaaaggttgcagtgagccgagattgtgccactgcattctagcctgggcgacagagtgacagcctgttccacaaataaaaataaaaatagaaagtagaaaagaaatgggggaaaacgtttcttacatagatttggtgggaaaaatatgaatttgacttttgtttacaaaccaaagtccacgttaccgtacccgaaaaagcagctacaacaaaatccatccctgtcctttcctgtggccttcagagctccccatctgtgctgagcagacaggcgccctcctctctcaccttctcgtccccgtgccctgtgacacacggtacctgtctgctgggtttgggctatgagaagtagctgagaaacctccaccctctctccagtttactctggctctagtaatttctatctaccctattcatgtcacccacctgaacctttatattacctcaaagtcttcaatctaagtaaagggttcatatgaagtagagactccatatgaaaagaggccgaaggggcctaagtgaccttttgcttgtgctgcagtaataggaagctacagaaaacatgggcactacgccctgtgagcctcccaccatgcacaggagccgccttctgaagaacgtgccagaagctgggagggctttgtgacagcagatggacggagctcggctcccaggaaggggctcagcattcgccctgccagtcgctgatactcagagactcaatagatgatgttctccaaacttcataaaatataagcacatttcactacaggaagacaaaggatgaataatgcctagaaaaggtgagtattcacaacggccgatgcgcacaaaattgtttccctttctgaaacaaagcaaccttatttacaaaaaccaaaaccaccttaacaacaatagctgtcacttttctttaggaaaagcttcatttgtaaatgactctccacagctcccttttccagaaaggtggggcaggggccttgtgagccaaggtggggcttgcgcagctgggcacaggcaccagggtggcctggggttactcggcacaggtcgtgtcttcccatttgttccaaggttacctccttccgctctgcgtcagcgtggatcttggcctggtttgtggcagcttctcggtaggtgctggcatgcttggcttgctcaaacagcgtcttcagctgctgcgctgtgttgagcaaggagttgaccatctcttctaggtacagccagctccgcggctctgacagctccagcccattgaccaacgcgggaggtgccgctttggtgggagtcgggggtgggaccgccagcgcaggcagggatgtcaacactagagcatttggaaagcaaaacaaaccaagaaattaatacatctcctagcttcaaaatggcctccgttaaaaattctcagccgggcgcggtggctcacgcctgtaatcccagcactttgggaggccaaggcaggcggatcatgaggtcaggagatcgagaccatcctggctaacagtgaaaccccgcgtttcactgtgtttaaaaaaatacaaaaaaatacaaaaaattggctaaaaaaaatacaaaaaattagctggacgtggtggtagacgcctgtagtcccagctacctcgggaggctgaggcaggagaaaggtgtgaagccgggaggcagagcttgcagtgaacagagatggcaccactgcactccagcctgggcaacagagtgagactccatctcaaaaaaataaacaaataaaatttaaaaataaaaaataaataaaaattctcatcacccggtgcagtggctcatgcctgtaatccctgcactttgggagactgaggtgggaggatcacttgagctcaggagttcaagaccagcctgggcaacatagcaggaccttgcctctacaaaacagaaatcaaaaacaaagaactagatgggcatggtgacattcacctgtgatcccagctactcaggaagctgaggcgggaggatggtttgagcccaggtggtcgaggctacagtgagccatgactgcgccaccgtccttcggccttggtgacttaatgagaccctgtctcaaaaagaaaagaggccaggcacagtggctcacacctgtaatcccagcactttgggaggccgaggcgggcagatcccttgaggtcaggagttcgaggctagcctggtcaacatggtgaaaccccatttctaccaaaaaatacaaaaattagctaggcgtggaagcgtctataatcccagctacctgggaggctgaggcatgagaatcatttgaacctgggaggcagaagttgtggtgagccgagatggtgccagtggactcaagcctgggtgacagagtgagactccatctcaaaaaagaaaagaaaagaaaactctcacgcaatgttgggaagtcgggtaaaaaactgaccagcaaacaacaaatcactgcctgacatccccccagcacctgacaccccccagcacctgacatcccccagcacgcagcctgacatcccccggcacccgacatcccccggggcacctggcaccccccggcacccgacaccccccagcacccgacaccccccagcacccgacaacccccagcatccgacaccccccagcacccgacatcccccccagcacctgacaccccccagcatctgacatcccccagcacccgacacccccagcacctgacatccccccagcatctgacatccccaagcacctgacatcccccagcactcagcctgacatcccccagcacccgatacccccagcacctgacatccccccagcacctgacatcccccagcacgcagcctgacatccccccagcacccgacacccccagcacccgacatccccccagcacccgacatccccccagcacctgacatccccgagcactcagcctgacatccccccagcaggcaacacaggcaggaggatgtcccatcccttcctgctccacccacccagctccatgttgtacaactcatctgaatgcggctgctggaccctgaaatgttcgcagaatcagcgccgtggacaatgaccaggggagggaagtggctaaatcagagtctcgctgtgtcgcccaggctggagggcggtggcatcatcttggctcactgccctcccgggttcaagtgattcgcctgcctcagcctcccgagtagctgggattacaggcatctgccaccaggcctggctaattttgtatttttagtagagatggggtttctccacgttggtcaggctggtctcggactcctgacctcaggtgatccacccgcctcggcctcccaaagcgctgggattaccggcgtgagccaccacgcccagcggggtttcttacaattggagaagaaagttacaaaggaactagcacaaaccctgaggttctgcactggaactagagacactggggcaaactcatggttttcaacacacacagatttggagcacaaacacgcacacgtgcacatgagaacatttctgacttctgcccaccaagggcacctggggacagagatccaggagccacatgcacaccttgtaccaggggcaagcggtcgatgcgaaccccagccctcctggagaaaaagctctgatttcaagcatttgctgatttcttggtataaatacttcaccaacacccaccccacactttttttttttttccagttaatagagatggggtctccttatgttgcccaggccggtctcaaactcctggcctcggcctcctaaagtgctgggattaaacaggtaagccacacgcctgtaatccaagcactttgggaggccaaagcaggcagatcacaaggtcaagagatcaagaccatcctggccaacacggtgaaaccccatctctactaaaaatacaaaaattagccgggcatggtggcgcgtgcctgaagtctacactccagcctgggcaacagatcaagactccatctcaaaaaaaaaacaaaaaaaggatgagccaccacgcccagccctgaggtaagctttaaagatggaaagagtttagataggcaaaagagagaataatgaaacaagcaaatgaaaatgaaaaggtaagtttttcatgaacaagtttcttgcgctgtctgtgacagtgaaaaatggaaaacatgca

SEQ ID NO: 1682 - DNA, 300 bp, Homo sapiens
  misc_feature (1)..(300): DMR11:5467601
gggttgtgtcttcttggcatggtttttcagaggatttctttctttgtggctttctctgtgaatttgctgacagccttcagctatccctcttctgctcaggcatgtgcttaagcttgttgtctgggttgctcactgcaggacacgagcccatatttcagccaactatgctgccaagcaaccactgccactgaagtggacttgccagcccatcaatcaacaacctctgttaggcttcgatttggagtgttgattagctgcctctagtcattcaatcctctctgtagtcatgcccaatgatga

SEQ ID NO: 1683 - DNA, 400 bp, Homo sapiens
  misc_feature (1)..(400): DMR11:5491301
caattacaagaaaaagtatcacaagttcatgggtaagacaacagggtaagtgtcagctgtggccatggagagctcctagttcagttgtggaggtaaattcatgcacaaggagctgtcacaggtcagggacagtcatgtcttggcccagagaagctcagaggagaatgatcagaggggtggaacagattggaagaggaggaggtaccaggcaatggtgcaggaaggagacagcaaagaggattactgaaagagcttgaggaagctgggggtgattacatttcgagggggcctcaaaagccaggcccagataagaagacacgggcagcccttacaaataagtcaggctccactgaaatagtgatggatcaatctcaatcaattgttactgaagtttgaagta

SEQ ID NO: 1684 - DNA, 200 bp, Homo sapiens
  misc_feature (1)..(200): DMR11:5859201
acaaaaatgcattgctggtagtacctatttgaagcatacgaagaatagcaaaaatgagagattatttgataatttgggaaattatttcagagagagagagagagagagaatgtgtgtgtataaacttgggtgaaactatcagagataagggtataaacttcctgtttttcactaattgagaatacacaaaataggcagcg

SEQ ID NO: 1685 - DNA, 200 bp, Homo sapiens
  misc_feature (1)..(200): DMR11:7666401
gtcaagggttggtgctgacccatggtgagtgagggcaatggatgtcgtaccaatgggaggcctgtccagggtgtaccacaggttgaactggtctgggtgagtcctggcaatttcttcaagctcttttctgaccaagatatcctcctctgtctagaaaagaagcaacactgaaaaagcccctccagggccatcctcttgtt

SEQ ID NO: 1686 - DNA, 1600 bp, Homo sapiens
  misc_feature (1)..(1600): DMR11:9284901
ggaaataaattactttggccaaagctgaaattaactaaatctctggctttcacctataaaatggagatagaaacaaaaattctctctttagattccatggatatgacatttaacaaaattaaaaattccccatgctgatgtaagtttgtccatttttttttcttttcttttcattctttccttctttcttttttttttttttttgagacagtgtcttgctgtcgcccaggccggagtgcagtggcacaatctcggttcactgcaacctctgcctcctgggttcaagtgattctcctgcctcagcctcctgagtagctgagactacaggcacctgccaccacattcagctaatttttgaatttttagtagagacagggttttaccatattggccaggctggtctcgaactcttgaccttgtgatccacccgccttggcctaccaaagtgctgggattataggcgtgaaccaccgcgcccggctaatttttttttaaagtagcaataaataattgattttggttattcttttcaaaaagacatattctcacaagtattaacttaagctttaataggtattcaatatgtaagaaatctgctcgtatttttgacttctaaacaattcaactcgaactggaaagaagagcaaaacattcctacaaagaatcatgagaattcacaaaatatgtaagtaattttcatgtccactgattaatttcaaaatcaagtattatttccttaaaagcaagaaagtttgttgatccttgctttttccatacttttgataacatccgcgataaaagctggtttcagtaaaaggaaaaataggatcaattctctactgaaaattcaagttcaacattttaatacttgattagaaaacaaaggagctattttgccaaagcaacatttacaaaaaaaaaaaaaaaaagaaagggctgggtgcggtggctcacgcctataatcccagcactttgggaggctgaggtaggtggaccatgaggacaggaattcgagaccagcctggccaacatggtgaaaccccatttctactaataatacaaaaattagccagacgtggtggcgtgtgcctgcagtaccagctccttgggaggctgaggcaggagaatcgcttgaacccgggaggcggagattgcagtgagccgagatcatgccactgtactccagcctgggcgacagatcgagactcagggaagaggaaggggaagggacataggagaaaattgctcaaaaaaggcaatttgattttttttcctctccacttagagggactggaagtcctgcttaaccctatatcattaaaacgatatacagtagaaagtgttcttctttaaagaggcgacacaaaaataacctaaatcaacacaattcaacaaacacttctgagcatctatttatacagccaggctttgtgcccaagaattctagatggtgctggcataatctgcagagagcatgcatgtaatctagcccagctggacactgttagatatgtacacagtgagctcatacacagcaagaaccagagggcttacctagaaaagtaccaataaaaaaaactttcaatggcacgtttatcac

SEQ ID NO: 1687 - DNA, 1400 bp, Homo sapiens
  misc_feature (1)..(1400): DMR11:9925701
tgtcacataaagattttggactacattagactacaatacccttaaaatataggtcttatagtcctaaagttatagaaagtgtgattttctatctcttttcttcccacaattgccctttccttaggcttttggctgctatttttagaatactgtttagaaaattatggcaggggacatcaaatcagggtactgaacttgttatagggcaactgaaaaatgtcagtctccccaggctaaaaaataaggtttggaaccaacgtgataacgttttccatgaaattagttatagataaaagagagaacagtttgaacttcaaagggtatcaaagtcagacagcctcaaagactgatatgtggatctttcccctttgattttgttatgaaactgggctgtctccattgcagactatctgtaatctggcttaagttgtacttataaaagtgttttagtctccttgtttttttcccttttcacattgaactttggtcatttctacactgcataagtagaaaaatatttcgggtagactgtatttgattttcctgtagctgttagaaacttgcaaacctttttgtcactggtgagaattcaaaattgaagtttagccttaagaataaaaaaaattgtctttttttttttccttttaacaaactaccattggaaagactgaaaatcttaagtagggaaaaagcaaaaggatggcccctacttaaaatttcataatgctataccaatcaaaattcttatattagaacacacattcttttcaagtgcataaggaatagctgccaatatagaccatatactggaccataaaacatctcccaatgaatttaaaagcatgttatctgaacatgatagaagttagaaagcattaagagaaaaacctctgaaagatccacgcaaagagtataatataaactacataacataattctaaataacctaagcgttcaaagaagaaatcaaaagggaaatgagaaagtatttaaaaatgaataaaaatgaagacatattatataaaaatttgttggctgctaataaggcggtatttagtgagaaatttctagcactaaatacctgtgttagaaaagaagaaaggtttcaaatcaatcacattagcatctaccttaagaaaatggacaaagagctaattaaatataaagtaagtagaagaaaggaaataaaatgtcgtgtagaaatcaataatagacaacataaaaacaacagagagaaaatcaatgaaacccgaaactggttctctgagaaatttaataaaatgtataactctctagcttgactgaacaggataaaaaggggagacaacacatttttgccatgaggaatgagagagatgacattattctagattctatagatattaaaaagataataaaga

SEQ ID NO: 1688 - DNA, 200 bp, Homo sapiens
  misc_feature (1)..(200): DMR11:10555801
cctttataaaagcatacaattttgcagatgactccttctcaggatagagtgtctttgctcaaaggagtggatttattctgtgtgagccagggaggcaggcatgaagaaggggcattctgaaagggcagggaagatcctttgcaccagctgaaaatgccatcacgtggctctccacctgcctcttttgaagactggctgtg

SEQ ID NO: 1689 - DNA, 200 bp, Homo sapiens
  misc_feature (1)..(200): DMR11:11425301
ttccatccagccttcaagcacatgaagggctgggaaccagccattgccttgcttgaaagcagcagcaggagacaagtgatgggctggattcaggttgggcaaggcactgccaacccagagcagacagacatctccagggtatgggattcttaaaagaatatttgatattaccattgctttgatgtgcttttaatcacaaa

SEQ ID NO: 1690 - DNA, 1300 bp, Homo sapiens
  misc_feature (1)..(1300): DMR11:11639401
aactctgtatttgttttacatgttagctttctgcataagattttgtttgatagaagagtccaagagcttaaaagaatttgaaactctccatcaatgtgatttttgaggccccttccagtcagaaatctatggttctatacagatccttccagcactccagctatcttccctatcatctttacgtattttgactttatttcctctccataagcttctgttaatttgataattatctctcacagagatttaccttcacgtacaattttatgtcaatttttggatctcaaaatgatgacccactttttcttcaccacatgtactttcacttatcacaaccatcagaacagacttacctgccaaagttgacggctccactctgacaaggtggagactttttgtgagctgtccccatactgtctttgtttccctgagatgcaaatgaaaatatgtgcctttactttagaattatagctagtctgagtgttttagtcaactagtatcccccactgggcctactcagaagtctatgtaagaaagatttctaataaacttactgattttttaatatagtgaatacacataatatcaatgtttctttaatagtctggtggcttctgaaatctccctttttcaagaaccacctagaccagaggggttgctatggatagcttaaataagataccaactgaaacctgggagataaattaaatcaatagttatcaaattttctggtatctaataatcaatctaataatctccccctacagcccccaccaagtttctaattcatttgatctgaggtgatggcctggaatctatatttttaataagggactctgatggagatggtcacagaaccacaatttgagaaatgtttaggcttgatctttcagctgttcttaaccataggagtctgtggttaatttcaaattccagtgtatacaagagattcaaaacattcagctaaaagtaccgcaggaaaaccactggtcatttctaaatatttcttccttggtagtggaaccaaggcatgggaatgaaggagctgagatttcacccagtaagtaagggatctactggagatgagggggaggtctcttatctaatggtaccagtgatgccaaatcagagcccagagctggtaagttgctatggtgggagaaccaagatgaggaagacagccaaagcaggttctgaaagtgaagcataaagacaggaagacgaggaggtgaacataagagtggcagatgcaggcagtttctggaggagagcactcagtgagtcctagagacaggcacaa

SEQ ID NO: 1691 - DNA, 600 bp, Homo sapiens
  misc_feature (1)..(600): DMR11:12792001
cttccctggaactaaggataggtgggcacttagaagtgcttctgggatgggaggtcaggctgcagggtgatggacattgggcatgtgcttgggacactccttgaggcacatggagactatttgagatcacctctctgatcagaaagttgtttggtgagtaccaaaataagacaaaaatgagtaagtgtttttaagggagatttccctcaagctgtgtttggtagataactaataactctctgttctgggatattttctctctaggccactgtcattgacctctcaaatgcttgggggtgagaagggtaaagataatataaaaatatcaagaaaaggaaagtaaagggaaaatagtaaaaaaaaaaaaaaaaaaagtcctatatagtcctatgaagaaagttttgacctagatataaaaatataggcaagtctgaaatcttgttgcttttctctttagtttgccttcgttgatataagtctgtttattcatgtctgtatgctaaccgctgacacttaaatgtgaaattgttctcaggactctgctgcattgtcctactagtagaagtcctggttttagaacataaggtctggatatgtaca

SEQ ID NO: 1692 - DNA, 1500 bp, Homo sapiens
  misc_feature (1)..(1500): DMR11:14857001
ttatgtctgaagggttttctctttttgttcttatttaagtgttactatttgctaagattctgtcagtttgtattaaaccccttctcagatctttccaactcagagggtgaaaagtaagatttatgaccaactaatttgttttgccaaagtattgatgtatttgctgtagagagaaggatctatagctagaaaaagcaggtaacaagatgctttagcacaaagtcaaaggatgttagtttattgcagctccaaatgagctgggaccctgtcttttttctctgcttctaagagcccgcagtaagagctgaggcttcattatctgtttgcttgaaatgtttttcttatttggtttaagcttggtctgctgctctgtgtgctaccttcaagtattcttctaaagtagcattgacatttgcttcctacttactgcttcatgattctttcttgcctcccactcatctttgagcttgtgagtctactggggatcagcagggaaccccttccacttactcttcatataggctttttccttcttatgcagtgacttggttagcttttctcaatccattctcattttcaccatgtctttgaagtttccagtatggtcattatatctagattctaatactgattcagaccttcccccctccgcccattttatatttctttggcaatttcaaagggtaatttgaatggtgaaagaattccgaacttgctcatttttttaaaaaactgatcttgctatctgtaagtttattaagtcagctagcttcacagggcattcattgtacattgtgttgtattgagcccagaatcagattacttcctcctgaacagacagagctgttctcatagttaagtccttgtcacatttgagcatgaattagtcaaatcattattaaatgtaaatgaccccttagggagttttcgaagcttactctttctgtttggtatttataatgtttagaagttgtattacaggtggtatgaaatgcctttatatggctcattgcaaagtttaaatcataccattgcttttataaaaccaaatagcttaaaaaataatcacttagtgttatgcatctgtgcttaaatctaggctatagctaattttcacaaataagtagagctattcaattaagctctcagaatatgtatcctacctgagatctcattccgtccttctttctcattacacagtaggctccatgaaaacagggatagggttttaatttttatccctggcctttaacacaacttggctgtagaagtttttttaataattactatgcttatttaataatttaaagaattgcttaatttgtagaggtggaagaggctttagaaattctatactccactgattttaagtctgtattccaaagtcctagagtactgaggaggcacctcagggtcttctgctggagtgaagtgtagaaaaagtgagtagttccacaccatttgaaccagaggatttgtgtttttatctgttacatagtt

SEQ ID NO: 1693 - DNA, 300 bp, Homo sapiens
  misc_feature (1)..(300): DMR11:15339601
tttacattcaaggttagtactgatatgtgtgcatttggtcctgtcattgtgttgttagctggttattttttatttttttattttttttttttttttgagacggagtctcgctctgtcgcccaggctggagtgcagtggcgggatctcggctcactgcaagctccgcctcccggattcacgccattctcctgcctcagcctcccaagtagctgggactacaggcgcccgccactacgcccggctaattttttttttgtatttttagtagagacggggtttcaccgttttagccaggatggt

SEQ ID NO: 1694 - DNA, 1400 bp, Homo sapiens
  misc_feature (1)..(1400): DMR11:16894101
caggagggggaggttgccaaggtcctgtgagacttcgttcctcccctgcccatcatcactccatgacccagagaagggggaccatcccagcatcaggggttgggggacagactggacatctaatcagggaggggctctcactatctcacttctaggaaagggcaaaatgggatgatttcggaaattctccacccaaaccagtttcctcttcaatttcctaatgatgcccattcaggaagggagtcccagttagaggaacagagcaggaagaaggctcctgacccacaggatcccacgtacctggagtttccagtgagcacaccactgtgcccaaatggaatatcccagcagatgtttctggttttattctttctttttctttttggttttgcaggatgcaaggcaagatggcagggtgagcaggagagaggtatcaaatagtcagtggaaagagtgtggctttggagcctgaactaggttccaatcatagctccacactcgtagtgtaagctttgtaaaatatctcctaaatagtgcccaaaatgaagaaggtgaatggtaagggtacatgttcttgttggggccccttctccccacagaaaacctactgactccccataaccctaacagagagcccgccatcccagtgcacgagacttctcctgcagatatccaaaactgggggcaggggaggggagtagataaagaaccacacaaggtaaaagagagagatccataatgataacttcagtgagcatattatatacaaatcacatcataacatattacactccaggcactctgcaggcattatctcatatcgtattaccatcctaggaggtagttattattatttccattttacagatgaagaaactgaggatcagaaaaattaagggatttatataagtttacacagctagtaggaacagagccaggattcaaatccaggctttttgactccagaggtggagtcaaaggttgaactattccccatgaagacaacacggccaaaccgattccttacatttctaaggcaagaagaaaactccagtacagggtaagggtttaatataagaagctatcttattaggggcctccatcctctgaaaataaatcactggccctcctcatttgtgtctagaagtcccagcaatcaggcatggacactgactggctggaaacctgcaggttagaaccccgaacttgctactgacctttaacccagaataactcctacctctgaagaaggtaacataaagaaatgggagcacaaagcatcctcgactgcaccatccacctcttcagagcacttcctcctttggcaacagctgcacatcactgactctgaatcacacatttatactgcgcctttccagatccagactcagttccctagt

SEQ ID NO: 1695 - DNA, 3400 bp, Homo sapiens
  misc_feature (1)..(3400): DMR11:17140601
gcaaagctatagaaataggaaccagattagtagttgtctggggctgaggctgggagtgaggattgactgcaaatcagtacaaggaaacttttttgggagtgatgagaatgttctaaaactggattgtggtgataattatacaactctatgcattggctaagaatcactgaattgtgtgcatataatgggtacattttatgatatataaattatacctcaataaagctataaaaataaaggagggggataagtataatatagagttactattttagataagatggtgagtaaagaaatctctggtgatatttgggcactgaccttaaaaaagtgtaagggtgagccatgcaaatgtcacagggaaaagcatttagaggggaacaacatgcacaggggtccccagtggggaacataactggcagataatcaaccagaaaaaaaacaaagggaagtgataagaagccagatcagagaggtagtgagtccatactgtgcggaaccttgaagctacaattagggctttgaattttactaagtaagagagtaaacaggattctcagtgaaggagtgacatgatctaacactttttaaaggatttacaaacgttatcttttcaaagccccaccttctgcctttgattttctcttattttgctttctgctcttcttttcttttcctttttttttttttttttaagacaggtctcattcacccagactggactgcagcagtgtgatctcagctcactgcaacctctgcctcccggtttcaaccaattctcctacctcagccccgagtagctgagattacaggtacacgccaccatacccggctaattttcctattttcatttttaaaatctttaccttttaataattttaaatttatagacagttataaaaaaatacaaagttcccatataatgttggaaaactagactaagtaaatcttacataaaccacgttacatttgtctaagctagacattaacactggtatattgctattaagtaaatttcaaactttattcagatttcaccaacttttccactaatgagctttttatcttccagaatataatccaggatatcacattacatttagtgacttattttcaaaagatcattttggttgcctgtggaagacatactgtagagggcaggggtagacactgggaaattagtaagaaactactgcagttgactagagtatagctttggtaatgatgaaagtgctcacattctaaatgtattttcaaggtggagctgaccagaattagactgaatgtgaaatgtataagatctttttcttgagacatcaaggatgactccagggttttggtctgagcaaatggaagacaaagttgccatttattaaaaagggaaataatgaggtcaagttatgcatgtgtagggaagggggtatatgaggtatctctgtaccttcctctcagtttgctctgaacctaacattgctctcaaaaaataaactcttaaaaagagaaaggaaaggtcgatggatgaatagatatgatgggtactataaaaaattcagttttgtacatcttaaatttgagatgtcaattaattagatattcacataaagatgtcaagtaatagatatttgagtctggagatgtggaaaaggttaaggttagacatataaatttcagagtcaatcagtatagggatataccaagatcacctaggatgtgaatacagagagaagaggtcctagaactgagccctggggatatgctaatgtttggtagtcaggaagataaggaagaagccacaagtaagagtgagacagagcagctaatggaaataaggaaagcagaaggtggtatcccagatgccaactaagtatttcaaaaagaaagacatgatcaactgtatcaaaaaatacagacaggttgagaaaaataaagacttggtgggcacagtggctcacacctgtaatcttaacactttgggaggccgaagcaagatgattgtttgagcccaggagttcaagaccagcccagacaacacagagaaatctgcagggggttgcagctgcagtgatctgtgatcacaccactgcactccagcttgggtgacagagtgacaccctgtcatccatccatccatcgatccatccatcaacagattaggaactgactactgaattcaggatcatggaagtccttgatgaccttaataagtacagtttcagggaagtactaaactgattggagtgggcatataagagaatgggaagaaaggaattggaagctgtaaaaccacttaactttcagaagttttgtggcaaggagaatagagaaatggtgtggctcctgcggcagggggcggggtggggatttttttttttttaagatgggcaactcttcatctacaatgattttcctggtgacctcatcctgcctatggctgcaaaatacaatttatattctgatgatttccaagtttattatctctagcctggacactccatacgaaactccagattctagtaaactccagcttaccagagatattcagtgaatatttttgaataaatatatttatatgttgataagaatgtacttgtagataaaaatatggaagccatcctacactcatactctttccccttcactcacatctcatcacctattaaaatcttttcaattttatctcctaaatattgttaatcagttctctcctttttaacttctccatgctctttatctttcacctggactgctataaaaacctttctaaatattcgctctgaaaccaatcccaacctgaaatctaacttccacaatacagccagagtgatttcagatcacaggactaaacaattcacccaacccaccctaggctaaaaacaccttaagtggctagagcaggagtcggccaactttttctgtacagggccaaacagtaacagcttaggttttcaggatacacaatctctgttccaactactcaactctagtgttggagcacaaatgtaaatgacaagaaagaatatgttaaaaaaaaaaaaaacaaaaaaaaaagggtatggggccaggcgcagtggctcacgcccaattccagcactatgggaggccaaggcgagtggatcacttgaggtcaggagttcgaaaccagcctgaccaacatggtgaaaccctgtctctaccaaaaatacaaaaattagccaggcgtggtggcacacacctgtaatcccagctactagggaggctgaggtgggagaatcacctgaacccaggaggcagagattacagtgaaccaagatcacatcactgaattccagcctgggtgacaaggtaagactctgtctcaaaaaacaaaaaacaacaacaacaaaaaatccaggggtgtggttttgttaatttttttttttaa

SEQ ID NO: 1696 - DNA, 800 bp, Homo sapiens
  misc_feature (1)..(800): DMR11:17608001
aaacctcactccaactgccggggccagagcttccctgtcctcagttcttccctgtcctcagtccttccctgtcctcagtcctgcattcagctcccagagccccgtccccaggatcccccaggcactcaccccaaccaccatgaacgcagtttctccttagtgtggttttttccccatttgctttccctgcatgggtccatttgtcccctccacaggatggggggcagggctgagctctgggactccctctgtgtcttcacctgacccagagttgctgccccatctcactttctagatgccaagccctcgggggctgcctaccccatctgcgagtggcgctacgatgcctgtgccagcccctgcttccaaacctgccgggacccacgggcagccagctgccgggacgtacccaggtgagatgccaggggctgtgggcatggagccaaggtgtgtgcactagtgtgtgtgtgcactcacatacacttgtgtatgagtgtttcatatgttgagtgtatggggatgtgtgtaccacggtaactgtgtctttccgtatatgcacatatgtcagcatatgtgactatctatttgtgcatgatgtgcatgcagcagagccttgcgtgtgtttgtgcgtgtactactacaactgtgcattcgttgtacacagctgcatgtatgcaggtgttgtgtgcagctgtgtgcatgtgtgagggtgtattcactgatttttgtgggagtctctgtggatgtgtttgcatgtatatgtaaaaattttggagtcctgcagggttggagggggtaca

SEQ ID NO: 1697 - DNA, 200 bp, Homo sapiens
  misc_feature (1)..(200): DMR11:17728901
tcttatcagatataggatttgcaattatatctcccattctgcgaattcttttcacttcctttgaagcacaaatgtctattttattttgatgagatccaagatccaagttatctacctgttccttttttttttttttttttttgcttatggttttgacatcacatctaagaaacgattacttacttcaagttcttctaaga

SEQ ID NO: 1698 - DNA, 400 bp, Homo sapiens
  misc_feature (1)..(400): DMR11:18914801
gctataaagaaatacctgagaccgggagatttgtgaagaaaacaggtttaattggctcatggctctgaaggctatacaggaagcatagcagcttctgcttctggggaggcttcaggaagcttccaatcctggtgaaaggcaaagggggagtgaggcatctcacacggtgagagcaagagtaagagagagagggaggacgtgctacacgcttttaaataactagatttcatgagaactcactcgctatcactacagcaataccaaagggggatggtgttaagccattcatgagaaaccatccccaccatctaatcaccacccaccaggccctccttccaacaccgggaattacaatcaacatgagatttgggtggggacacagatccaaagcatatcagcc

SEQ ID NO: 1699 - DNA, 2200 bp, Homo sapiens
  misc_feature (1)..(2200): DMR11:19546901
tctgtctcattttttacatcagggtctgggagatgatcagttggagtttaggtcactattgatacctggattctggaagctcagatgtagcctctttactgctcttcagaatggcaggcatagaatcagagtgggtgcaccggaactgtgtcctgctgcctttgaatattgacatgggggtggtccctgcctacccacatccaacagcagcctctcctgccctgcacatggcaacactgctgccccagacattgatggccccactggaactctggaggccagctctccaggcgatggaaagcagttgttcgttgaagtagccagggctgctgtgaagcaatctgcagagcccagcggagggccaggagcacacccagcagatgacagctttaaagatgctggaaacacttgggttcctcttacccacccccaaatgtaatgccaaatcaaagcaggatttaactatgaaacacaaaactgctgacaccaaaatagctttcttctggtttttctaattgcaaactctggatcacctcattgaagctgattttttccctttcttccctttcccaccactgctcttttccatccccccttggctgcaggagcctgaagtacatcctcacgctgcacactgtgtaatcaggcagagagggagctgctggcttccaactgcaggtttgatcttctctacctcttgttttggtctctctagtttttctttcattttcttttttcttgggaccccttactaatggaagggagtgggggctgagagcccgggggacaagtaggaccccctctcttccattctcctgagctctaagacttgtactttcagggaagtcataataatgacaatgatagtggtagaatagtggtaataataataataaaggatctgagaactcacttttactataagaaatgggctggatttttaagatgtttctgggttccaattccatactaattaaaacaaagcaattgcagtctggatagtaaatgtttcaatgtctggaacttggcggacccacagaaatgtttgaaggatgggtaaaggtgatttacagatggggaatcccagcctgcaagaggttaaataaccagccacacatcacctagctggtgagtaacagggttgaattcagactcagggggcctgactctgcagctgccatctttcctccttaaatatcttagttcgtaggataggtttagcaatgatgtctcctgcatgacaatttcatggctgtcggtaatgggtatctccaaagagcagttcacagacaaacataaaagaaagaaacttaaagaaagggcataacaatgaaagcaaaaccctgaaacagcaaagatgtgagtagtcaaaggaaaatcagacgaagagagaattcggttattacccttcacttggcaaacatttccacagcccttacagtgtgtcaggccttattctaagagacctgtgcctatataccctaggagggcgagcctgtgcttacctccatttcgcagatgcagtagctgaggcagaaagatgtcaagtcatttgcccaaggtctcactgatggttactggaaaggggggagtttatgaaccatgtgatccagcccacaaccaaagcgtgtgcccttgaccaatgtcctgccatccacgagtaatagtaaatttaaaaacactcttggccagcagcggtggctcacacctgtaatcccagcactttgggaggccgaggtgggcggatcatgaggtcaggagatcgagaccatcctggctaacatggtgaaaccccgtctctactaaagatacaaaaaaaaaaaaaaaattagccaggcttggtggcaggtgcctgtagtcccagctactcgggaggttgaggcaggagaatggcgtgaacccggaaggcggagcttgcagtgagccaagatcatgccacagcactccagcctgggtgacacatcaggctccgtctcaaaaaaaaaaaaaaaaaaaacaccctcaaggtgagtgtttaaacttgtaaacttttcaaagctattaagtagaggtgatggattctcttcattcccttctttttgtctgacctggggttacagataagaaaggtaagagtgaatgtcttccagattattgcttctcagagggagaggggcttgaagatcatctagaccctaaacaggtgaatgtctcagctttg

SEQ ID NO: 1700 - DNA, 200 bp, Homo sapiens
  misc_feature (1)..(200): DMR11:20031101
cacaggaatggtccaatcctcttccaggaatgatggttccagaatcatagctgcgtacactgtagttctttctgctgtgttatcgaggtccccaagccacttctctggaatttcatttcaccacatagtaaacacgaattctctaggttcctttcaagttgctatcttaatcactttttgtaactgctttcaacatttat

SEQ ID NO: 1701 - DNA, 500 bp, Homo sapiens
  misc_feature (1)..(500): DMR11:20358601
ccatttcaagcatattggtttttggcccttcaaaaccagccatacttctacctaccacagtgcttttacataggttattcctttggtatatatcagtaagaggacatacccatgagtgctagggaacctgaagaatttaacaaatacagtgctatcagctaaaaacaagaagaattatgctttcctgaaaacattctagaattacacaggtattactcatgattttgtcattgatctggatatccaggttcttgtcctggcaccaaagttgaatcccaagatcttagatgatatatttaataaacgtgtgactcagtttctccatctataaaaacaattagctatcaagaacacgatagatacactaaatcaactacctaaactgttgaatgcaattcatggttgtatttgttatgtgagagcagaaaattacaatactttctttcagacacctacctttaccaaatccaacctcttatgtgcccaaccagatatcttag

SEQ ID NO: 1702 - DNA, 1100 bp, Homo sapiens
  misc_feature (1)..(1100): DMR11:21067701
taatctatattctttaacagatttgtcactttgtttagaactctattctaggccgggcatggtggctcacgcctgtaatcccagcactttgggaggccaaggtggatggatcacttgaggtcaggagttcaagaccagcctagccaacatggtgaaacctggtctctactaaaaatataaaaattagccgggtgtggtggcacacacctgcaatcccagctacctgggaggtcgaggcgggaaaataacttgaactcgggaggcggaggttgtagtgagccgagattgcatcactgcactccagcctgggcaacagagtgagatgccatctcaaaaaaaaaaaaaaaaaaaaaaaaaaagacctctattctagaactatattctttaacagatttgttgctttaagtacatttttctcatagatggagatgtattcattctggtgtctagtggcctttggatgtatcctagaccctgtgcctggatgaatggaggtctttgtgcaagaaggggccctattgatataaatgatggctaacatttctggagtgcatatcatgtggtatgttcagttttataccttttacatatattacctcatttaatcatcacaacattctctccattttagaaataaacataaaaggcttaactaatttgcccaagaccatggagttaataaatagtagagtcagaatttaaagtaggaccatctgagtcaagtctactctttccacttcattagataaacaacggataattctataagaattagaatccactgagtggcctggaataaatgtagacatggaataggaacttgctatattagtctgattcttactctcttctcacttctctttgcccttcaacacacacatacacactgaaaacacacataatacttgaaaacacatttgtacgcagagataaatgggtgcagccagtgggcggggctgctgagcaaaaaggccagtccaccgataatgcagattgtttgctattgacgattagattcaggatcccaagtgcctccaatagctgtgcagtgtggctagaggtgcattgaataaatacttggggctgaattaattgagcag

SEQ ID NO: 1703 - DNA, 2500 bp, Homo sapiens
  misc_feature (1)..(2500): DMR11:24396701
tttcacttagtcctcactcagcactttctgactaagctacttaccaatccacagccaattcccctttcctttgcaaagtactaggagggagggaacgagatcccatacttagcagcaaaaagcattcagctacaaggaatacaatctccaactaaaataggcctgaaaaatagatgctatattattgaatgtgaaatctgtatgcagaatgtttcagactttgtgcactcaactaacagtatcaggaataaactagatacgtcacatcatatctatccacagtgtggaaagaaggttggcaatatctcttctcataattccaatatttctgtcctatctctaggcattacagcctcacaaggacaggatctcaaataggaaataagagaacagggattaaatggacttctctttgtatgactctccattgcaaacaggaaaggaaatctttcttagatctcttaaaaagatgttccttcatctcactttgtgtcccaccccctctagaaaaatcactagtaaatgccgtgggactgacctcatgggactcaaatgagatatgtattcatttagcaagaaaaacaatgctgattaaaaaaaaaaaagaaaagaaaaagaaaaaagaaaaagacagtgctgattatcttttggataggtggcatgacttctttaaggttgagagaaacaaattcttcccaaaacagtgccagaaataatgataaaagtttaggaacataattgaaatttcagaaaataggttatatttattgtgactaatgacgtaaattgtaatgattcaatcttgaagttagagctctttaacatctgggatgaatgtctttgttcctgcttcttttcatcatattcagtccataatatgaggcaggggttatcacagcagcagcagagctgagacatccacatgaaggagatgaatcatgtcagtgtatttttcttcaggctcttggatcatggcgggtgaagggggtgggcacacatgtggagacgaatgagccaaaggcaaacacaaaccttgctttgtctgggccaccctgcactgacgagcctgtggagatgtggcccacagtaataaatgttaaagaagaagaaagagggattctgctgaaaactattctgactgaaacatggaaagtgctgctgacttgttgggatatctgctaaaatagatggcttgagggtaacatctaaaatggaatttaccacagtacaggaaatcctcagtcaataccaatgcccataacatagtttgtaattaattacctgtgcaaatgggattggttggacagaagcaattcctacccagtggaaacttctttgtgatcttttactcttctggcatattatctgttccaagaaataatcttaaacttgagtcaccaaccttattttatctttaataaatacatttgaaaaaagtcaatgtaaaattaaccaggaatgttagcagcaatcgatttttagagtatatctgtagcagtattaataaaacacaagaaaatctttcattgacattttattttcttgactgggtgtaatggctaataataatattgatcatttttaaccttgtgctaaggactttatctcccatgcattacctttaatttcataaataactgaactgaggcttattttactagggctatgctactagtgagcgagagagctggtcttcaaattctaatctgttttatttataatagagtactttagagaatacgatcctctcatacctattacactatgggacaataagagatagattttttttcaggattacaggcatactaaggaagaagaaaaccggtataatgatagagttactacccctgtcccaaatgaagggcaaagaaagaactgggctcaaggctagtcaaatatttcctccatagcaggtgtatttgtcagagttctgcagagaaaaacggaatcactgggatctgtgtatctacctacatagatagaaagagatagattttaggggattggctcctgtgatgtggaggctggcaaatccaaaatctacaggtcaggtggatagactggagacccgtgaggagttgatgctgcagctccagtctgaaggcagtctagaggcagaaatttttctttctcaggaacctcagtctttttcactgaaggccttcaattgattggttgaggcctacatacattatggaaggaaatgtacttttcttaaagtccaagatttaaatgtttatcatattttcaaaactaccttcacagtaacatctagaagtgtttgcccaaaaattggttaccatgagtaccataacctagacaaactgacacataaaattaaccatcatagcaggaaagtggcaaccgagaaatgctacacagaacaatgggaaactataaaccaaataaaagtaaattatcacctaatattttattttgctactaagtcttaatattggctaacttcacaatactaatccttatcattacatggagt

SEQ ID NO: 1704 - DNA, 1000 bp, Homo sapiens
  misc_feature (1)..(1000): DMR11:24547501
aactagttagtcatatgcaaaagattgaaataggaccccttccttttaccatatgtaatacaaaaatctacttaaggtgagttaaagacttaaatgtgaaacctaaaactaataaaaaccctagaagaaaacataggaaatatcattctggacataggccctggtaaaaccttcatgacaatttcaaaagcaattgcaacaaaagcaaacatttacaagtgcggcctaattaaagaccactgcacagcaaaagaaactatcaacagagtaaactgacatcctacaaagtgggagtaaatatttgcaaactatgcatctgataaaggtctaatattcagaatcaaaagtaacttaaatcaataagccagaaaaagaaactacctcattaaaaaatggacagacacttctcagtagaagacatctatgtggccaataagcatattaaaagattctccacaccactaatcattggagaagtgcaaattaataccacaatgagatatcatctcatacaagtcagaaggacaattattaaaaggtcaaaaaataatacatgctggcaaggttgcagagaaaagggaatgcatatacactgctggtggaaatgtaaattagttcagccactgtgaaaagcagcctggagatttcacaaggaacttaaaatagaactaccatttgacccagcaatttcattactgaatatatccccagaggattataaatcattctaccataaagacacagacatgcatatgttcattgcagcactgttcataataacaaatacatggagtaaacctaagtgcctatcaaaggtgggctggataaagaaaatgtggtacatatataccatggaatactatgcagccagcaacaaaaaatgagatcgtgacctttgctgcaacatggatggcgctggaattaatggatgaagagaattaatgcaggaagagaaaaccaaataacacctgttctcacttataagtgggagctaaacatt

SEQ ID NO: 1705 - DNA, 200 bp, Homo sapiens
  misc_feature (1)..(200): DMR11:24597001
gagactatggtttatagcttgttttagggatgaagtagtaatttcaataaaagagtgccattatgagtgctattagaaagataaaatggttagagtcaaaaacaacacttgtgcattacgaaggagtaattaagggcagacataaagtgaagtgtaaaaatattaaataggtatactatatgtataagcatgtgtataga

SEQ ID NO: 1706 - DNA, 400 bp, Homo sapiens
  misc_feature (1)..(400): DMR11:25712201
cagcactttgggaggccaaggcgggtggatcatctgcggtcaagaattcgagaccagcctgaccaacatgaagaaaccccatctctactaaaaatataaaattagccaggtttggtggtacttgcctgtaatcccagctactcgggaggctgaggcagggaatcacttgaacccgggaggcagaggttgtggtaagccgagattgtgccattgcatgccagcctgggcaacaagagcgaaactccatctaaaaaaaaaaaaaaaagaaaaaagaaaaccacaatcatacactacttcatactcgctaagatttctcaaataaaaaagacatgaacaactacaattgctggcaaggatgtgaataaattaaaacctcatacattgctggtcaagatttaaa

SEQ ID NO: 1707 - DNA, 1700 bp, Homo sapiens
  misc_feature (1)..(1700): DMR11:28320301
atcacagcactttgggcagccaaggtaggaggaatagcgcttgagttcaggagttcaagaccagcctaggcaacgtagcgagaccctatctctacacaaaaatttaaaaattagctgggtgtggtggtgctcacctatagtcccagctattcagggggctaagatgggaggatcacttgatcccagggttcaaggctgcagtgtgagctatgtcatgccattgcacttcagcttgggtgatagtgagaccctgtgcccccgaccccccaaaaaaaatacctgtgcagaaaggtgctccatgaaaactaggcacaggagtaagaaaagaatagagaaaaaacaaaaatgcattcttaaaatgcccaaatacaagttgtatatctcaggtggcaagagaaatctagaagtttaattatggaaaataaacttctagctagatggtttaaatacaacctggaaggtttaggctgatgaaatttggtctcttaaaatccttagcatcaattaccaaatagggtaaaactaacatttttttttaaagacaatttttttcatacttaagtcattgtaagtctctatacttttaaaacataagtactactttgtaaatttgagaatgttccattaatttatacattaggaaaattttatacttcatttcggatgctgaaatcttttagtccaatacctaacttgaataagcattagtcagatgcttcaggggttttcaatagccctttatcttacccgctctccattagtccaggctgaaagtagaataagcttggcagaacctttaaattaacatatcaaatccccttcctacctactccattttacaactgagaagaataagtaactgtgttatgccattcataaaatgagtactttatgcccagtatgcactaaatgcttctgaacattttttaacgtgattttcacaataatcctgtgagaagtgttatgatttcatcctagaatggagaaactcagaagtgttttaccccacatcaaatagccataaaaaaagtgaatgatctgaaaattgaacttagagccctttctctgaaggtcagtgacatttccattacacaatgttttgttaatagaagtattataattttttatgctttttcataggagtgattaaaatgtatatgcataaacatagtgcttgcatgtaacataaccaagacttaagtgaagacaactattaaactttaataacagacatataaaatattaatggaaatactatgtttcctggatgcattgcttcaacattatgataaattttacacaaataaatttacacatttactataattccaatcaaaatttttatttttatatactttgattctaaatttaatttggagcaattaatacattggaatacgcaagataattttgaaaagaatgttgaaaagaaagatgattgtgggctggtggaggagaagatgatggggagaaggttgccccacctgatagcaaaacttactggaaaagatatttaataataattaaaataatgtggtatttgcagaaaaataggagaaacgcatcaatggaacacaattgagaatccagaagcagatccatctgtatatagaaatgtagtatatgatcaagagggtacttcaaatgggtacgaaaagaatgtactgtttaataaataagttgactatgtcattttgaaa

SEQ ID NO: 1708 - DNA, 2100 bp, Homo sapiens
  misc_feature (1)..(2100): DMR11:34511801
tggccagtttgccagaggaggaaaattccttcctgactctggtggtgatcatcaacttcactctgggcatgtgaccaaaaattggcccaattaagcatctacacattggctgtttacgggccaaatcatcactgggcagaactaggccatagggtgcaaaatatagaaaaaagtggccaagattgggcttcctcaaccccaccctctgagtggtatcattgggaagaaaatcggttttccttccttaaagcctcagtgatacccaaatgtccactccgtcccaagacttgtgagcaagggagggtcaatttcccagcccttggacctccctaagaaggggcccactgaggagaacccagtggagtatttcaacacttactgctaaagaaagattgagggttgggtgcttgagggtttgttcttctgagaggaaccctagcaactgtgagaaccaatttgctgacctcttgtcaagtgattcctcatttttctttagctcgcttagggagtttgcgtgtttgtttgtttgtagctgtttttctgaaggtgcagcgaagatccaaaaaggtatgccatgtagtttgctgtaggcttcgatgcaaagcttaccagttttggattacatatatcaggggttaaatcctacctctgctgctgcgaacgtggggcacatttcttactacccagactgctgaaattcttaagctttttttcatatagatgtggtatataaatattcatgcccctcttcgaactacggtttcctcatctctaaaatggggatttttttttttttaaatcatgcaatccgatatatgcaaaggacggggcataatacatatattcaatcctgttttagagggaaaaatcagccatcaacaatgtatctaaaaatttgccactctggtgacttctgaaaaagggagatgaccaaactgaaaactccggcccgagaataccttagattatgaaaaacagtattgcagagaacacgaagacaacagaatcaagcgttcactcggatgggcaaaccacccctttccctgggtctctggactagactgaaccacagagctgcctccctaagtcatctagcctttctggcctcagtttcctcatctgtaacatgaagcgattgcacctagtgatgtctgacacactttcgggcgtacaaaaggcatccacacgcaggcccggcttcagcctgaggagggagcttgtgctacctgtcgctgtcagcagggggcaaccccacagaaaccccacacactgcagagtctgacaaggcctgagaacacagtggaaaaacgctaaccattgcttttctggaagcattctcttctggggagatgtcagagggcaaatgggtttcttttaaaactgttttgtacaaattcctgaaaatgccccaaactataataagggagttctctgtatcgagggggtgggggacagtgggcaggccggtggggaaaggaattcagtcaggggagaagggtaggtggggggctttccttgaagctgaatatttttctgagtaaaatccagcttcccttcctaaagaagctttagggaggatagagaactgagcgcctgggcgcgttctcttaattccccttggttcagctaagggatccagagggagtggtggctgtgaggagggctggtggccacacggcctgcggaggcaagcaggtctctctgaggcaagccgtcacatccgtgtcaaacagctcccggaggccctgggactgcacccagcgcaggtgccggccctggagctggagatggacgagcagacccaggccccaggccgagcctctgagccctgacaccccttacgattcatccaaaaaagcaaagaaaaggcgcttacgtgagggcagcggtggctaggtccaaagaggaggctttcaaggcaagagaaggcaggcgctcccagcaccagcgtgcagtggaaataaagacacctgtagccttgtgatataagtgacacctacagacaggtccgtttggtttttcaggtttacgcacagcccctttgatgacggtgacatacagtgtgacacggctccttggagggggggaaatggttctcat

SEQ ID NO: 1709 - DNA, 300 bp, Homo sapiens
  misc_feature (1)..(300): DMR11:34543101
gagattctgcagtctcatcactacatttgggtatgaaggccatcttgccagtaaacagcagaatggcaaatagaagatatcttaggactttgcttctcacgctctcctctttggagccctggggtttccttagcattctcttgtagttggtgctgggggttggcgggtggcggggaattgtgttctctctgtctaccatgattagccccctattttctgtgcaactggtggggtatcagaggaagattttgtttgaaggaaatagttctcttctgaaaaacatggtaacagttttgttat

SEQ ID NO: 1710 - DNA, 1000 bp, Homo sapiens
  misc_feature (1)..(1000): DMR11:36349201
ttgaacccgcgaggcggaggttgcagtgagctgagattgcaccactgcactccagcctgggtgacagcaagactctgccaaaaaaaaaaaaaaaaagaaaaattgaagatttcaaaaactgttgtttctaaaagcaactaaattaaagttaaaaaaaaattccataggagcttgtacttgcctctttctggcatctgtttaccaaacaggctgatcattcacctggaactgaaccagggccagtgagggaggggaaacaggaggcccgagtaggacccaggtttcctgcagggaagtcctggccaagtatcccgcttccttctggtcgattgttcatgggaaggaaggcgaggggccttctgttctttctctggaatcccgtggtgcccgtctttggcaggcagaaacaatgagcctaccccagcctctcacagtgtgtttgaggcacatcttccccattctgtggcctaggtgatgcttggacacattgtaagcacacagatgtatggatttattattatttcctaaaacctatgctctgctggctgagatgggcctgggatttataagccctaccaattagctgagtgctgagcactgtaatccagggccagtactgctctcctagctgcaggaaaggggtggtgaaaaatcacaagaggaaaatggaacctggcactagaatgtgagcaaaaaagaggcaattctgctgacttcagagaagcttccttgcagaaggaatctgaaacacgagcaactctctggggaggatgagaagctcttctacaaggaggaggaaaacataccttaggctatatggctgctgggaatccaggttaaaatgtttaaccctggagaaaaagaggtcagttaggagtttcttgctgtaatccaagtggtgacaatgagggcccggatgcaggaagagagtgagtgtgtgtgtgagtgtgtgtgtgggtgtgtgggagggtgggtgtgtgtgtgggagggtgggtgggtg

SEQ ID NO: 1711 - DNA, 1200 bp, Homo sapiens
  misc_feature (1)..(1200): DMR11:40158001
atgaaaccaacccaaatgcccatcaatcaatgagtggataaagaaactgtggtatagatctatgagggaatactatgcagccataaaaaggaatgaattaacagtatttgcagtgacctggatgagattggagactattattctaagtgaagtaactcaggaatgtgaaaccatacatcgtatgttctcactgatatgtgggagctaagctatgaggacacaaaggcataaaaatgatacagtggactttggggacttggggggaagagtggaagcggggatgaaggataaaagactacaaatatggtgcagtgtatactgctcaagtgatgggtgcagcaaaatctcacaaataccactaaaaaatttactcatgtaaccaaatacaacctgtaccccaataacttaaggaaaaaattttaaaaattacatttatctgtgactatagtttcagtttaataattatggtatgcaattgggtctttagtccctaagaacaaaacaaattttaggatttgatattctaaaaccaaaagtttattttaaaatagcattattagagcttaaaacatacttatcaaaaaaaaaaaaaatagattccctggcatgtgaaatttggcaaggatgaagagaggggctgttgctctctggctctggattagaacatttgtacatcagaaagatttttaatgtgatccatcaaagtgcccactctttaggaatacaggtatccaacctaatatccattagcaaatgaaaacatgtttcagatgtttaaactgacatttgattctagtcttatgttgggtttgtttaaatgaatgctactgtcttcatcatgaaactcatatcaaatcaattgtggattaatagtaggaaaagagtatcagaaaaacaaaacaaaatgaaatgaaacttcctggttgattaaaattcatttctttattcactcatgatttttttcttatcttaaaataatctaaatcttattgagcatgataggattaagtgggaattggacagatagtggagttggggatggattgtaattatactacactgcgaaaaagcaaagtgcacatttctacgtatagggaaaatcctcttgcagatgaaaatttggtcgttgttttttttgtactccaaagagtctaaaatatttctcccattgttaactgcttggagaatccttatcaggac

SEQ ID NO: 1712 - DNA, 200 bp, Homo sapiens
  misc_feature (1)..(200): DMR11:41300401
gtccttggagaactaaggggatttttttcctataaatctcaggttcctctcagaaggaagaaatcaaaactttctcacagattctaccacaggtcactgaactctggaactaacgtcctctcttcaatgatgtgggaatgtcgtgtcaatctttatgaacaattcctggcttctctctatttctcttttcttccctttcc

SEQ ID NO: 1713 - DNA, 1100 bp, Homo sapiens
  misc_feature (1)..(1100): DMR11:44438501
tgggtaataacaaactaatcggagctaaaggagcatgttctaacccaatgcaaggaagctaagaaccttgaaaaaaggttagatgaattgctaactagaataaccagtttagagaacaacataaatgacgcgatggagctgaaaaacacagcacgagaactttgtgaagcatacacaagtatcaatagctgaatcgatcaagtggaacaaaggatatcagagactgaagatcaacttaatgaaataaagcatgcagacaagattagagaaaaaagagtgaaaaggaataaacaaagcctccaagaaattgggactatgtgaaaagaccaaacctatgtttgactggtgtacctgaaagtgacggggagaatggaaccaaattggaaaacactcttcagaatattatccaggagaacttccccacctagcaagacaggacaatattcaaattcaggaaatacagagaatgccacaaagatactccttgagaagagcaaccccaagacacataatcatcagattcactgaggttgaaatgaaggaaaaaatgttaagggcagccagagagaaaggtcgggttacccacaaagggaagcccatcagactaagagcggatctctctgcagaaaccctacaagccagaggagagtgggggccaatattcaatattcttaaagatttttcaacccagaatttcatatcctgccaaactaagcttcataagtgaagaagaaataaaatcgtttacagacaagcaaatactgagagattttgtcaccaccaggcctgccttactagagctcctgtaggaagcactatacatggaaaggaacaaccggtaccaaccactgcaaaaacataccaaattgtaaagaccattgacactataaagaaactgtatcaactaatgagcaaaataaccagctagcatcataatggcaggatcaaattcacacataacaatattcaccttaaatgtaaacaggataaatgccccaattaaaagacagactggcaaattggataaagagtcaagaccaatcagtgtgctgtattcaggagacccatctcatgtgcaaagacacacataggctcaaaat

SEQ ID NO: 1714 - DNA, 300 bp, Homo sapiens
  misc_feature (1)..(300): DMR11:45872101
cactacccagtggcccagcatcccccaaacgcaagctggaagcagccgaggaaccacctggtgaagaactcagcaaacgggcccgggtggcagagttgccaaccccagagctgccgagcaaggatgcctgagagtgagtgacagcagcctagattcaacctcaggaaggaagttgggagtgggggggcctactgccctgccagctgcaggttgaaacatagcaaactagatgaaaatctggtgggaccacccaatgctcagccactaaagctttaccattttacagtggcagccgggttc

SEQ ID NO: 1715 - DNA, 1700 bp, Homo sapiens
  misc_feature (1)..(1700): DMR11:47036401
gaacataatatttggactatataccctcaggctaaaacaactctaaacaagtattaaactctaattagtaggcttctttttcacagaggaatgggttagctagctcagtacattttaggattaagcaaataagtaaatatgttatagataataggagcctttttctcactttagaaaaaggacatttcagatatggaaagggaagatgatagaatgtaacctgtagtgttgaactggaattgaatcagtgtgagctcatagatttgttttgttttgttttgttttgttttgtttgagacgcagtctcttctctgtcacccaggctggagtgcagtggcacaaccttggctcactgcaacctctgcctcccgggttcaatcaattctcctccctcagcctcccgagtagctgggattacaggcgagtgccaccacgcccagctaattttttttatttttcttagaggggtggagttttgccatgttggccaggctggtctcgaactcctgacctctggtgatccgcccacctcggcctcccaaagtgctgggattacaggagtgagccaccacgcccagcctattctttactaaaaacaactgggcttcttggataaatggctggctccagggtgaagtagggaaagaacaagatgatcctggaacatcttattctatcaaaaaaggaaggaagtgatcagagaattatgtagatgtgtcaaaaggacatagaagtcagcttgaagggcttccatggcaaaatatgggatcatttgaacataaaaatatataatgatagtaaaggattataacctattgaataaagaatccatgagtccacaatgatataaataaataagaagggaaagctcttccttattgtagaaggtcgacttaaaaacgtagatgaaacgacgtagttggaaaaagatcaccatttggcaaaaccttcatattcattgttggttctggcaacaattattattattattattttttttttttaattgatcattcttgggtgtttctcgcagagggggatttggcagggtcacaggacaatagtggagggaaggtcagcagataaacaagtgaacaaaggtctctggttttcctaggcagaggaccctgcggccttctgcagtgtttgtgtccctgggtacttgagattagggagtggtgatgactcttaaggagcatgctgccttcaagcatctgtttaacaaagcacatcttgcaccgcccttaatccattcaaccctgagtggatacagcacatgtttcagagagcacagggttgggggtaaggtcacagatcaacaggatcccaaggcagaagaatttttcttagtgcagaacaaaatgaaaagtctcccacgtctacctctttctacacagacacggcaaccatccgatttctcaatcttttccccacccttcccccctttctattccacaaaaccgccattgtcatcatggccccttctcaatgagctgttgggtacacctcccagatggggtggtggccgggcagaggggctcctcacttcccagtaggggcggccgggcagagggctgaccccccccacctccctcctggacggggcggctggccgggcagaggggctcctcacttcccagtaggggcggccgggcagaggcgcccctcacctcccggatggggcggctggccgggcgggg

SEQ ID NO: 1716 - DNA, 300 bp, Homo sapiens
  misc_feature (1)..(300): DMR11:58138001
atatgaggatgcacatcaagagatgggagatacttgctttagtggcagcacccacacttgaatccaggcctccaggtgctgtttccagccttcgtatcacatgctctctctggctcatcaccgtcaactgccatcccccaatcatgtcactctccccataggaaaatgcttcctcctcctttcccagagcagagacctaaaagtgtctcttagagcaattgtagatgaaatgggtctcctgatttgtgcctccccagctggggctgcctgaggctgggcaggagcgtcgtacttcctggg

SEQ ID NO: 1717 - DNA, 1900 bp, Homo sapiens
  misc_feature (1)..(1900): DMR11:59340401
tcatttaccagttctaggatctttttggatgaagctttagggttttctaggtatacaattatatcatcagcaaacagtgacagtttgacttcctctttactgatttggatgccctttatttctttctcttgtctgattgctctggctaggacttccagtactatgttaaatagaagtagtaagagtgggtgtccttgtcttgttacatttctcagggggaatgctttcaactttttcctgttcagtgtaatgttggctgtgggtttgcaacagatggcttttattaccttaaggtatgtcccttctatgccaattttgcgaggattttaatcataaagggatgctggattttgtcaaatgcgttttctgcatttatttagatgatcatgtgatttttgtctttaataatgtttatgtggtgtatcatgtttaatgacttgtatatgttaaaccatccctgaatccctggtatgaaacccactggtcatggtgaattatcttttctatatgctactgaatttggttagctagtatttcataggggatttttgcatctatgttgtattacttcattctcatgctgctgtgaagaaatactcaaaatttttattttgaatttataaaggaaaggagtttaattgactcacagtcctggatggctggggaagcctcaggaaacttgcaatcgtggcagaaggggaagcaaacatgtcctccttcaaatggtggcagaagagaaaagcgccaagcaaagtgataaaagccccgtctaaaaacatcagatcttatgagaactcactatcacgaaaagagcatgagggtaaccatccccatgattcaattacctcccactaggtccctcccatgacacgtggggattacaggaactacaattcaacatgagatttgggtggggacacagcaaaaccatatcatatgtacatcaaggatatttgtctgtagttttgttttttattatgtctttttctggttttgatattagggtgatactggctttaaagaataatttagggagaataccctttctctatcttgtggaatagtgtcaataggattggtaccaatttttctttgactatctgatagaattcagctgtgaatccatgtggtcctggacttttttgttgacattttttttattaccattacaacctcactgcttgttagtggtctgttcagagtttctatttatttctggtttaacctaggagggttgtatattttcaggaatttatccatctcctctaggttttctagtttatgtgcataaggttgttaatagtagccttgaatggtcttttgtatttctgtgatatcagttgtaatacctcccatttcatttctaattgagcttatttggatattctctttttttcttggttaatctcaccaattggtctatcaattttatttatcttttcaaagaaccagcatttcatttcatttatcttttgtatttttttgtttgtttctatttcatttagttctgctctgatctttgttatttcttttttttctgctgggtttgggtttgctttgttcttatttctttagttccttgagttgtgaccttatgttgtctatttgtgctcttttggacttcttgatgtaggcatttagtgctatcaattttccttttagcactgcttttgctgtatcctggaggttttgatttggtgtgtcagtattatcattcagttcaaataattttttaatttccatcttgatttcattgttgatcaatgattattcagaagtaggttatttaatttatatgtatttgcatgcttttgagggttccttttggagctgatttccaattttattccactgtggtgtgaaaaagtacttgatataatttctgttttcttaagtttat

SEQ ID NO: 1718 - DNA, 4100 bp, Homo sapiens
  misc_feature (1)..(4100): DMR11:59599901
agcaatgaagatccagtaaaggattttcagctgaggactgacatgactacatttgacatttttcaaaaatcactctgacaacagtgtagacagactggaggaagacatgacggggcagagaggtcagcccaaacaccatctttgccatggggatggtcatctgtctggtttgaatgagcgatttttgcttctgtgttccctaagcctttgtctgtgtcgtactttccataatactatcacagaaaataatgttttctacctgttttcatgtctgtctcttttaaactacacacttcttgaaaacagaaactatgatgtatttatctttgcatgtccccagtgcatctagcataggaatttgctcaaaaataactgctactgagcatatacatctgattctaggtgatctgggaacatatcagatccagagccaaaattaaagcagctaaatttatggaacagtttatgattataaaggtaaaaaagaccatgccacaaactgccgcacaagtgggtggggctgtcatatcagcactcttcccactgaggcttgagaggaactcctggcagcagctccagtgtgcaagaaccttaccggcatggggatcttagagagttcttttccaatgcagttcttcatgatgctccataaattgaggctatagtttggcttgtatggtattctggttctcttttcctttttggtctcctccagctgatgcttgtactgagagcaaaacaaagccattcaaccacccacaaagaacagaaaacctggtatttataaccttcccttcccccgtgctaaaaaaagaaaaaaaaatcagtttctcttagcacttcacaaaaaaaaaaaaaaaatccttgggaatcacaacccacgtccctcacctctgagatctcccatataagaattacctgttcatcaaggctgatgtcactgctggctccactgatattgctgccagtacgtctgtacagatgggaaacacaggagaattagaacaaagaccagaactagagtgtggtcctggacatttctttacaaagcagaatgccaagtacactgtataaacttattgatgggtgatcaaatgacgacatttagagtaggaatgaatttaagtatctctggagaatttgtttacgtaaaaaagctgacattttttcacttacttaagaaaaagggcccattctacaaagagatcttgagacaaaaaaaaaaaaaaaaaaagggaaaagggcccagattcaatattgacaattataatactctcactgaaatgtttttaaccttttgatggttaaaatatgatgctaaaataccaccatattgatggtgaagatatgtttatttgcttcaacaatcaaggataactcacttgtggcccaaattttcaggcatggtgatgatctcaggtgcatcaaaaaattcattctcatcatcttcatcgctcatgtcccctttgccagagcagcactgatctacaagaagaaaagccccatttgttgactttggttatctttaccaaatgtctgatatagcaagttcttttaaatactaaccacaaacacagcaaaaaatggtagaaagcagtggaaaatccagaataaatcaatgggttccaattccatttcacatgactcattgactgtgaagagtttggagttctcctatcaactgcagaaaaccatctggctcaccttagaccaggctacctgagagctaagtgtcttacctttaccagaacccacattgccaggagtgtttgccggcagcaccgtggctcctcggaaggccctctccaggtgattatgctgcttcgccagctgctcgagggtttcttccagtcggatacgctggtctctttcatactgtagtgacttttgccattttttactatgggtctgggctaacatgaggaaatctctgcaggcctgtatggagaaagcgttgactgtgtcagctcaactagtcagagtttcccctcaggcttctgcaagcccattgagtaaccttattctgggaacttttaactggcaaattacaatgaaagactttcccttttatgccaaggtatcagggacagctagctccacgctgaaatcaaggtcaaacccagaaaaaaagtaaatatggttgtcatggttcttttacactttcctggtcacgagaaccaaacaaatgccaagtgagcagtaaacccagacgaagtatttgtgacaacatcaaaaagagcaggtatgtgaactgcaccaaaagtagagaactgctgactgaaagaaggatgagagcacacacaggataactgctttcaacaaattcttgactaaactcaagtaactgaaagctaaggacttcagacactgagaacagagaatccacactgaggtagaccaagtatggggaaactcatttggtttttattttggtcactaagagaaacaactgaccttaaaaattaggagccttcagtgtgcaggaagaaggtttaaaaagaaaaatattagaagcctacttgaaaaatcaaagaagaggtttagagaaaaaacccacaaatatgattatatcaagtccctccactggctccccactaacatgaggatcaaatactaactactggttatgaacataaagagaccttcataatacggccatcacctgccttgtattctcctcgccaggcatgtgtacttagcactgcaccctacaatgcagccacactgaactgctcaccatttcttgcacacagatttctggcacagtctggagtagagtgcagatcacagctcactgcagcctcaacctcgtcgggctcaggtgatcctcctaccttagccccgctgagcagttgggactacagttatgtaccaccatggccgactaatttttgtattttgtagagatggaattttgccttgttacccagactagtatcgaactcacggactcaagtgatctacccatctcagcctcccaaagtgttgggattacaggcatgagccactgtgcccagtcgtggacacagatttctttcaggcctacatacctcagcatatgctattcactctacctagaatgtccatccctatcccctgtttctaagaaagggcaaatctttctttaagatctatggcaaatgctactttgtgacatctccccaccagtctcataagcagccagtctcttctctacatttccactgcattttgcacaaacttctattttacacatgcacagcagtatcgtgactgattttctatctctccagatggatcacatgcaatttaaaaacacatttttgagtttattcatatatagatctccagctcctaatttagttgctctgtacataatagggatctgataaagtttgcttaataaataaataaaggaaggaggcaagcaacgtaagcttaaaaatctattccctgttacagagaagctaaaaggtaaacaggatatttactcccatggtttcaaccactgcctataggctaatggctactaaatcactaattctagcccagcacttactgagattcagaatagaatatccaactccctattcaacggctcaaagtaacttcaaaattaatgcatcccaaagtgaactcatcaccttcagtttttttttttttttttttttttttgagacatgttcttgctctgtcacccaggttggagtgcagtggcacaatcatggctcactgcagcctcaacctcacaagttcaagtgatcctcctacctgagcctcccaagtagctgggactacaggcatgagccacaatgcccagctaatttttgtagttaatatagaggtgggattctgccatgttgctcaggctaatctttcaactcccaggctcaagtgatccacacctgggactacaggtgtgaggcaccacacccagcctcatcagtttcctatgttgtctctgcttttccctttgatgttccccaatccaactttcagggccctcccagttgtccaagccagaaaattaaggggcatccttctcttacttttgcttccttcctcacagccagttatcaagtcctattgattcttctttaatattttaaaaatctgtacat

SEQ ID NO: 1719 - DNA, 300 bp, Homo sapiens
  misc_feature (1)..(300): DMR11:60060401
cattactaggtcatgcaactagtaaatgatgaaatctggatttgaatttggatcttccatagtgcttaaactctaccatgctatgttggtactcagaaagacgtcttctatatagtactatataatgtggtgatttgaaaaatattggaccttagagtagaatgtttttagtaaaatctgaaatgatttataagccatatgagtttgggtaagtttctcggtctctctatacctcaatttttttcatctgtgaaacgggaataataataatattataacaggattaagtatattaataca

SEQ ID NO: 1720 - DNA, 300 bp, Homo sapiens
  misc_feature (1)..(300): DMR11:60537901
atcattctcagtaaactatcgcaagaacaaaaaaccaaacaccgcatattctcactcataggtgggaattgaacaatgagatcacatggacacaggaaggggaatatcacactctggggactgtggtggggtcgggggaggggggagggatggcattgggagatatacctaatgctggatgacacgttggtgggtgcagcgcaccagcatggcacatgtatacatatgtaactaacctgcacaatgtgcacatgtaccctaaaacttaaagtataataaaaaaaaaaaaaacgaaaaaaa

SEQ ID NO: 1721 - DNA, 5000 bp, Homo sapiens
  misc_feature (1)..(5000): DMR11:63744201
cattgcactcgagcctggcgacagagcaagactctgtctcaaaaaaaaaaaaaaaaaaaaaaaaaagtgggaaaggaaggaaagataacacattaaaaaataaataatttcctgttttaaaaagtagttatgcattgattaccagtgggatacattctgagaaacgtcattaggtgatttcatcattgggcaaataccatagttaacttacataaacctagaaggtatactactacatacctatgcaatatggtatcatctatcgctcctaggccacaaatccatacagcatgttacactatattggatactgtaggcagtgtggtacagtgcttagtatttgtacatctaaacattaaaaaaatacagtaaaaatacaatattctaatcttatgggactacagtcatatatgtggtgctttgttgtccacatgtcatttagtacataactgtactatactcagccagaacaggtacatgaaaataaaagagaatgaaaagaaagtttctgctggtcgctgtggttcacacctgtaatcccagtactttgggaagccaaggccagtggattgcttgagcccatgagtttgagaccaacatgggcaacatgacaaaaccctgcctctacaaaaaatagaaaaatcaaccgggaatggtggtgcacgcctatagtcctagctacttgggatgctgagatgggaggatggcttgagcccaggaggcagaggttgcaatgggtcaagattgtgccactgcactccaacctgggcgatacaaccagaccttgtctaaaaaaagaaaagaaaatttcatggacgcaaaccatgcagcctcttgctggttatgaaatacacactagaactagtgtaagtctagtggcttcattttaaactattggcaactgcctcatttctcactttttcttcatatttttcatcctcttctcccccaaggtattagagagggaaaagtttccaaaaaccatgccagtttccttcctttggtgttctatacttggaatccttagtcttctgtggtcaatagagtcatgtgcaaaaacttgactagtttaaggggaattattaggaaacaaatggttttgctgtcttttggtcattagcttggccccatgtttaagcattcggtaacaactgtgaagagcctgctacaaataaagtggtaggtgctctgaagaaaaataaagctgttaaagggaatagaaagtgatgaaggcaggggctgttagacaggctggtcagtgtctgaggaagtagccctgcactgagacctgaaaagtaaagaagcaagccatggggagttggggaggagcattccagacagaggcttgatgtgttgaaccatcttttccaagctcttcctctgttaccttctctttagtcactatgtcccctttctatcccagaccataattccaccatttatcttaaggctgagcccagggcctatattattatgcaggttgtttactgcacacatctaggggcactgtttacacttgttatctttgtaggtttgaatatttctatttcttatgagttttccagcagatggcagtaacacgcatgaagacagggtgactttttctagtttgcacaaaggtcttttttgagacggagtctcactctttcacccaggctggaatgcaaaggtgcgatctcggctcactgccacctccgcctcccaggttcaagtgattctcctgcctcaaccttccgagtagctgggagtacaggcacgcaccaccatgcctggctaatttttgtatttttagtagagacagggtttcgccatgttggccaggctagtttcgaactcctaaccgcaagtgatccacccaccttggcctcccaaagtgctgggattacaggagtgacccaccgcacctggcctaaaggtgtagacactctgatttgcatctaggcacatgtcgtctttatcccttttccttctctgatacatcaaggtccttttctctctgggtcctagcctcattctctaagtttcctcttcctgtctttcaaatattttgaatgtatagaagaattacagttgtgctacaaggaagtcccgtataatctgcactctagttcaccagttgttatcatttggccacatgtgcgttatcatcccctccctctcagtatagatagatgtttttttcctgaaccatttgagagctgattgcaaacattctgcctctttacccctactttggagtgtgtttccattgaacaaaacatctttgttttacgtaaccaacgaaagttattgttaaggaaattttgctttttgttttttgttttttttttttgagacggagtctcgctctgttgcccaagctagagtgaagtggcgcaatcttggctcactgcaagctctgcctcccaggtccacgccattctcctgcctcagcctcctgagtagctgggactatgggcacccgccaccacgcccagctagtgttttgtatttttagtagagacggggtttcacgatgttagccaggatggtctcggtctcctgacctcgtgatctgcctgcctcaacctcccaaagtgctgggattacaggcgtgagccaccgcacccggctgttaaggaaatttaacagtaatttaggaaattaaacattgataaacagtacttttgtcaattatatagtacacatttaaattttgtcagttgtaccaatgatgtctttatagctgtgtttaccccttttccagagtccagtctaggatcacactttgtgcctcatcctgtctccttactctcctttaatctgagaattaagattaaaagaagtaagttcctcagcctttctctttcacaccactgacatttttgaagactataggccagttgttttgtagaatatttctcaatctgggttggtctggtgttttctgattagatgcaggttacatgttttgggcgggaataccatagaagtgatgttgtgtctttctcagtgcatgcactatgtctggaggcatatggtatctgtttgttctactactgatgacgtcggccctctaagccttctgtgttgaaactgttccttgtagttatatgaattctaacatgtatatgcttgaactctgactataggaattctcctacttacaggaattcactcttaagtaggcagtattctattaagttcttctgttcaatctcttagttcatcaagtgagcctgagttccctcccaattctttctctcctttgcagcatcactatctgggactctcgggttcccatcaggagtcataataccttctctttctcctagtaagttgcatcccttagccagactctttgaaccagtgattacttcttatatacaatcagcatatttttagtgttttattgaatcaagttaaggttctttggctctaggaaggttagtcttcaaagaaatggtttcagaagagagctgtatagctgaatgtggggaagaactaggtaccctcaagacaacttgaatcacacccagttcattttatcgcaaataagtcttttccgctaaccttatttgaattactgcatgtcatttacactgtcttagcctctttattccttaaactctaggaggtagatttcattttcttcatttttcagatgtgaggaaatggaggcttggaaaggttaaagtaatatagtgagaaattaccaggacttaaactcatgtctctccaactccaaagcccttgctcttttttgagagcagagagtggctgggaggaaagtcctctagctattcatggtgaaattagccttcatagacagaaatacaaaaggtaatggcagccacgtgcagaggcttatgcctgtaatcccagcactttgggatgccgaggcgggcagatcactagaggtcaggagttcgagaccagcctggccaatatggtgaaaccctgactgtgtctcaaaaaaaaaaataaaagtaatgtcactgctagattggaggtgattgccggcacctgccactcagagagttggaggtgtctttaaaccaggaccatcctgggcaactagatcttacagttggggacttacaaactgggaaaatcgaaatacttctacttaaactcatttcctgacataattattaatagtgccccactcacttttttttttttttttaaacagtctcattctgtcacccaggctggagtgcagtggcacgatgttggctcactgcaacctccgcctcccaggttcaagtgatttctcgtgcctcagcctcccgagtagctgagattacaagtgtgcaccaccatgcccaggtattttttgtatttttagtagagacaggggtctcaccatgttggccagtctggtcttgagctcctggcctcaagtgatccaccagcctcggactcccaaagtgcagagattacaggcgtgagcccctgcaccctgccagccccactcactttttttttttttttttttttttttagacggagtttcgctctgtcacccagactggaatgcaatggcgcgatctcggctcactgcagcctccgcttcccgggttcaagcgattctcctacctcagcctcctgagtagctgggactacaggcacataccaccatgcccagctaatttttatattttagtagagactggcttttcaccatgttggccaggttggtctcgaactcctgacctcaggtgatccgcccgccttggtctcccaaagtgccaggattacaggcgtgagccaccatgcccggcccccactcactttttttaagagtactgcagcttggccaggcatggtggctcatgcctgtaatcacagcactgtgggaggccacagcaggaagattgcttgaagccaggagttcgagactagcctggcagcatattgagaccctgtctctacaaaaaagaaaaaagtacctggacatggtggcacatacctgtagtcctagctactcagaggctgaggtaggaggcttgcttgaa

SEQ ID NO: 1722 - DNA, 300 bp, Homo sapiens
  misc_feature (1)..(300): DMR11:64183601
ctgctggggagaagatggaaggcctggaaaggccactgctggtcaggtgggcagcagcgtggtggccttgagacagtgccaagaagaaatgaaaggtgtccttgacagaatggatgtagatgaataagagaggcagccaaggcctcagaggaacctttgaccccgctttccttcatgctccctccaaaatgcatccagaatccaattcctgtcccctcctctgctcccatcctggctccctgggattactaccacagcctcctaagaggtatccctgctctcaccctcccctcttcctcc

SEQ ID NO: 1723 - DNA, 1100 bp, Homo sapiens
  misc_feature (1)..(1100): DMR11:64260101
agcctcagaagtctctgggtgacgagggcctgaaccgaggcccctatgttcttggacctgctgaccgtgaggatgaggaggaagatgaggaagaggaggaacagacagaccccaaaaagccaactacagatgaggtcaggcccacagggtgggcaggtcggggaggtagcatctatttacctcccagggggctgggtctgaccatcaacaagactgacatcacccctgcctcctggggctcagtgtgggtgtgagtgaaggtgggaggagggctcttcagtcatcaggcatggaaacaagcatacagttctgctggtgatgtggcctgggaggtgcgagttagggtacagaactggcagaggatagggagtctaccctgggcagggaggtggggcagggagacctcaggaagggggacagcatgtacaaaggtcctggggcagggccagggggtgcaggagcggggagcattgtcatggggagcattgagtagctgtgaggaatggtacagaaaaaatcagtctgagctgggcgtggtggctcacacctgtgatcccagctactcgggaggctgaggcatgagaatcccttgaacctgggaggtggaggttgcagtgagctgagattgcaccattgcactccaacgtgggctaaaaagggagacactatctcaaaaaaaaaaaaaaaaaaaaaagacatcattgctataaagacaattactggagcaattagtgaaatttaaagatggactacatattagataatatgttaatgttttgtttcctgaatttaattattgtattggagttatagaagagaatgtccatatatgctgaagtatttatgggtaaagggtcatgatgtctataatttactcccaaatgattcagtaaaagtaatgataattataacacctatatgggccaggcgaggtggctcatgcctgtaatcccagcactttgggaggctgaggtgggcgagtcacctgaggttgggaggttccagaccagcctggccaacatggtgaaaccccatctctactaaaaatacataaattagccgggcaaggtggcgggcgcctgtaatcccagctacttggg

SEQ ID NO: 1724 - DNA, 4600 bp, Homo sapiens
  misc_feature (1)..(4600): DMR11:64619901
gcaggtgggagttgtggttctggacccaagaactgatgggagttgtagttcctaagccatgttcaccctcccccaccccagggactcatgggagctgcagttactcatcctcctagggaaacgcctccctccttctctcccagcacctcttggctctcaaccccaggaccccaggctaaggacctcactacctctgaggggctgggaaccaaaaggcatcttgccagagagcagctgagggactgggaggatgttaggcaagggggaactatcagggaaagctaaggcctggcagcaggccctggggcttgggccaggtggcagggacagtcgcccccctcccagcagcatcgcagagggacccggggcaggggaggggggaaaggcactcaccagtactgggctcacactcctccaggtcctcatcatcgcttggacactcagcagaggccaccagcaggtcatctgtgttctgaggggcgagagaaggggtggggaaagagaggttccaggcaggtcagcagatcccacagctgccacttgaggtgcacggtggcacgggggatgcccctgggctgagacggaccagactggtctgagtcccagccctcccatctcttgctggctgacctcgggcctccatttcctgctatgcacagggaactccccagcaacagccctgcaggttttcatggcttccgaaggtcagtgaaacagcacacatggtgctttttatttctcggaagtgaggagagtggacgccagactttgacctgcagcgccagggcaagaggatctaggatgcctcagggaaggtgccagggaggcaaggccctatggggcggagcctgcagaggccagcgcaggcagaatagggccaggccctggagggtttcctggctccagcttcaccacccatcacccctcatctctctcccaaccccctttcctggagcctgagagagccgggctgcacacagtaattagggctgtggttgccatgacgacaagagaagactttgtcagcattttctctcttacttattgcaaagaaagagaatccccaagatgagtgagtgtaaggaggaggggggcgctcaggggcatgaaggaggagacccaaggagggaaatcaaaagtccaggcaagaagggagcgcgagaaactgcgggaaggtgaggagagagctaggctgaaggacaaggacgagcagggttgaaagggtcataacctgcctcttcccagcccatgatcttcagactcaacagccctcactcacccaagggcaaggcagtgcctggaggacccagctcccttctgcattcttgccccctcggcaccagcctccatcttgggcttccccaccacagcagtgactcctgggactcccacctctctcttccaccaggatgatctgcccatcaccctcccactgagaccagacagcccctcgtcccctatgatttggagggtattgggcatggtgggtacccagccttgggtagagcccagaccttttccccaagggctccctgctccctcggggcaaagtcttcaggtctcctcagctttctttgcagagaggaagtgggtacaggcttgtctctctgatctggatggccccagctagcctagtcccaggcttcctgcagcacagactggcagggaggaggggtcttaaagcacatggagcccacccctcagagggagaagctgaagacagactggtgacagagggaggagcacatcctcatggccacccccagatcctgccctcaccctagaaggacagagggtgcctaacagccataggctgccagacagggcgatgggaagagaaggggtggccaaaaaaggccttcatgccaggtgtgagccctccctgtgctaacggtcagagcaagcacaggaggcaacaactagaaaacagcccagcctgggctgcctcaggaagtcacacaggcctgtcctgctccagcagagccccattccccaggtgcaggcccctccagtcctgccctatcgctagggcttgacctgacccaggaaacacctgagcaggtggggtgggctccatgtgcttcaaggcccctcctccctaccagtctgtgctgcaggaagcctgggactaggctagctggggccatccagatcagcaggtggggtgagcaccagggaactgtctgcactgagaccccctcagacgcacagacggagaggacactgaagctgcctgagttgtggtgcctgctcatagtcacatggagagggcttgtgaaggcaatggacttgcagccagggctttcccactgcagggaccccagcaaacaaggagaggctcctcctagcttccaccagcctctggagaggggctgcccatgccaggtgactgcatccagccctcccatgctgtcacccctgcccacagcagggccagcctggtaccatccatctcccactctctgcccacacagaacgctaggcatggccttcactggggaagcagaaggagccatcctactctcaccccaagtccagacttcatctctcttaggtagggtggtcttctctcatataactgggccatcaaactcctccccaattctgggaatggtccctctagaaatagtggtcacccccacatcacaagatccctggtcattagggtgaaggccacttcctgaaaggtgaccttgcccatcgccatggcaacaaagtcagcgacagcagccttcaggatcccaacagaccccttggaccctcactctaggcaccactactgtggctatgcagatatcaaccccatccccacctatccctgccctaatccaccagccagagtggggcctcacctgggtggtgctgtccctcagtgtgggggagcggccccggcgcgtggtggtagtggccatggtggtggtagtctccatgatggtggtggccatgtcagccagcagggtggtggccgtggtctccgcactgagcagcacggacggcccctcccccaccaggcgcaggtgaccctcagtccgcacattggggtcgctctcggcggccagcgccagcaccttgagcccattgtagtagaggccggacacctggccctggaaggggcggccctgatcccggcccccgatcttgatggcagcctggctgttgaagatggtcagctggcggccttgcaggagtggaagggggtgacagagaaggggcaggcagtgaggggagaccaggaagggaaggaagaaaagaaggaagccaaggagaggaaagaggaatggaggagaaagccagtaagggaggaggggacggggagaaatgaggaaggggcagaaagccaaagggaaagtccttgtcagccacagcccctagcccagccaggtggggaccccagaaggggagggcacccagggtacacatgggctggggaaggggagcccagtccctcctccccaccatgtgcaagccttcccaccttccccattccctctcctctccagctccaaggtcatctcccctcttcatcctcttccctcagtccatccccatcttctccctctgcttccccaaacatcctgccccagtgtccagccccaagccctgaagccatggagcccctggaagaggcagatagaggagacaaagaggcagagacagaggaggtagctgccaggccaaggtggagtcggtgcgtgtgagagcagagaaggaggtgagacagagtgatggtgtgtggaagcagcaacctgcccaggctgacctcccacctacaaccaggccttctgacccctggccaggatcccctctcttctcccggactgccaaggcccagcactgcctgggaccaggccctgttaagccgagcccttcctccccacctggacatgcaagcacagaagtggaaaatgttaaagggaccttgcttcgctcactgacagccaataaaacccgctccagctccaatctcaccccacactccagtatgacacctcagaattcccagctgggtggggttgggctgttctgtttgtttttagtggatctgggggtcggtttaaccctctgagtttgttgttttggtttggtttttagaaaagatgtttattatgtttaagtttagatttaactttggttttggtgctgcttattttgtgggagggagggggtgggcagagggcctaccacattgccccatctcccccggaaccttcagctgctggcactgggggttttagacctggcttagcccttgttagcctctggttagtgcctcgttaaagatctggtttagagttcggtgcctgtaagccttgcccccaaaacccgggctgaggacagtccaacttgtgaagcccacaacctctttggaaacaggttctctgggacacccaggcctctgggacatccaaacatccatccagcctctagccaatgatggccactggggtgtctccccagccccccactcagccttccttcttcctccagcaccctcccactgcccactcaggcaaggatagcccctggaccagcaacgcccattactaatggccaagaggccaagaggcagagggccagtggtagcagctctggtacaagt

SEQ ID NO: 1725 - DNA, 900 bp, Homo sapiens
  misc_feature (1)..(900): DMR11:65078701
ggcagagcccctgggcctatttccaagcagccacccctcccaacaagagcagaggtgcctctcacctcaaccctcagccctttaacttctggctgggccactgattctcctccccagtctgtggcccatctggaaactggctatggtactttggggagataggaaggacaggacgacaagagacaggacaccagtgagtggctgggccaggcggccccatttcctaaaaccaagatggctgccgctgctgcccaagccctcaaaggcagacagtcctcatgcgcagcaccagcacacacacaggtaacaagaccaggggaggggaccctaagtgtcctctccacagggaggtggctatgtacaggacaggagggagagtctggccaggtgcaccccccactgcatctcattcaaccaggagatcaaactgctcagcagcttcaaactcggcattcatggccgcagcccactcatccagctccgttttctgagggaagagaaatgaggagcaggtgagtgagaagggaacatggtggctggagcatctcacccacaccctgcaggtgctgcctatcccccaaaagagccagagccccagccctgcacgtctcccagagcacacggcagagaaaaacccctgcctctcactcaccaagatctctggcattttcttcttcttacgtttctgtttctcgggtggtggggagattccagggagagtcatgtctggggcccagggctttgcacaaaccctggggacctcggtgagtttggagcacaccactggcgagactccggacaagtcttctgcccccagcagcccctcgaagccaaagcaggaccggcggcctggggtggaggtagaggcagagcccagggtctccagccggctgtaggaac

SEQ ID NO: 1726 - DNA, 2000 bp, Homo sapiens
  misc_feature (1)..(2000): DMR11:65634501
tgagctgggctctgggatgggggtccttatgccacagcccgtggaccaggattggaactccccgctggtcacgctgtgttttggcctgtgtgtgctgggccgccgggccctggggacagcctctcacagcatgtctgcaaggtgagtgctcgggtgtcccgcggggcctactgccgtccccaccccacctcttccacgaagagcactgtggtctctggccacagtggccacagaaactgcagtggcccttcctgttggggtacctcttctcccacgggcagggcacttcctggtcatgaccttgcctgctcctcagtgctctgtgagagacatgggcagagattggcctctttgtcaagatggggaaactgaggctcagcgtgaggaaaggcctctgcttggatcactctgaagccttacccctgggtcctcgacacccctctctcccctccctgtttttcctcccacttagcctggagcccttcctctacggcctgcacgccctgttcaagggggattttcgcatcacctccccacgtgacgagtgggtctttgccgacatggacctgcttcaccgcgttgtggcgcctggggttcgcatggccctcaagcttcaccaggttggggaggggtgtgcccagcagcatgggcaggtgggggatgaagcctctctccagggcaggggccactgacccctgttcccgtcttctctaccaggaccacttcacgtccccagatgaatatgaggagccagcagccctatacgatgccattgcggccaacgaggagcggctggtcatctcacatgagggtgacccagcatggcgcagcgccatcctcagcaacacgccctccctgctggcgctgcgccatgtcctggatgatgcctccgacgagtacaagatcatcatgctcaaccggcgccacctcagcttccgagtcatcaaggttgggccggccccacctgccctaagccctgccccaaacccccttgggccggccccctgaccctggcgtgtggctctcaggtgaaccgggagtgcgtgcgcggcctgtgggccgggcagcagcaggagctggtgttcctgcgcaaccgcaaccccgagcgtggcagcatccagaacgccaagcaggcgcttcgcaacatgatcaactcctcctgtgaccagccgctgggctaccccatctacgtgtcgcctctcaccacctcgctggctggcagccacccccagctacgggcactgtggggtggccccatcagcctgggtgccattgcccactggctcctgcgcacctgggagaggtgaggcctcgggaaggggtgacgtgtggcgcgggaggaagctgaggtgcagtacgtccctcctgggtctcagagggaggacgtgctggagccagggcttgaatcccgagagatgaccccctcccagagctgacctgcccctcctagatgtcaccttacccccagagctgacagtggcctttagtcatcaagcactgttgacaacgcaccctcaaaagactctgcaaagtaggtggcagcttcttagaggggaggatcctggggctcagaggtgttagatgacttgtcctggggctgaggactcatgcttgtgaggcctctggcctcagccgtgtccctcctgatcccttttctacctctccacccccaggcttcacaagggctgtggcgccggctgcaatagtggcgggaacgtggatgattcagactgtagtgggggcggtggcctgacctccctcagcaataacccccccgtggcacaccccacacctgagaacacggcaggtgagcaggcgaggctgggctgaacccgtgggtgaggagtgcagcccagctgaggcctctgctgtcttatctgtctcctacaggcaatggtgaccaacccctcccaccaggccctggctgggggccgcggtcctccctgagtggctctggtgatgggcggcccccacctctgctgcagtggcctccccctcgg

SEQ ID NO: 1727 - DNA, 1800 bp, Homo sapiens
  misc_feature (1)..(1800): DMR11:68373101
cgaggtttgaagccagagcctcaggtgagactcaagggtccctgggactccctcctgggtgtctgaccgtttatctttcatggagttacaggcgaagacatttctgtgatgtcttgaattctgctttttcctgattttgagcaaatgaaagccagctgggtgtagggagtcaggtgccttccccaaggaaggggctgagagggtggtcacaccgggaccccaagggacagggagcagcgttcccaggggcacacaggcggcctcctagaggtagggatgcgttggtggcggggggggccccgcactgctgtgtgccttcaaggtggcactatttacgtggcccctgagctgcagggtgaccgctagccctgggctgtgtcctggctcccccgcccctcctgaagtgacccccatgagacagggcaggtatatcccacgagcctctgccgcccagcgtggccggggctcagtgggaccatggcggctgcgatgctgctctctgcagctcagagtcactctcatccccagcagtcgagtgcagagcctgggcctccggcctccccaccccctccacacagccccaggaccaaggcggcagctggcttcggtttctgccatgtttttccaattatgtggaatgagctaaaaacagcaggagtgaggccttatttgggagttgccaccgccatcctcggaagctgctgttcctcactgccacccctccagccccatcctctgtggaacgtgcccctgttcttttgacttttgtctcctgcacatccctcctgcttgggggcctttgggcagtgggcttagcggcgtgcaccatgccactcgggccacacgtgccctggccggtggctctcagagctatgtccagagggtggccaggcagtgctcccggcagcgcccagatgaggctggggtgcggcttggggatttgtgggccgctggccacagctcacccagacagagttttaacagatgttcgtctgtcagggacaggaaacaaaaagaagtcggggatggagtgggggcagcgggaggaacagagggggccactgtcgagtctgacgggcagactgacagctggagccgacggcaaagcccctcacgtccctccgtctgtccgggcggattagctcaggaagcagggcccgctcagctcggggccgaataacgggcgtttgttcccagagtctggctgtcttgtcacttatcagggaagtaggtcaaagggaaaaaagaaaggaggtcctgtggggccgagtctgccgcggccgggcagtgattggcgttgactttgcaaacagaaggcagctgctgttctcagccatggaccgtgaatttttaatagcaagaaaatcagctcacacggttcaggaagttgtggaagaagcctgagtgctaactttatttttttaattgaggtataacttgcaggcaataaaacgcacacattttaacgtgtacatttggattaactttgacagctgcatatgtctgcataactaccacacggtccagacagagaacatttctaccactgggaaagttcccggtgcccctttgccatcctcaacccccgccccctccaccactctcctgacttctatcaccttggattagcgttgcctgttccagaactacatggaaatggaaccacgcagctgtgctcttctgctttttggcctgaatactcactgtcagggctgatgcaagaggagaggggcgcatcatattcctggagaacgctgtcaccgtggagcgggggcacagggggaatggcatctctgggat

SEQ ID NO: 1728 - DNA, 200 bp, Homo sapiens
  misc_feature (1)..(200): DMR11:70208901
caccttccgtgaccattctctccaggagctcttctccctctccgctgtcctcctctcaggtccctcacaccctcccccagcctcagcctcacccctcctctagggagcacagccctttcttagcctcacccatcctaggtccctggtacctgccaggtatctctagcccagatctttctcttgccccagaccccaactgc

SEQ ID NO: 1729 - DNA, 800 bp, Homo sapiens
  misc_feature (1)..(800): DMR11:70342801
gatatatgtgataatttgatacattcgtataattaaatcagggtaattgggatatccatcaccttacgtatttctcttttctttacactaggaacattcaagttattcccttgcagctattttgaaatgtaccacctttttttttttttttttttttttttttttgaggcagagtctctttctgtcgcccaggctggagtgcagtggcgcgacctggactcattgcaacttccacctcccaggttcaagcaattctcctgcctcagcctctccagtagctgggattacaggcatgagccactacacctggctaatttttgtatttttagtagagatggggtttcgccatgctggccaggttggtctcgaactcctgacctcaggtgatcacccacctcagcctcccaaaatgctgggtttacaggtatgtgccaccacgcctggcgtgtatcacctagtaatgttaactttagtcaccctgctgatctgtccaacaccaggtcttatttcttctaaggctatatttgcagccattgatcagcctctcttcatcctccccctgcccacccttcccggctgattttcggtttttgtttctgactctgccatctcccagttgtgtatttcgccatggaaatgccacatgtccatgttagggcgttaatatcacaagggtccaaggaatggattgttgccctccccaatttcttaaatactgcctgcttcatgtcagtaccttataagcatggcccatctttctaaaatcttttgggctttcattaaagaattcctaaatttcc

SEQ ID NO: 1730 - DNA, 400 bp, Homo sapiens
  misc_feature (1)..(400): DMR11:70855301
gccaggtttctggaagcttcccatatctagaatgttgggttctgggcaaattgcccatcagtctggcccaactcagtcacagaaggtttcagatccctcctctttgctcccccaaccccttgctcagatctgatcctatcagctcttccaacaacctccaggcaggtccccctttagccagcttccccttcctgattcttgaaccccaatgttatagctctgaccagggcatctgctttaaaaatcttcaacagctcccatggttagaacaaaagtgaaggaataggaattcctacattcaaatcctggtctccaacttcacaagaggtaacgctaaaccagcagaccctgagggcagagaagctgccttccatggcacagggcctggcatgtggtaagc

SEQ ID NO: 1731 - DNA, 300 bp, Homo sapiens
  misc_feature (1)..(300): DMR11:73287801
ggagagttttttaggaggccctggggatctcctggagcactgggtgggaggtgcagtggccctataggcgtggacttatacaggctgggcaccacaggccgtccctctgctcaccgggggctgccctgtcacagctgctccctgggcctctgtgctatccacacagttcctcagtctcagggctgcccttgacctctcagccctgtgcccaccggggccgcgtggtctctaaccctcttcattcacattcccaagaaagaacctcttgctaactttgctatgcctcagtcacctcatctg

SEQ ID NO: 1732 - DNA, 1300 bp, Homo sapiens
  misc_feature (1)..(1300): DMR11:73328001
tatagggttatggtgagaatttgatgtgattatgtctgtggtggctgggctggaccacagaccactggggatcagtgggaagccgtaaaacaagttggaagggagggagggaagtgacctagctggctgaggaagagccccagggatggagagaagaggatggggtcactgagagtagcccaggtaatcctctttggtagggggatgagctgagctccctgagggaggcttggagttccccacgggcagctgtccaaaggaaaagagtggggctatgcaggagggatgggactctgcaggctgggggctctgccggagttttgctagcagaaatccccaccttgctttaaagttgcccatcactgactctggagcagctggtctgtgttccttgccatacagatgggggcccagagaggggcagggttgccagagtcacccagtgacttctgaccccaggaccttcctccaggctggggactcactttgaagctcaaagcccagccctgaggtcgctctacccaaggcaggggttgagcgtttggcttgaaggaggaattggacagttctaccccagtctgaatgtgatttgggcagggagggcttcctggaggaacaccacatgtgagactggaactgtcccagaggagaccaatgtggaaacagaagagggaaagcaaagacaaaggctccaaacttggggctccaaggcagtgccccctgttctctggtgcagtcttcattcagtgggaacctcgtcctctgtatgtaggctgggaacacaggtggtgccccagctatgaggaggcacagactgagacaggaacatcaggcctgtgtcaccagggcagggtccgggctggggcagagatactccgaggccaggggagcccagaaggtctaggagagagagtcatggagggagcctagagaggcaggatggagaaggaagaagaggggtgcaaaggctgttcagagatgagacgtgaggctggagtgggcagcaggggcctgattgcaaggtgaattttttaaattaaatttatatatttaatattttgaatagatgatatattcacatggttaggaaaaatccaaaaggataaaaagtctccttcccacctggctgcctatttcctaccctgcctgaccccaggccacccagctagtagtgtctttgtgaatccttttatctgcaaacaccagcaaattcatcatctgttcccttcctgcacacagatggtagcacaccgctttgccccttgctcgttacacttaatgtcatttgcaggtcttgcct

SEQ ID NO: 1733 - DNA, 500 bp, Homo sapiens
  misc_feature (1)..(500): DMR11:73773301
tgggattacagttgcatgccaccacacccagctaatttttgtatttttagtagagactgggtttcatcatattggtaaggctgctctcaaactcctgacctcaggtgatccacccgcctcggcctcccaaagtgctgggattacaggcgtgagccactgtgcccagtaaggaatcttttttagggtgatagaaatcttctaaaaattatactgtgttgatgatcacacaattctgcacattaactgaaaatcactgaattgtatgctgaaaatgagtgacttttgtggaatgtaaattatacctcaaaagaatgttattcctttttttttctgaaatggagtttttcactcttgttacccaggctggagtgcaatggcatggtcttggctcactgcaacctctgcctcctgggttgaagcaattctcctgcctcagcctctcgagtagctgggattacaggcacctgccaccatgcccagctaatttttgtatttttagt

SEQ ID NO: 1734 - DNA, 800 bp, Homo sapiens
  misc_feature (1)..(800): DMR11:74559301
cttctcaggccctaccagccctcacattctctgatgcttctcccccacctagttcccactcacccctcaacaatgagtggtcaagttctggctgcgatcatgactgcttttccacctcagcagtgtatagcctcttcttgcagggatatttatttatttatttatttatttctgacagggtcctgctctgttgggtgcagtaatgcgatcagggctcactacaacctggacctcctgggctcaagtgatcctcctgcttcagcctcccaaagtgctgagattataggtgtgagccgccatgcccagcccacagggacctttgatgggactaggggtaagcttcctttgaaggcagcattgctgttttggttactgcccatcaacctgggctgtctggcctggaagtactgcctggccaacgacaatggaaaggtttatttgcagaggccaggaagtccccatgacccctctccattcacctctgagacaggaagccccaggaggaaaaaacaaaagatgaaatgctggctgacttcccagcttccaagtgctcagccgcactctggactggaggatcccttctgcccagtggacagggacctctttcagcagctccttccttgtcattgatccccagggcttcagttcctgtcctgaggatccagaaggacttaggtgacgtaaaagaggtatgaaatgaagattgagtctctgggaaaggatgcatgatgtcttatcctaagctaagcctccatgtctgggaagtggggggaggctgaatgcacagagtgggaaaaata

SEQ ID NO: 1735 - DNA, 1900 bp, Homo sapiens
  misc_feature (1)..(1900): DMR11:75717601
ggcagccatgcagataaggcattgcctgagaaagttgataaaggctatacaaccccttctcttcctccttccttagccaggctccagcaggtagattcaaaggtttcttgtaggatagaatttcctgcctcagcaggggcaaggaggccttggggctgggctgggctgggctgggtgtggcactctccctgccagcttctacaacctggggagggaacaaaaacctgtgggtgcctcagaccacagcagagctcacagaacctgcgggagccaggctgacccgccagcatggtagagttcgcgcccttgtttatgccgtgggagcgcaggctgcagacacttgctgtcctacagtttgtcttctccttcttggcactgggtaagttgggctgcactgtaagacgggagaccaccgcactcaggtggggcagagcagccacaccaggtgcacacagcacattgatggtggcaagacatttatcctaaagggggctttgttgcgctcagagcccctgcccagagagaactcctgggcctgcccagaggcttcttgggggtggagtggggtagaagtcaccgtctgctgctctgggcaggttacttactcttcctggcttgcactgtgggttctcctttggcacttggatgaagaccagtctgcaggctgccaagtggtgtgggaaagcctctgggcgatgacgggaaagttctgggctctgcagcctgctcagagaggagagatttccttctgtgcgctcagggaggaggaaactggggctggtagtagggtaagtgagagaaacagggaaagaaaagaagggtggggagaaggtgcagactgagagtggactgtggagtgggcatgctgggtaccaggaaacccggagtcagactcagctgggcaactgactttagccagcccatgcctgacctctccaagcctcgacttcaccatctgcagaacggggacaacaatgctggccttgcagggctattgtgaaggaaatgaagaaatgtgctgacctctgcttggcacagacctggcctggaccctgggctgggctcacactggagggcatgagcatggccccttacccaccccaccactgatttgtggccagagagatcacccttgcccaaacaatagctctgccaaaggtaacattttctaggagggtctggatctgtggcttgggaagggagaatgactaggagtccgtggggtttttcctttcatctgctggcaccagacaaggtaggaactgctgcttccagggctgaggttcagcctgtacacagataccactctcctggttgttaaaatattgacacactctgaacacattgctcagtagccatctctctttctctctctctctctcacacacacacacacacacacgtacttcctcagaaactcccccacaattctgtagtgaaaaaactcccccttggcaaagcaggccctccaggaccctgccctagcatcccttctggttgagctgtgtctctgttctaagggtttttagacattttacacattcctgtataccccctttgcacagatgagccaaacaatcaaggatttgcctccagtaagggctgagaaaccatcagtcagaggggaattccacactaggcctggtcttagccctgatgcacccctgattatggggcggccaggggctggcctcttcctccctccctcctttcaacaacaaacgtcactggtcactgaaggcaaaggaatcagagctcagcaggtttgggaacactgtgtagttcagagtggccacagacaagaggcaggagcgggagggacagggccagctctggggctcctggaggccaggctgagctacttggactgtgcccaaagttatggggaagtcatgaaggg

SEQ ID NO: 1736 - DNA, 1200 bp, Homo sapiens
  misc_feature (1)..(1200): DMR11:76106801
gcaaggagcagaagttgggcctgctggacctgctgaacagcatgaatatctacattaatggatcctactcaagtctactgactcatatagcctttagcctccagagaacatagcccttctttgatgggctgattaaactgattaaaactgattgcagttgcatccaaggttgtgatttacctgcttttgacaaatttgcagttttgctttgattgtttatttgcaatgtgcgttactaatcctccttagcaactcacaaggattggaagtgatagagactacactaacaggttgactccagagttgcatgagtttaatagtgcttctagttgctttctggccaatataagattccaaagcaaaggaccatcttaattgaaatatttttaatatggcagattttataatggtaaatttaactcagatataatctgtgccttgtgaatacaataaagcaacatatgatataaagaaaagagcctgtaagggtagaacttggcagacttggattctggtccctggactcaacctgttcaaccttaggccatttaacctctcactttcttcagaggtgccattcagctctagtattaattctatgattctgaaagcagttgatagtgtgactggaaggagaaatgaaagaagctttttcaattactagactttaaagcttctagttttgacttctaggcttcagtcctcagaatggtagacctgagctgtgtccagtgtttacattataacatatctattttggaaaagactggcacgtgtttatagatgggattggaaaagtacttaggttgttcttgcaaccagaggcccataatcgagtttttatatttttccttagaggtatatattgcaatgactcactgtaagaaacaatattattgctcatattaaatattctttaagtagcttttccacgtcttgaaagaattacgttttcttctaggaaggcagattttgtttttgacatggtggtactcttttttttcaagcgcataatctagttcttttcatgtcagtgaaacttagtagtacttaaaaatggattgaaatagtggtaactagttccacagagatgtttgcctacataaggcaaatctctaaagttaaatctttgatgcatatgtgcatttttcatttcgtattttcggttcctccacaccatttctttgtagtcaaattcat

SEQ ID NO: 1737 - DNA, 1100 bp, Homo sapiens
  misc_feature (1)..(1100): DMR11:76141601
tgctttcaagatttgcttttcgggcctgatgattttaaagcaaaaatcaccctctagttgaaagagcttacagctcgagtcaccttttagctatttgtctgctttttatttacccttgtatgttatcctcagagggaagatgataatatataaataatataatgaacacacccttagtttctcataagcatttgccctcaccatggtttataaaactttgggaaaacggaatattcagaaataggtttccgccatgtactgaaaggtctgtggccatctgtgaggtagatgaagaagcagcatagtggtctccttacatctaggcctaactgtccctcttcctgcccccgggtaccacagtccacctttagaccctactgtcgccccatcttctccgtggatgggccatgcgtcctgaaaacaggacatcagattcactggttctgtaacccagtagctgtgacgttccatctcttctaaccagccatggccttcccctcctctgccatacccttaatgcggccctcagattagatgaaaaacttgctcctggtggatcccaagggaccctcaaggacctcgaggttactgcagtcagatgccatctcatcccctgtgggggccaaagtttttatgtgggcagatgctgtggtcaggaactaggcatgctttctggcaatgcactcaccagacaaaaatcccttgatgtaaatcccatgttaatttattaaatttcagtcagaaggtcagcatttacatgacagaatgtatgtagagagttggggtgtctggtaggcaaactgcaaggcagttgagatagttggattaagaggctagacgagacatagaatactattggtatgtgtgcaatttcatgaatattaaattatgtttcgaagtccagttgtcattcccgcattcagatttcatttgctgttgctttatacgttacgtacccaaggacattgcctcagggttgcaaactctttaaaggaaaatttatccatatatccatgtattatatagaagaataaaaattgagtttacttcacccgacctgatttttttttaccagcttggaaattcctcttgaacctacg

SEQ ID NO: 1738 - DNA, 1100 bp, Homo sapiens
  misc_feature (1)..(1100): DMR11:77774701
cagatcacctgaggtcaggagttcaagaccagcctggccaacatggtgaaaccctgcttctttcttttttttcttttttttttgagacggactcttgcactgtcaccccaggctggtgtgcaatggcatgatctcggcttgctgcaacctctgcttcccgggttccagtgattctcctgcctcagcctcccgagtagctaggattacaggcgcccgccaccatgccagtataattttttgtatttttagtacagatgaggtttcactatgttggccaggctggtctcgaatcctgacctcatgatctgcccaactcagcctcccaaagtgctgggattacaggcgtgagccactgcgcccggccgtgaaaccctgtttctactaaaaatacaaaaaaactagctgggcatggtcgtgggcacctgtaatcccagctactcaggaggctgagacaggagaatctcttgaacccgggaggcagaggttgcagtgagccaagattgcacctttgcattccagcctgggggacaacagcgagactccatctcaaaaaaaaaaaaaacccaaaacacaaactgaagagagttccctgtaggtgtgaaagagaaattatctgaatgaatatattaatatgcaggaagtgatacagaagagatgaaaaagatggcaaagatgactctgggttgttcagagcactgtgggagcgaacaggtgatatcactaaccgaagagggctcattgttgtcttttccccgcttttctctcccttttaaggggaggaaagggaaaggagaatgctcccatggacatctgtatataggagtaaataaccaagtccatatgtttaattaaagaaatacttacacaggcatattctagtatcagacctctataaaacgccaggcttctatgctcatcatgtatattccataggtatttaaaacttgagcagggccaggtccggtggttcacacctgtaatcccaatgctttgggaggctgaggaaggaggatagctggaagccagaagtttaacatcagcctgggaaatagtgagaccctgtttctttgtttgtttgtttgtttaaacacagagtcttg

SEQ ID NO: 1739 - DNA, 1600 bp, Homo sapiens
  misc_feature (1)..(1600): DMR11:78411001
aaattagccaggcacagcagtacgcagctgtcgtcccaattacttgggaggctgagacagtaggatcacctgagcccaggaatttgaggctgcagtgagccatgattgtgccactgtcgccagcctgtgtgacacagcaagattctggtgggggtggttggggggggggatggtggaaggagaagaaaataaacgaaggaagaaagacatatataaataaatgtaaaataaattcatggactggaagatttaatatagtaaagctgtaatttcttcccaaattggtacacaggattaatgcacttcctattaaaatctcagcaagactttcttttttttgcataaacaagattattctaaaatttgtattgaaaggtaaagataatagaatagctaaaacactttgaaaaataagaataaagtagaggaatcaggctaccagatttcaagacttacaatatagctagagttggcaagattctatggtatttgcagagggacagacacatggaaaaatggaccaaaacagagacaacagaaacagacccacacaaatacgtccaactgatttttgacaaagacggaaaagcaattcaatggaagtaggatggctttgtcaacaacaatgacaacaacaaaagaacctcaatctaagtctcacatcttacatgaaaattaactcacagtggatcacggacttaaaggaaaaacataaacctgtaaaatgtgtagaaaaaaaaaaaccaggaaagccggcgcagtggctcacgcctgtaatcccagcactttgggaggccaaggtgggcggatcacgaggtcaagagattgagaccatcctggccaacatggtgaaaccctgtctctactaaaaatacaaaaatgagctgggcatggtggcgcacacctgtagtcccagctactcaggaggctgaggcaggagaatcgcttgaacctgggaggcagaggttgcagtgagccaagactgtgccaccgcactccagcctgggtgacagagtgagaatctgtctaaaaacaacaacaacaacaacaacaacaacaaagagaatcacttgaacctggggagccgagatcatgccattgcactccagcctgggtaacaagagcaaaactccatctcaaaaaaaaaaaacctatatataaaatactcaaattcttgaagacatttgaccaaagaggatatacagatggcaaataatcatatgaaaagatgttcaacatcattagccataagggaaatgtaaatgagaactaacgggtgaatggttaaataaacagactgtgtggtacatccataccatgaaatactacttagcaataaaaaacaataactattgatgcatgaaatgaggatgaatctccagagaattatgctgaataaaaaaaagttcaaaatcttaagtactgcatgaatccatttaaataacacacatgaaatatcagagaacagattagtagttgtcacagattaaggatgtggtaggggtgggatggtagtgaatacgattataaaagggcaacataaaaaatcctatcatgatggaaatgctctgtatcttgactgtatcattgtcaatatact

SEQ ID NO: 1740 - DNA, 400 bp, Homo sapiens
  misc_feature (1)..(400): DMR11:80189701
cttctacagtgtaaagatttccaccttggctgataccaggcttactaagaggatgccatggaacttagaggtggaaagagatgtgcacgatctgcttaacaaaccaacgccaaccagatctagcacacagatggttatagatctttgacaacctctcaattttgtcaattgcttaggttttctatctcctatggtgtctattttagtattcattagaatactattttcttagaaaagtattcattcatctagatgttcaaatatgttagtcctgtgaagttcttttaaaaaataatacttttatttccccagtatcttcgatacccactctccctgccctttccatttcaaatggtgtatgtttgcattttctccctttatatgtatcaggttaactaga

SEQ ID NO: 1741 - DNA, 1300 bp, Homo sapiens
  misc_feature (1)..(1300): DMR11:80439801
ttatttgtgcatctctgaattaccaggcatggctgctaggcagtagggatatacaggtaaacaaaacagacattgtttctgtcttcaggcctctttgttccaggggaggagaaatacaatgaatcaatacaacttgttgatttgaatcaacaaatcaataaataagagacatatagattgtgatgagtgcaatgaaggaaatgtagtggtggttgagatggaagctaactgaggtgggcaacttcagatagcgtagtaacagaagacctttgtacagagatgccaggtgagctgagatctcaagaatgggaaaaggtcagctatttgcagagctagaagagcattcctgatggtggatagcagggtcaagggcctgagtgcaaaatagctgactgcatataagacactgagaggttggcgaggctagaatagatggattgaagatcatggtccaaattggtcttctttacatctccctagaacactgccttaggcttatttatattttggtaggttatatgtcatatgccaacagagaacagtgagactgcaaaagagggaatgtcttttggaggagttgagaaagacttcagaggggagtcacgtcttagggagatgaggagtcagtcacaaagtttggcagagcagaaaggaaaagaaggaaaataactgatatgattagaagaaacagcctgtaaaagatcataagaatggtcactacaggaaaggaagagatgctcagagtggctgaagtgtgggaatacagagcccacaaggaacaagaggagcggcaagagaaagaactggttgaggtcagataatgacatattattcaccctagtaagaaaaattgcttcatccttcatctaccagggagttggttatagtacatactatttaaaacatgatttctcattaaaataaccctgaaaaggaaacatattaggtttcaggaaagctaatagggagtcatcctctgtttttgtaaatctgtgtcattggccaggtacctgcacatatcgctgtagtgggggtcctcaatcctgttactactattcaatatttctagagctcagcacatcagagagattatggacttggtccagagcttctgtggctctctgctctttatcacacacgaagtcattataaattgtccatgcagaaggaagagctgtgccgtctcccttccactgatcacttttagtaacacacatacacactgctctgctttttcgccaactcactgcaggacagaggaataaatacataatggaacatgcaaagtctgcttgcttct

SEQ ID NO: 1742 - DNA, 300 bp, Homo sapiens
  misc_feature (1)..(300): DMR11:82230901
gtcttagttcagtaatcacttatcttctagattattaaaatagtcttcaaattgtttatgttgtctctagaatgtagccattctccttttttatctacctaccaaattgttgccaaagcaattatcccagaacccaaatttgatcattcttgcttcctccttaaaaatgcttcaaagtttcctaatagcttatagaccactcatacatgccttagtttagcacataatctctttgcaatttgaaccttttctcatatgccactctgtcaatacaaatgcacttttgcttcaacctttcaa

SEQ ID NO: 1743 - DNA, 1700 bp, Homo sapiens
  misc_feature (1)..(1700): DMR11:82978801
taaacggcttaaataatcctcatccaaatatcttattttggccaatcgtttctaccttccttataaactctaaatcagaacttgacacattgtcaaatcaacccatttaactttcatttttagttttcttgccactttactcagggagagataaaaacgtgaaatgattaaaagaccgagaaaaagaaaggccaggaagaacccatggcctaatctaagtaatccatcaaaaaagataattggccctgtaaattcaaaaaatattaatataattcaacagatttaataaaagcacacaaagggagaaaaagccttctatgggcaaagaagcacaaaatcctttgaggatgtagtctatacaaagccataagaaaatatcattatcagcaaactattatttcatagattttcccaagcctgactccatgacatgagtatcatgcattttcactggaaactgaaaaaagttttgccatatatttaataactttattgaatgaagaaaaagatcacaccaaaaatggaggaatacatcaaccctggtggtcttagtagaccgagccaaattaaactatatgataaagcaatttctcttttttcatccaccactaaatgagagttcatttttatctaaagaaggctcatcttagcaaatattgccatgacaataagactgttaggcaaaccaataaatttaggttctggcctgggttaagatgactgtatttagtgtcctttctcaagttctacttgaaggaatttctgtttaatcaaaaaaagctcccccaaccactaccaccccaccttggcacttaaatgtttatttgactaatatttattgcacctacaatattgtcagggattgttttcaaacttcagatatattagtagacaagtatccataaggcctaatctggaattcatacaactaagaaaaaaagaaacaaagtcccacattctcatgtgttcctgctgatgggctgtggatgggtaagttatggaaaggctgggaggagcaacaaggaagatagaggccaagaccagagctttttaatccccttctgagtctggccaagggtatatagagaaggctaaaccctagggaataatacaagtgtgaccctaaaaggtattattttgcaactaaatcagtccaatctaacacagccatttcctctaagttcacaaagcaactttattttcaacacacttgcaactgtgagacaaagttgggtcatcatgtgctggggacactggatttttgccctaaatgacaggtaataaatctaaacttaggaacattttcttacagtttaaaaaaaattcttctgccctccttgattaacttgttttctgaatacatttagttgctggcttagtggagaggatggggagggaaaggcaacaattattataaattattttggtttttattaaaatgacttttctttcctgcagagacagattctaaaagaaaaacaagtcaaacttctgggatgcctttctctttcccacaggatcaggaaaaacacagtgaggccaaccaaaagtatcagccccttaaaaaatatgcataatctcatgtgcaagacactggtcaatctagaacctgctagagaaatgccagaaatgctttatccacatcatgtctctacatgactaatttctttacaattaaatagctttcaaacatcaacata

SEQ ID NO: 1744 - DNA, 1200 bp, Homo sapiens
  misc_feature (1)..(1200): DMR11:83213501
cttcgctttttcagactgctttcaatttccattttcacatatggtattattagtttttttttttagttttagtctttctgatggatgtatctcattgcagtttcaaatttacatttttcctgatgactaaagatgttgaacatcatttcgtacgtttaaaggctatttggtttttttgtgtgtgtgatgtactagttcaaatcttttgcctattggctgttagagtgtgtctttttcttattgaatcataggagttctttatatattctagatacaagccctttgtcagttacgtttattaccaatatcttttcatgcaaatatctttctaatctttctacttcatggcttgctctttcattctttggtattttttgataaatgaggttttaattattttttttttttgaaatagagtcttgctctgtcgcacaggctggagtgcagtggtgcagtctcggcttgctgcaacctctgcctcccggattcaagcgattcttctgcctcagcctcccgagtagctgggattacaggtgtgcaccaccacgcttggctaatttttgtatttttagtagaaacagaattttagcatgttggccacgctggtcttgaactcctgaccttgtgatccacccacctcggcctcccaaagtgctgggattacaggtgtgagccaccgcgcttggccagaggttttaattttaacgtagtccattttaataatctcttcctttgtagttagtcctttctgtactttccctattttgtgatcatgaagacattcctttatgttatctgttagaaattttatttatctttcatatttatattcccaatcctcctagaactgacttttccgtgtgtaatacaaggtaggggtcagttttatttttgtattgtcctttatcaaatatacttgatcatttttgttggtcttgtctggtcattaaaaaatccaattgtttctttaaacatgtatgattattttatttataaccaggtagagtatttataataatatagatgttaagaaagaatgtggccttaggtctagactgcttgtgttcaaatcgctctcataaaattattttttattgataaatgtacatatttttggtgtacatgtgataatttgatacattcatttgtatcaaatttgataatgtataaagatcaaatcaaggtaattggggtagccat

SEQ ID NO: 1745 - DNA, 600 bp, Homo sapiens
  misc_feature (1)..(600): DMR11:83850301
gtgccaccactcccggctaattttttgtatttttagtagagatggggtttcaccgtgttagccaggatggtcttgatttcttgaccttgtgatccacccctctctgcctcccaaagtgctgggattacagtcatgagccaccgcggcagcccggggtaagttttctaatagataggagagcactgatttgatatagagagatggggagtgggataataattaatgaataaggaaaagcataaattaaggaagtcagggaatatgtggtgtttgaaggaaagcaaatattttcactggactacaatgtaccattctagcaggggtgtggtggagacatgaaggcagaggccagatcaggaagaggttcttagacagggcaaacagagattcaattcttaatactcagaagaacagagcagaatatttgcatatactttcttcattcatttaaccaaggtttggccagcagctactgggctcgaccctggctgagccttgcacatacaaagctatacaagagctctctgtccctgaaaagtttacactctgcattatgtgttgaattttgtgtctccaaccctaaagaaattttgaggccgg

SEQ ID NO: 1746 - DNA, 800 bp, Homo sapiens
  misc_feature (1)..(800): DMR11:84393101
ggcctagaaatcagacgggatcgcctttgaatcactgtagttaaggaggctaaatatataaatatctttcaccattgatctccattctgagcatttactttaaagaaataacacaaaacatgaagaaaaacttgtatagcaaagatgcatatggtatcatttatttatatataaacttatcttttggaaacattcttattagaagatatatgtatataaaacatatatagaagagtatataaaatatgtgcagtttaaaaagtagttatgaagtatcactctaaatcctttctgtctgtctacagctaagcactactctaacttttgtaatagttatgttcttgtttttctttatagattttgccatccttcattctttgacaatatagtacagtttacctattttgaactatatagaaacagaatcacacaaaatgtgacttgcctatttctcttaccattacattgtgagatgcagctatctagttttgtgtagcagtagtttcaataatgtttaatacaggaagctacatatttggctttctagctaccttatttttgctcttaatttgcccaaactgttttgtgtttatttttttctttcttttagatgactttttaaaattatatagtttatttttgtttccctttttaaaagtggtcacccttgaaattataacgtttacttatcaaattctaaacttagtcaattttactctcctacttcttattaatgtatacacatcattaatacattattgtcatcatatttttactctgttcaattttttttgttgttt

SEQ ID NO: 1747 - DNA, 1400 bp, Homo sapiens
  misc_feature (1)..(1400): DMR11:85194301
tcttagtgggggaaagagtatggaaaagctgtacaaggattttgctgctcccttggtactttccagcacacttcagccactgcagtcaaaatatagttatatattcattgttttggtccctctttgtagggggagacaggcttcaaagaacagtatttacccatcttactgatgtcctaaaagctgtttttcagtttaaatgctgcaatatgaatataaagatacaaagggcccagaagtctcagagagtagaatttcatataaagcaaacaagaggaaaacattttccgcactcccctcacccccacccccgccaaagaaaaattcaagcagaatagaaagagtatgggaggattgtggcatgaagttaaatgctggtacatccctcataggggcttataatcctgtccatcctcctggctaagcccctagtagggagaataatgagacaaactcataccgattgggatgggggagtagcacaaagcagatgaattttcatttattaattcagtttatttccttcatttattcattcatatattcatttaaccaacaaataattattgagcacttactatgtgccatgttctgtgtaagcattgggatgcagctaggtctcacttccatcataaagttggaaagtacaaaaagtctggtagagaactgttctatgtcagcctggctctgcaatagtagacataacagaagctaaatctaaaaagagaaggccagagatattccctacctgctattctcaagctctgaagcccaggaagaacaagggacagcatctaaaaattccctatgttcctgagaaaaaggtacgatagtggctgagggtgggagatggcccctggaggaacatcataattaggatgaattgagaggctattgtaatcagtacgaatctagttagcggaggcaaaggggaagaggacattttagtgcactgcagtaagagtcagttccagtgaccaaagatgttaatggtgactatatttttcaacagaaggcagcatgcatggatgcaataaatcatggacacattaacctccccactgaagccagagtaacaaggccctacccctgtggaatttagatcaaaggtctgaggagaagaaaataagtgaaaaggagggaccctgaagtcaccaagtagaaacctagaattgggcaaacttaaatcataaagtgaattattttctctgaaagtgacagtgttttttttttttttttttgagacggagtctcgctctgtggcccaggcgggagtgcagtggcgcaatctcggctcactgcaagctccgcctccagggttcacgtcattctcctgcctcagcctcccgagtagctgggactacaggcgcccaccatcacgcccagctaatttttttttg

SEQ ID NO: 1748 - DNA, 1200 bp, Homo sapiens
  misc_feature (1)..(1200): DMR11:85622001
attttaacaaattgccttagacatcccaaccttcagcaatcatcaccctgatcagttagcagccatcaacaacgaagcaagatcttccaccagcaaaaagattactactcgctaaaggctcatatgatcattagcattttttagttgtaaagcatttttacttaaagtacgtacattgtttttagacataatacgatcgcaaacctaatggactatagtatagtatatactgtactgtatacaacaaatattttggtttcccagtgcatatataccgtagtatacaatatattgtatatatgcatcagaaaaccagaatatttgtgtagcttgcttcattgtgataataggccttatttcagtggtctggaacctaacccgcaatatctctgagatatacctgtacatattccccctcttattgattctgaaaaaaaaatgattttaagaacttaagaaaaactagagatgaaaacagagtatacccgataacaaaaagcaaatgtaaattagtaagatactataaaacaagaagtggagccataatgtgcaggaaacaacaaaagaagaaaactttgaatagggaaaaaataagcaggagagtcataaggtcctcttccccagaggaaaaaaaaaaaaaagaaatgacacttttatgaagtatacagtcaaccaaaagcaaagagataatttaagaactgtgagtccaggaaactgtaatctcagtttcaagggtgcctatgagatatatggcaatatcatgtcttaagattctaaggccaggcgcactggctcatgcctgtaatcccagcactttgggaggccaaggtgggtggataacgaggtcaggagttcgagatcagcctggccaacatggtgaaaccctgtttctactaaaaatacaaaaattagccaggtgtggtggcacgcacctgtaatcccagctactcagaaagctgagtcaagagaattgcacgaaccccggaggcggaggttccagtgagccgagatcacactactgcactcccacctgggctacagagcaagactctgtctcccaaaaaaaaaaaaaaagattccaattatataacattcttcagcttcctttgaaagctataatgtcaaaacatatacatataaaaaagataggacttagctttcagtacatgataaaaatgtttatatatatattatatcact

SEQ ID NO: 1749 - DNA, 200 bp, Homo sapiens
  misc_feature (1)..(200): DMR11:85992901
gatcaatcagataaggaaaaccagttcctaatctacttgacaaaacactacaggtaatctacaagatgttaatctattaatggacattacactataataataaaaaccaattcattaaggtataataataacgctccagctatttcaagttaacctattaaactggcaattcgaaatcccttaaagtttttttttttttt

SEQ ID NO: 1750 - DNA, 800 bp, Homo sapiens
  misc_feature (1)..(800): DMR11:86317801
aacgaaaaacgatgaatcaaggaaaaagaaagcacaagtaatgttattaaaaatgtgaagaacaataactacaagtttaatagagtttcaaataaaatttataaagttttatgccagtacatttgaaatgacataggaacagacaaaattggctattttctagaagaatataccaaacaaaactgaaataatttactttcaagagtagattgaaatcctgaaggccgggtgcagtggctcacgcctgtaatcccagcactttgggaggctgaggcgggcggatcacgaggtcaggagatcaagaccatcctggctaacacgttgaaaccccatctctactaaaaatacaaaaaaatagccgggcgtggtggtgggcgcctgtaatcctagctacttgagaggctgaggcaggagaatggcgtgaacccgggagacggagcttgcagtgagccaggatcgcgccattgcactccatcctgggcgacagagcaagactccgtctcaaaaaaaaaaaaaaaaaaaatcctgaatagatgtaatatcaataaaattaaaataattaaaatcagtaattaaaaatatacctcttccttcctcatgcagccatcagatgggtttacaaagttctactatacctttaagaaacaaattgttcatattttctataattttcagagaatagagaaagaggcaaagttattcagtttaataaattttgaagccaatataaccttcataccaacaatggccaaagacaatatgagagaggatattggcctttgtcaattttatttatttag

SEQ ID NO: 1751 - DNA, 300 bp, Homo sapiens
  misc_feature (1)..(300): DMR11:86739801
ggcccccatcttcatttacaataacagccatacccaccatgtgtcccaggacagttgacaagccagagtttccataggtctagttcctcatctctgttgctttgattaacctgccactgccaccatccctgaatagagaatatgtcttcagcctccaggccactccctaccagtcccacctttcctcctatggcctatctccaggtctcttgccttcatgggtgcaacaaccaccttctcaggtcaccagactgcagctcaagggataccaaggagcaggtgttcagccctgaacattgc

SEQ ID NO: 1752 - DNA, 500 bp, Homo sapiens
  misc_feature (1)..(500): DMR11:87847301
atgcttaatgtgtaggatttgttacaatagactctatacattaaaagaacaaagaatattataaacaactttggactaacaaatttgatcctttacatgaaacagatttcttaagacataacttataaaaatttatacaaaatgaaagaaaaagctgaatagtcttatgtaaattaaataaactgaatctgttaccaaaattctccctctctttcaaaacaaaacaaaataactcctctaggccttgggtttcactgtggggttggcattgacttctatgaatatgcttcccttggggacatcactgcatgctccctgtgtggagtgagtaggggtgagatggtgggaaggtacacaggagactgcagcagaacaagactcatgcacaggatgctttggtttcatgaccaaagacattcttctttcttgttatgacgatcaatttaacgtcagcagccacaaatcaagcgggagaaaggaagaatcaaaggacagaaaga

SEQ ID NO: 1753 - DNA, 2300 bp, Homo sapiens
  misc_feature (1)..(2300): DMR11:89965801
gtgaaataattgttacacttaaaatatttctttgaataaacagtgttaagtcaactttcttgcatctcattccaaacttgtctgttgagctttgagccctcaagtctggttttcaatactttataaacctaatcagccaatttacccctttctacgcaatctaatcaacctcaggaagtgggtgtggtctttcgtgggcccatacactttaaaaggatgcttgtccagagatttctctctccttcagtgaggacccactggatttgtggctgctgggctttgaagagccaggagtgacttctaatctggatatctacagagtttctagactgagaccattcatagtagccttgtgagtatacagtgtgcagcaaaaccatcatgctcacttttactcttaaacatgctttaaatttacctggcagcatgcttgggtcttttctaagcaaacaaatgactgtcttagtgattttacagaaaatcaatataaagtatcttcaatttgtaagatatggtttgtgttcccttgctatttgactatgtgactgttttctgtattgttagatttttcttaagtgtgaaaagatatatttccatagtttcatgcaatgatagaacccataaaatacctaaaatgttcaccagaatgtgggcatgtagtagtggttataacgtaagccaaagcgaacgttaaaaatgttgaattactttgaaaattcttgttgcaaaggtcttatttgctgtctcttcaaaatttgcaatttgcagactagatttgaaagctgttgaaaatagatttaatcggctgggcatgatggctcatgtttgcagcctagcactttgagaggccaaggcaggcagatcgcttgaggtctagagttagacaccagcctggccaacatggtgaaacctagtccctactgaaaatccaaaaaaatcatcctggcgtggtggtgggcacctgtaataccagctactcaggaggctgcggcaggagaattgtttgaacctgggaggtggagcttgcagtaagccgagatcgtgccactgcactccagcctgcgtaacagagtgagactgcatctcaacaacagcaacaaaaaaaaaaaaaaaaaaagaaagaaaaagaaagaaagaaaatagatcaatagatctaaccaactggcaagggctcccaagaagctgcaacttccaagtcactaagcgaaaggtgaattggcggccatgcttccattaactgcatttctggattttctagtgtagagtggaaaacctaatacatatcttcactttttttttgttattttagaagataattagttgttgattaattcttgttaattatagttgaaatattggctatttcagaatgtgaaagtgttctctctaatcatcagaattgacaatgggaaaaaactttcctaattaaaaataatagatattatttacatttaatgtattgaaaggaagagttttgatattaaagttaaaaggacaaatttaatggttgataattttaggagttgacagtccactgtgattactcaatcttagataaaagctactttatttataattgtctgagcaaacttcataggtgagtttggaggcagggagtatagaataataccatagatactaagtgtctttcatatattatcatcatggaattattgagagagatagaatgacagaaacaggatgacattcagaatgtgcttcttcgttaattagcttacataagtgactcagaaatcatcccagcttttaccctccacccaggctttaagcttgtctaggtaactgggaatgactgagagcacggcttgtttaacaaaaatgccatgaggactgttgtctcattttctcatttgcatcacagttgttcgttgttcatattcataagtttcatacccgtggattcaactaatctcagataaaaaatatttacagggtgaaaaaagcagctgtactgaatatgtacttttttttttttcttgagacagagtctcactccattacccatgctggagtgcagtggtgcgatctcggctcactgcaacctccgcctcctgggttcaagcgattctcctgcctcagcctcccgaatagctgggactacaggcacgtgccaccacgccctgctaattttttgtatttttagtagaaacggggtttcacggtgttagccaggatggtctcgatctcctgacctcgtgacctgcccgcctcggcctcccgaagtgctgggattacaggcatgagtaccgcgccctgccaaacatgtacatatttttaat

SEQ ID NO: 1754 - DNA, 300 bp, Homo sapiens
  misc_feature (1)..(300): DMR11:91603401
tgtgaaggaagaaagattttttccagatgacacatctagaaagacttcttaatgaaagtttattttttttttgctgcactccagacttgcatatccacctggcttctgatattttctacttttatgtcccattatgctcaaaatagaatccagcacattttgccccaaatttgtttcttttttcaagtacccagctaactcaatgacaccatccatcaaacccaccaagctaatgtcctggcagtcataatgaatctctctctctctctctttctctctctctcacacatgccaccattg

SEQ ID NO: 1755 - DNA, 900 bp, Homo sapiens
  misc_feature (1)..(900): DMR11:93484701
tttgcaccatataacccatgcatgacaaaatcccccaggttttctcttttccctgaggtaccaattagctgttgggcaggtttgttcaaaggtttgatgcgagaagcctggttcaggctctcaggggaaggtctaagacaaggaagatcactttcaactctcatcaccccagacctgctaaccctgtgcagccaatgcagcagccaccggccatgtgttgaacatctgcaatatggctgtggtccaaaatcagctgtgctgtggtataaaatacacacaagattttgaaggcttagtaccaaaagaaagaatgccaaatagctcattaaaagttatttatgctgattatatgttgaaataatgttttgaatatactgggttaaataaaatctattattaaaatcgatttcacctgttttcttttctgttttaatgtggctactagaaaagttttaaattccatgagtagctggcattatacttttaccggacagcttgccccatgcagtcaggggctcacactgccctcctgtaagctttccacatcataggctcagcccacaaggctgagaactccctaagccttcacagcccagccccattcattctttccagcctcaccacacccaaatgacccactattaccatcacacctgagcctgcctgtggattctcacctccatgcctttgctgatggaacatctatgctggaatgcgcttttccctcacactgtcacctgcctgtgcagtctctcatctttggacaaccatcacatgtggcctttgccagctcctccatgcagaagcaacagcttcctcctcagtgctatctcaggacttggtttatacctttactgcagcactgactggcagctactgcctagctggctgggcctctga

SEQ ID NO: 1756 - DNA, 1600 bp, Homo sapiens
  misc_feature (1)..(1600): DMR11:93653001
cagatgtgagccactatgcctggcctggaacctaccgttcttgaaggaaaggaatgcaaaatttcctagcccaaaaggtgactctttttaacatgttagtatgcatttgtgctggcaaaaagacccttagattttgagtcaaaagaccagggattgagtgctcctcttgtggttgacaagatgagtaataacaggcaagctatttagcctttctgagcgtgaattttgtcatctgtagaatgggcatgatggtggtaattctgctctcagtgaaatgtgtatggttttgtttgttatttaggtcttcctgagattggcgtgccgtgactagggttgaaggtgaaagagggacatttactgaaaaggtacacacctcttctgacctgggcctggcggcttgatgacattagattgtgaagcccttagctctttaataaagctgaggagagaatgtgcaggatgcatagatccctatcagagagcttggggaaaatcccaaaagtgaaatcccaatagtgaagtcttaggagcaaagatgggagggtagagaaaaagaaagtgggggaaaaggcaggggcagaatagaagcttgaaacttgctaagtattactggagatgagatttcaaagaagtaggataagggctttatctaacggagaaaggtcaacatgagcccaaatgtggaacccacagacatggtgtgagggagatggaacatgctggaggggcctccgggagctccagaaaaggtgattctgtaatgggtggtgcatgactgaaatggtgataagaccatatgcaacagatctgacttcagaattgggtcatcaggtgccactcaataggaacaagtcaagtaaaagagggtacaccaggcacaaagtttaatcacaccagacatatagtggaaaaggcctccctactagccaatgaattaaagcccagaattattttttaagctagatcatactacaataatcaggacatggatctgaaaaacagtctattatttgtgagtacatacattctttcatttgttcatcagatatttattgaggattacctattgttctagccccgtagagatgcggtttccttcaaggtagaaggtgtgattaaagtttagcagagaaagttcaggatacctacagatcacagctggctagaagagaaacacatatagcatagaccattgttcacacaagaactcagtaaatatttattgagtgatatgttttggctctgcatccccacccaaatctcacctcgaattgtaatccccacatgttgagggagggacctgcaattcccatgtgtcgaaggagggacgtgactggatcatgggggtggtttttcccatgctgtgctcatgatagtgagtgagttatggttttataaatgtttggaagttcctccttcgtgcttctctctctcttctgctacccatgtaagacttgcctgcttccccttccaccatgattataagtttcctgaggtctccccagccatgcagactgtgaatcaattaaacctcttttccttataaattaccccatcttgggtatttcttaagagcagtgcaaaaaaaggaataatacat

SEQ ID NO: 1757 - DNA, 1300 bp, Homo sapiens
  misc_feature (1)..(1300): DMR11:93813901
aagagggttttgccatcttggccaggctggtcttgaactcctggcctcaattgatccgcccacctcggcctcccaaagtgctaggattacaggcataagccacagtgcccagcccccccaaatataaacatttctgaatgctttattttttatttctctgcttgtcatgaatcagtaacaaatcatggaccaggaccacaccttgagtagaatggctgagaatacatgtgcagatactaccgtctgttcttttaaaccccatctgagtagagtgggataactgaagactttacgttcttcatgtcttactttccctgtttggtacgtcgctgtagtgagtagccagtaccgacctaaagaattgtagaaactaaagcaaatgtgtgggaaaatggtagcttagttgctgtggtagcaattcttatgccttgtatttatttacattttctagtttaatgttttaacctgaatttcctggagtttgaaggatgtgctatggaaacttgggagacagtttgaagaaaaccaattagcccctcaacaagtattaacaggttggcaaggagctgtgtttgaatcttggctctgctactggcttgctgtatgaacttggcaaggattctctgtgaacttgtttccttatatataaatgaagatagaggtgcctcctctactaacctcagtggtgattgagaagtttcagtaacgttggtaataaatgttaaattctaaagtactacataaatataaagcattaagcaagtgtgcttctaagagtcaagccaattagaaaaaatggttgagacaccagctgtatttattaggagaaagcatttcagaatgtcctgtattcatatttgtatgatgttttatatatggtgaagatattgagtgtttttcatcagatttctttgctggaacaccatcaaatcaaagggataacctgattatctcatgttgatcaggaattgtaattggcccttaaatgctgggattacaggtatgagccaccatgcctggcctccttaggtattgctgatgaataaaaacaggggcaactacattatttagtaagttcactttgtttagttggaaaaaaatccattcagaacatgaggtacccaagggaaaaatatttgtacagacagaactacctgggcaagcactagcctgtaacatcaaaggaatttaacctacctatgtgtgtgagatggagccgggaccccttcttaaaggcctgtgggcgccctgagcctgaaaataaaggaaaatcttgaattcctttgagggaatttccagg

SEQ ID NO: 1758 - DNA, 500 bp, Homo sapiens
  misc_feature (1)..(500): DMR11:94020901
gtgattatgtcacttcctctgccctcccgacagagaggaggccttctttagtgcctggagtgtttcctgatgctccactcaggccagctcacttttcagattttaatgtaagaggtgtggagaagaaaagaagaagaaggggtgggggaaagccatcggctcaagtagtcacactgtcatcctggctgacaaatgactgatgtcagagcatggtaccgaaacgtatagaaacaggcctgttggcttgggcaatacataaatgagccagtcacacatttctcggatggctggcaaaagttttgttgtcaaagcaacgcccccatcgagcttgctttgcttacgcaaggcctcagcctttgcctcttccccaaacccaagctacctgaggaggaggagctgagtgagggggagggaccaacagatttgtcccctgtgcaggctgcctgcctgcttgagttacatccacaaatgcctcggaagcagccagctggctgcatctt

SEQ ID NO: 1759 - DNA, 2300 bp, Homo sapiens
  misc_feature (1)..(2300): DMR11:94380201
tggagttgggaggtgggcaggaggttattggcaaggggagccctctggccatcattcttctctgtccaggccaccctgaaggaaggaactggggagggtggcctgtcctcctgaggcttgggaggtctttgacacatgctcagtaatgcctttagctcaatcctgaagttctcgttcagccagcagtatatgaaggggttatagcaggtgctgctcatggcaaaccagtggaaggcaaagtagagggcattgttggtgcggatgaccttgctggacaggaggaggacgtagcagttgagggggaaccagcagagggcaaagaggactaccaccagcatcaacatcttgatggtcttcttctttttgcgccgcagggcaaagtactgctctgtggtcacatcgccaatcatattacacagccacagtttcttggccacacgagcgtaggccacagagatgatgaggaggggcaggatgtagagcaggatgaaggtggccaagtccaggtacttccagaagaggtcagctggctcagggaagtctggcaggcagagggagcgcacaatgtcctcactgggggcaggaagtggggagggggagagaggtaacagaaaggagatattagtgtggaaaggcttcatcccaagaagcactggcctctccttccactgggctcctggtacatccatctaatatggcacttttgatgctgtagcctaattatctgattacatttctacctcccccactaggctgggaattgcatagaggtaaataatacacctgaatttctctgtgttctcttaatcttgtgcaattcctagcccacagtagagacccaatacatatttgttgaataaatgaatgaaatgctcatgtttccaggttgaaaactaactcatccttgaggaaatcctagaatttcccattctgctacttccccattttaaagggaaaactaaggcataaagaaaagaaatgatggatcttgagcatatgagtggtaaagcctgaactaacatcccttcagccactcatagaacaagtatttatttgatatggaatgcaccccagtcctcttcagcctttttaggaatatccatgtggcttggtgctctagttctatgtcctggtggtcatcactaacaaaagagagaggaaacttcctttgctttttttaggggggaaaaaaagtcctccgtgtggaaaggtagaagggcagcctggatgttggggggcctgggtgagtgattcatttcaatgtcctagaattcctggagggggcctttataagttagttgaaatctgccttccgagcctgtttctcttgaccctgcttttgtcacaggagtgagtgagtgtgtgtgtgtgtgtgtgtgcgcgcgtgctgcaggtggggtggcacatggctcctgtggcagacactccctggatccctgcagtctggagaaccaaccccccaggaagaaacagctggcacctgtgatcttctaggtgcctaggactcccctaaggccactcaaggcccttcccacgattcactacagccataattggtcgggagtttccaattttcctaggaaagacctgtaataaaagactgagagacggagaaataggaaagcccagttacctggcctcaaggtgaggcaaactctgcattttcagtctgccccagagcctcctgtggggcaggggcagcttcccctgaaatcatacccttccttagtctctccctggtctctgtccagcctctgccactctctttcccattgctcctgggagcactgcctcaattagccacttgtaggtgtacctgcctttatcacaaaacctgtctctaaggaagctcatctaacacaacaaatgaggcccagcacggtggctcatgcctgtaatcccagcactttgtgaggccgagatgggcggatcacctgaggtcaggagttccagaccagcctgaccaacatggagaaaccgtgtttctactaaaaatacaaaattagctgggcatggtggcacatgcctataatcccagctactcgggaggctgaggcaggagaacccaggaggcagaggttgcggtgagctgagattgtgccattgcactccagcatgggcaacaagagtgaaacaccatctcaaaaaaaaaaaaaaaaaaaaaaaagcaggagttacaatcctaatctctgataaaacagactttaagccaacaaatatcaaaggagacagagaagggcattacataatggtaaagggatcaatgcagcaagaaaagctaactatcctaaatatatatg

SEQ ID NO: 1760 - DNA, 700 bp, Homo sapiens
  misc_feature (1)..(700): DMR11:94732301
cacaacatctgcccttctattatcctcagagcatctcgggctgcaattgggtaggagagcttccaggaagctagctgtgaacccaggatgtttgggggtgataaggagtttctgaagggaagtccctcttccactcctgcttctgacactcctaaaaatattcccagtgatctgggccactgggttttcaaactcattttaaaggtctggagcacattttccaaaagaaatcacatgcagtccctgacatatgaaacaaaagggagacagtgtttggccactgtcgcatttctgactgttgcattacaagttgattgggctgttcggccaccagccatatcaagtatgtggggatttggtacggaagaggagttccttctcagcaaatctataaaatatttcttcttcctcttatagatgtgctcactcagctgtttgggaatcctgctgtctgtcatccatgcttcccagggaactcaacctgcttaagctcctctttaggggagaggcaggaagtctgggaaacacggcctggcagcgtgggccaggtgcgtcatagaaattcagtggtactgttcccattatggttatataaacaggaaggagcagatttcctttctgaagcctctcagggtcagggagagttttaacactggtcaaggaggaaggaggcaacttttcctgacagcagtctgtgtgc

SEQ ID NO: 1761 - DNA, 400 bp, Homo sapiens
  misc_feature (1)..(400): DMR11:95437501
aatgaagcgagaagggaagtttagagaaaaaagaataaaaagaaatgagcaaagcctccaagaaatatgggactatgtgaaaagaccaaatctacgtctgattggtgtacctgaaagtgatgtggagaatggaaccaagttggaaaacactctgcaggatattatccaggagaacttccccaatctagcaaggcaggccaacgttcagattcaggaaatacagagaacgccacaaagatactcctcgagaagagcaactccaagacacataattgtcagattcaccaaagttgaaatgaaggaaaaaatgttaagggcagccagagagaaaggtcgggttaccctcaaaggaaagcccatcagactaacagcggatctctcggcagaaaccctacaagcc

SEQ ID NO: 1762 - DNA, 1700 bp, Homo sapiens
  misc_feature (1)..(1700): DMR11:95758701
tttctaaaactaaaaagctcttgagcagtacttttgaaaaatgcacacccatctaacttttacatgtgtatatgattatattcttgctaaattcttttttttttttttttttttttttgagagacagagtcttgctctgttgcccaggctggagtgcagtggctccatctctgctcactgcaacctctgcctcccgggttcaagctattctcctgcctcagcttcccaagtagctggggttacaggtgcccgacaccacgcccagctaatttttgtatttttttagtagagacagggtttcactatattttagccaggctgtctcgagcccttgacctcaggtgatccacccacctcggcctcccaaagtgctgggattacagacgtgagcctccgcacccggcctcttgctagattcttacagcaccatcttcagtctttgtttttgtcttccgtttctctccagacactctacattacttgccgcttctcccttcctgtcgttatttttcaatcatgtttcctcttcctgatttttgctggtttgatcaaacagtttccagtctagttttccactgatattttgaatattctagcccctttttattccattaatgattgcctgtcctttcctgccctcatgatcacattcatgttttcttatttcgtttgaagaaatcataccatctatttctcccacctcaggggttctagtcttctattttcccctcatcccagtcagtttaaacctttaaaatatggttttgtgggggactgctttccccccaccacaaaacttcatggacggaataatctagtccactctcttacctctaacagatttggctgagatcgttaaaaactattgatatgtccctcctttttgaagactccatatttaacacttcctgatcttaaacaatcctaggctgatactcactgtttagatttaaagataaatatatcttacaagctttgttgttcaccacttttcctgtccactacatctctacaatgaagttttcttttctagttcccttgcttggtgtcctttctagattactttcttcatatagacaacttgggtgatatattctctgattatacccatatcaaaaattcacgttcttttatcttgtcaggagaatgatacttcgctggtatagaattctgaggtggcaggtctttttctctaagtagtttgtgggatgttagttcactgccacttctggtgttacagatgagaagtctgattccttttcctttacaggaaaccgattttttctgcctggaagcttatcagatttttatcataagctttagagttaaaaaaaaaatcgattctattagaaacattgagtccatctaatatgcagacaagcctttcatcagctttgggatgttttctactataattaatgcctccaatccttctactcctttttaatgttttcttttagaactccttttaagattattattactttgcatgtctggactcctggatctatctgacaaatatatatgtatgtatattttctcatcacatctactttgcatttgtgttatatttcttgttattatttttccaggccactattccaatttcagcaatgactattctctccatttactgaaatgttcggtggagaagtcctcctttttaggtatagaaagtctctttttccccatatgtgtgt

SEQ ID NO: 1763 - DNA, 1300 bp, Homo sapiens
  misc_feature (1)..(1300): DMR11:95923201
caagaaggaagaaaactaccactcattttgttttcttaaacctatcactggggataaaaaccactcagattccttgatactgactttcagctggaagatttagaaaagagaagcacaggagacatttttatttacatatttaagcaaaaagggaggcgagaagaaaatcagagtgtagagaaaagcatgaaagaaattaagaaggtgaagccatgaaaagagagaaaagggctgggcaagaacccaaaaaccaaagacataagaaggggtggaggaggaaagactgactttaggatggttttggaaaaagtgacagagaaagacaggaaatgtggggaaaagaatgggggcggggggaactgtcttaaaaaaggtttgagagggaatgaaagacaggagaaagtaattaactgggaccacctccatcggggagaaaacgagatcggaatatgaaaggtagaggaatcgataaagaagcagcgagttttaacctccttttcctcagcctccacgccccagggagggaggcagaagtggttcccaagtcccggggaaggaattccggcgtagccttcagaaaccagaatccgcgaattggggcaacaatccagcaggtccccggcccctctccatccccttcggacgctgggcggggccctgggcgtcctggttacctggacaaggagtccacgctgggcggccgagccgccgccggctgggagccaagactctcgcagctcgagctcttctccatcgcgcggcaggggcagcacagggaaaggctgaagcagtcttcgcggctacagggcgggagaagcggagggcggagtgctacggaccggggccgcagtcaggccagcgccggcccgggagggagaccggaagcggccatgttcccccagagtgcaccgcgcctgtaggctgctgggcagcgggaagaccccactgcgcagctcagacgccggcatcgactctccgtgctggctgtgtccggccgcgcgacatctggtcttggggaaagggaggtggcggctcccagggtgagggggtctggtgaagcgggagggatgaaggaccagacccttatggaaggaggagaaatcctaggtgtaagaggaatgagggaacactaaacatgagggtctcaggaaggcgataaggacctgaggccaggaggatgatttagacaggaatgtgggggtcaaggaaaacaagaggaccggataatgagagaaaagtgagaaagaggtatgggagagggattggggaggatctgatatacatgcaaaaagaattatat

SEQ ID NO: 1764 - DNA, 3500 bp, Homo sapiens
  misc_feature (1)..(3500): DMR11:96240601
ctgtgtcagtgttatatatttagtgggcttattattatttttgcaatgcattggcacagctcaattttaaatgcaattaccacattataatcttggcaagacccactgttccaaataattctctgatgtacaaattagtcttcctactaaatgaaaactgccagcagaaaggtactattacagtatataaaaatgaaaagtctcattgaagtacggaataactataaatttcatttcagaagcatatactatatacacacaaacttaaaaaagttataattaagatgtctaattctcctgaaatagcactcaaatatataataattccctgtagggtatgtaggcagtctggatcaaacagcatctccctatgctgtgaactagaaacactactagactaataggttgaactatttcttctgctatttttccagaatatgaagataaacagcaattgaagtgtcatcagaagattctgcaattattttttgatcaccaacaccatcggctgttgtgaggtagagtttttattatagtatatatttacaaatgtcttcaacaacttacagtattttcactagttctgccacacagtagtaccatacattgtcttctcagcatcaaagatttagtgctttagcagagaaaccaactctgaaatgaggactttgagactggcttttatttcctactaggtggtccttctgggaagatcagtgcacagcttctctttccaacatctactaaaaaatccttttgaaacaatgtgggaggctgacgactattcccctattgcagtggtccttgacagggggtgatttggccccccaggagacatttggcaatgtctggagatatttttaacttttgtaactggagggaggggtctactggcacctagtgggtagaggccagagatgctggtaaatatcttataatgcacaggacagccccatacaaaaaggacttagtccagaaagaaaatagtgccacgggtaagaaaccttgccctattggcttctctgtcaacataacaggtattgcctgtgaacatttgttgccagagtgagtgtccctgggacagtgttgattgcggaagtcaacagaggaggagaatttaagtcctccacttcctgctgggctctcataaaacgatgcaaaccaatgggcccttggtttgttttaggttagacttgtggaagttttcgaaattctagttttgctctgttcaatcattttagaaaatatctaagtatcgttctggtttgaattagtttgtttggtctatttttgaacatattttgcttcagttacaacattaatatttgggttttattcagttcagggttcagcaaattagcaaaattacagctttgggttatggttacttgttatatatctttgcatgagagcccatgcaagtgtgattggagcagaaagctaaggttcatcacaaccatggccactagagctttctatgatccaaggaagttaattcacttttttactttgtttctcaagaggattcaacaatgcaagcaccaaaccaagtggatgcccctctttctgttgcttggtttaaaattaaaacccttgatgaataaagtgatttatttcatattatatttatgaaaaggtagagcactctcaatgttttgagtattcctgaaactgtttacttaattatacaatgagaaacaagacaggaaaaaacttcataaaaatcactagggattttaaaaaaatgcccatgtactcttattttgcaatggctctggttgtgaaatcatcagactgaaaaatactggaggagtggtgagggtggattttagtgacaagatttccttaaggctgtaaataaaccagattcagtaagagaaacagagatggcagttttcatcataaaagggggaaaacattttccagttgaattataggtacagcacaaaacagttgttccgtttttaaaaactttagtttctgcaggctgaaacagagcatttcatttggctcagttcatgaaagccatctgcacctgctcacgaaacagcttaaagagaaaaaaaaagtgtgcaccaaggattttaacttacacagacaataagggatagactctggcactcaagcactgaaaaagcaggagcatgataaaggggaaaggatcataattttatgaagtgccaataaataataaccccaaatcagcttacagcatcacttaggtttacctgtggaagctacacttgcctgttctggttgcatgtttaaaagttaagcaattaaacctcaattatataggtttttcttttatgtagcctagggttgaatgcattactggcaggaaactttagctcatgaattcaatcaaaaatcctttcatttgtcagaactgcttcctgctgcctcctttaaacatctgcttctccagttcagggacacacacacacacacatacacatacacacacaccccctctttgttaaaataataagcaatctaccaacttcccttgcaaaagttacattctctcttacacacacacacacttgttcccagtagagtttatttaatgtgtcttttatagcttccttgtccttctctcttcctttccgcttttaaattctggaaaacctcaagctgacaaaagaagacattttaaaaatgcgaggataaggcccggccggcctccagaccaatgagaaggaagcagagcaaggaggcgggggaggcggggttggctgtcgggaattgcctgcactccttaaacggcaggcacttcctgctagaggaggccagctctgaacagacagaaatcgggtggaaagctagcaggaggcgttgctcaagttcaaaacaatctgtgcgtgtccaggcacgcgcggagccagaccccagccgcgcggctcagacctcgcgagagccatcacctgagaaatccacagccttttctcatcaggcttagactgtttttcccatacctccaagaaggaagacccacatgttaaaactatgagaaaagctgaaagtgccttctgaacagtcatccttctttttcttttttttttttttttgagacggagtctcgctttgtcgcccaggctggagtgcagtggcgcgatgttgtctcactgcaagctccgcctcccaggttcatgccattctcctgcctcagccttccgagtagctgggactacaggcgcacgccaccacgcctggctaattttttgtatttttagtagagaaagggtttcaccgtgttagtcaggatggtttgtcgtgatccgcccatcttggcctcccaaagtgctgggattactggcgtgagccaccgcgcccggcccagtcatccttctttaaccacgacataggtactcaggtccgctggccttcctctgcactgatggacttttctttgtgaaactgattcagaggcggacctcaagtggcttattccttcgcctaaaaatcgtgctgctttttcctctagtgaagtctggagt

SEQ ID NO: 1765 - DNA, 2400 bp, Homo sapiens
  misc_feature (1)..(2400): DMR11:97586801
gatttttgagctcaaatatataggaaattcagtgtcaccatgtctcaaattaaccttcagtttcctccattaagtatccaaatcttcctattttagcaaatgacacaactattctcagttatttaagccctagtaaagataccacatcagaaagtcatcatgttaaaatgagggaaaaccaaaaacacagaaaatattttttttaaaggcagagcaacaaaaaaagtattagccctaaaaatgtacaagattgtcttagaattgactgtttacctaaaacagaagtcagaaatcaaaggactgatgaaacaaaatttgaaataaatgggaaaaaggtagattaaaaacaatacgtttttacattgaatttgaataataaattttttaattacaagttgactgtaaaatcagattttaataagaaaaaaaatatatgccatatgcaagagatatcttaaaaaaaaggacacaaatatttgatagtagaattgtggagaaagacattctagacaaagaccatataaaaggaggctgatatatctatactaaaatggaaaagcataaactctggggcaataaataatatagaagaaaatgaaaaaacataaaagaaaaggtcaatttaaaactaagacaaagcaatcataaaaatgcatgcatcctataaaatagttttaacacatataaggtaaaaactgaaaaaaaaggaaaaatgttaatgaaaaatacagttgaaattaaaaaaaaactctcagtaacaagattagaaaaatattatttagaaagtagaaaatttgaatgacatttaaaaaacgatatacagaaaatagtacataataactgtagggcatacattcttttcatgtgactatgaaaaaaataccaatatttggctcaattaatatcaaagttttaaaaccacactaaatatgcaatctgactacagtagaattaaacaagaaatgaataacagaaatacagctagaaaattctaggaagtttagaaattaagtaatatgcctttaactgatggatcaaaaaaataagttatagagagttattacatgttttgaaaacacataaagaaaatgtatttcaatgctttgtgacatatttacagaaataaaatgaaggaattttatgcatttcacaatgatgcagaaagaataatgatttatgaaactaaaaaattagaaccaataaaccataaaataaaatagagaaaattaaaagcccaacatttattcatgtattttatatcaaatattaatacaattgttgaacccctagaaagactaatcaaatttgggatccacaaatatcagtataaaaaatataaaattggctgggcgcggtggctcacgcctgtaatcccagcactttgggaggctgaggcggatggatcacgaggtcaggagattgagaccatcctggctaacacgatgaaaccctgtctctactaaaaatacaaaaaaaattagccgggcgtggtggtaggcacctgtagtcccagctacttgggaggctgaggcaggagaatggcgtgaacctgggaggtggagcttgcagtgagccaagattgcgccattgatctccagcctgggcgacagagcaagactccatctcaaaaaaaaaacaaaaatctatctatctatcatctatctatctatctatctatctatctatctatctatctatatataaatcagaattaggagaaataaggcacttaggagacagggctaatgtgcagctcccattttgatggatagaacagtgtgtggagactcacatgaatgcttgctccaagaaccaccacaagaacataaccaggaaaagtgaaagaattcacggattctttaaaagaagtggcatgtcactgcaaattctgtgagatagatgaaaaactgtgagttcccaaaacataagaggaggaaaacctacctccaaaaacacatccccactagagaatttgaaaatccagatcataagagaaggatttaaccttacctagaggtaaaatggatttagggagctgcacaaaatataaaagtagaaacagctgtgggaagagccgtgtaagcactcacagtctctagctaaagcccagggaagccatccctgactatatctcacagtggcccttggggaaggcagccagcaggattagggagggctcgcagggtgaaggaagcttccaactgaaatttgtaacaatttcaactgggtatatgttttcttaagcagaattggaggggcaaatgagaactgctgcagttaacaagcatgggagccactaccgacagcatggacagagggtgggggcaaggcctgaaagacatgcttgttttctcagtggagaagctcatggcctggcacaaggtctgagtagggcactgc

SEQ ID NO: 1766 - DNA, 200 bp, Homo sapiens
  misc_feature (1)..(200): DMR11:97891401
atgtcaagaagagtatatattattcagcttatttgcatgggtttctttactcttgaaaaataaaagttgtcatttaatttataatttatggacaaagatatccatgtcagttgttccaacttcttcatcttactcttcactgttttctcccactgttccactgaaacttcttgtaataatactaccaattgataccaata

SEQ ID NO: 1767 - DNA, 200 bp, Homo sapiens
  misc_feature (1)..(200): DMR11:98212801
attttaaaaagtaagggatagtaaagagatagctcaaatttggctgaacgtgcaatattttgttacagcctacaaagtcaagaaaataaatttagaataatgtgtaatatcgtataagaaatatgtacttatttcttatgtactcatcaaaagagatgagtcttatccatttggatgagactatgtattcatccaaatat

SEQ ID NO: 1768 - DNA, 700 bp, Homo sapiens
  misc_feature (1)..(700): DMR11:99012801
ttctctactaaaacacaaaaagccaggcttggtttgcaggcgcctgtagtcccagttactagggatgcagaggcaggagaatcgcttgaacccgggaggtggatattgcagtgagccgagatcccgtcactgcgctccagcctgggcagcaacaaagtgaggctcccactcagagagagagagaaaaaaaaaaggctttgtcttcctgttgagtaggctgaagaggaggaaggggaggaggaggggtgtctcaggggtggcaaaggtggaagaaaacctgtgtataaatagaaccgtggagttcaaacccgtgttggtcaaggatcaactgtactctaagagagtagaagttggaactctcattcaggccatactgaactagaaataccattcgacccagccatcccattactgggtatatacccaaaggattataaatcatgctgctataaagacacatgcacacgtatgtttattgcggcactattcacaatatcaaagacttagaaccaacccaaatgtccaacgatgatagactggtttaagaaaatgtggcacatatacaccatggaatactatgcagccataaaaaatgatgagttcatgtcctttgtagggacatggatgaagccggaaaccatcattctcagcaaactatcgcaaagacaaaaaaacaaacaccgcatgttctcactcatag

SEQ ID NO: 1769 - DNA, 100 bp, Homo sapiens
  misc_feature (1)..(100): DMR11:100435201
ggcagccgagataaaggcgaacagtgtaagagaggtgttgatgagaaaggcactgaataaaaccgtattttacctgcctacagccccctgagtgttcttt

SEQ ID NO: 1770 - DNA, 1300 bp, Homo sapiens
  misc_feature (1)..(1300): DMR11:100874201
taccttataacaacctgctattgtgggaagtaatctattcccatgacagtgagagctcacctagtcccaatagacagcactaatctattcttgagatacccaaacacctcccactaggccctgattcccaggactgctacactggtaattaaacctcagcatgagttttggtggtaacgaactacatccagaccatagcagtgataaattttgtttactgtcaatgtctgttacctgccagacattcaaggcttggaaactacaacacaataccagcaggagagcaggtgtggacacctcgggcctgtgtcagatcgcaaaggtctttgactgtaagctcccactgaataccatcaagtgaagggcagacttctggagcccccgtattttccatggagttcacagatgagcctctttgttggtcctcctgtttccttggggcaccaccttttgcctttttcattctctgccttgattctgcagcttctggaattgtaatgtgtttatttttgtgccagattagttctccagtctaccgtatctttcctttttaaaatgtattcctttccttccctttgggtaggataggcttattgccccatctgtgaattccactgttattatccagtccccaaaagaagtgtggcacaggagaaagtgaatccagtgtcttctgtgctgtctttaacagttcttacttaccagctcaaagcacgtatctcaggactcagatgactctgttctcttttacctcaggatgagttttctaccctgcagttaagggtgatttttgtttccatcctgatttgcaaatgttaatttctatgttttaaggcaagggttggcaaactgctgactaaatctaatccactgtctctctctctctctctctctctctctctctctctgtgtgtgtgtgtgtgtgtgtgtgtgtgtgtgtgtgtgtgtgtgtggctcatgaactatgaatggttgttacatttttattttttattttttgttacactttgattttttatttattttattttttatttattttttgcttttaaagttttcagactttatttcacagtgatcaacacaggaacgtactggagttagtaacccggtgcccagcctcccaccatccgctttatcaggtcctgttcctaggaggattgggctagggctggggctaggggtggggatggggaaaggacgttgcaatttaaggcatttctggcttcggagccatccctgccactcctgcacctgccccttgaccttggtcagacattggctggaccctggtcattct

SEQ ID NO: 1771 - DNA, 900 bp, Homo sapiens
  misc_feature (1)..(900): DMR11:101912601
tggcaacattgtttgaaatttcttttcttcttggttgttaccgtaaaacaatatttgaatgaagaataattatataagtctaaactgaaataaaatcctaagcccccactgactgaatagaccccctcttggccaaggggaccctgggaaaaccttaaaactgagttcccagccataatgggatggaaggtcagctatgcctcattatatcctcttcctgttgtagtttggacacaattgaccaggattaacgttaaagtagagatcattagactgacggaacagacacttggtggcagtaagatatcaaattacaaataggacctaaggccatgccaggcaagggttaagtcatgcactcctacacttaaagaataaactatgtttaacttccacaagttttctgtttttctctagcagctaaacaaacactggccttgagataagcaatagtaaaacaatcgtagctcaccaccagacactgactaactgaccctctgttccataagccataactacagctttgattggacaacagactgatttcaataactttctcctgatgagaacatcaccaaccatgaggtggttctggccagtttaagaggactgctcacttgagtgcctttgtgtcctaaaaaaaatttagacataatagggcctaattgtaatgcaattaaatgttaagtctccagcccaaaatgaacatgggtcatatgttactgtttgttcaatatacatgcatcagaactaccttcataaatattcatagctcctcctatatcctataaattatgtatgtttagccaacttttcagcataaatctcctacctcaacatccctccttcaaagtacctgcctctttaggcttcagttggaggcacactcccagcttgtgg

SEQ ID NO: 1772 - DNA, 500 bp, Homo sapiens
  misc_feature (1)..(500): DMR11:103967301
gtctccaccccttgttaccatcattctggataatgtcagtgtccttggtttgcagccctttgaatctttgaactcaaataacccttcttatgtaccccaacttctgcaactccctcttaatctgaagtcttagatgcaaaatgcattctgtgactctgctctccatatcgttgtgtatctctcttgctaatatctctctcttcgatctcactgagccctccagacttcacccctctatattcccacaagttatcagccttctattgatcttagaggcccccaaattcatcactttggcttctcttattaatactcccttgccacctggctgttcagtggcattcacccttcaaaaccccttctctagaacaatcaagtcatcaacatctggactcctccatctggatttctgcaggagaaaaattacaaacccaataaactgtgttgcctttcttccacccatatctttattctcttcttgtttgtcccttgcaatctct

SEQ ID NO: 1773 - DNA, 1600 bp, Homo sapiens
  misc_feature (1)..(1600): DMR11:104217601
tctaattatttcaatctcttagttaaatttatttgatagatttctgaattacttctctgtcttatcttgaatttcattgtgtttcctcaaaacagctattttaattctccatctgaaaggtcacatatctctgtttctccaggattggtcgctgaggccttgttgagatagttttatcagtcatgttttcccggatggtcttgttgcttgtggatattcatcagcttctgagctttgaggaattaggtatttattatactgttcttagtatgggctttttgtacccatatttctttgaaggctctttaggtatttgaaggtatttggatgttgtgatctaatccatatctgcattaggggaaacctcaaccttagtaagtccgtggttcatgaagactcatagaggagtcttggtggttttggctaagatctaggagaattcttgaattaccagacagaaactcttgttctgttccctcactttctcccaaacgaagtccctctctctgttctgagccacgtggagtagggattgggtgacacaaacctccctgtggccaccaccactgggacagtgctgggtcattcctgaacccagcacagcactatttctcacccaagacctgctgtgaccactacctggttaccatgtatgttcactgatggccctagggctctacaataagcaggtggtgaagcgagccaggcttatgttcttcccttcagggtggtgatttcccccaggctctgggcaaagatgtcatctgggggagggactggaatcaaaaacttaagaaacctacctagtattctatactactctggctaagctaacactcaaaccacaatacaaagtccttcctgctcttctgtccccttcccacaagcagagaaaccatcccctgggccaacacccccacaggccattggggagtactgtcaggctatcactgaagttcacataggcatgagggttcttcagttagattgtagtgaagaatgctgggcctgggacacattcttcagggtagtgggcccccctttggcccaaggcaggtccagaaatgccttccaagtgttgaggcctgaaatccaggtccccaagaggctacttggttctctacaccactgtgactgaactggtacctaaagtgcaagacaaagtcccctttacttttccctgtgcttttctaaagcagaaggaatctcgccccatagccacatctggaactgtgctgggtctcacctgaagccagtatgtctcagagtctcactgaaggcccacaaggtattattgggatatcaatgctgattattcagagcccatgggctcttcagtcagcaggtgatgaattctgccaggattggatctttcccttcaaggcaaggagtttccttctcaccccatgtgtgtctagaaatgttgtctgggaactggggcctggaatgggggcctcgtgactctgccctgtgttctatgctattgtggctgagcttgtatccaagatgaaagacaaagtcctctttactgttctctctcctctcctcaagcagaagaaggagtcgctttcattgctgtgaactgtactaactggggtgt

SEQ ID NO: 1774 - DNA, 700 bp, Homo sapiens
  misc_feature (1)..(700): DMR11:104945201
caaggctgattcctcaattgaaggagaatttaatcccagtatcttatctttcttttttttttttttttttaagatggagtcttgcactgttgcctaggctggagtgcaatggtgcaacctcggctcactgcaacctccgcctccagagttcaagcaattctcctgcctcagcctcccaagtagctgaggttacaggtgcccaccaccacgcctagctaattggttttttgtatttttagtagagacgtggtttcactatgttgtccaggctggtctcaaactcctgacctcatgatcctcctgcctctgcctcccaaagtgctgggattacaggcgtgagccaccgtgcccagccccagtatcttatctttaagacccaaacactgaacaactttcatatctccaccaccaagctgatcttgtagtttttttgcatcaactaattggtaagtctacttatcctaaatccagaatttttagttcctttttctatgaacatccttgaaagtacaatgtctaactcccacttatccaagaagatttaaaagatttaacttcccagatctctattcacaggagctctgtctcaatttatgctgcatttcctcctccttctcctcctccttcttcttatttcactacttttctttctttttctttttttaagacagggtcttactctgtcatccaggctagaggg

SEQ ID NO: 1775 - DNA, 300 bp, Homo sapiens
  misc_feature (1)..(300): DMR11:105000501
aaagagcaatgtctaacttcagtcagagaagcatcacaattaataggacctcctagatttaccatgagcgaaacaagaaacatatgtaacatccgggtcgtggtgcttcacatagcgcttactcagtcatgacagcagttttatgtttttttgttttgttttttttttcctttgtaatggggctgtgggttcctactttttctccctgctgacacaccatacactgtcttcttaatatattgtatatttttatatgttacttatattacttttttttatctcaatcttttctctcctttc

SEQ ID NO: 1776 - DNA, 900 bp, Homo sapiens
  misc_feature (1)..(900): DMR11:105219101
tattttaatgccttatatctacacttttttcccataatctttgaataaaaggcctcacatttttatctttcattgagctcataatttatgtaaacaaccctgataagggaatatattgactacaatgttcatagtataagattatgcattagtctgttcttgcattgctataaagaaacacctgagacggggtaatttataaagaaaagagatttaattgactcatggttccacagcctgtacagagtgtatgatgctggcgtctgctcgacttctggggaggcctcaggaaacttacaatcacggcagaaggcaaagggggagccagcacgtcacatggccagagcaggggcaagaaagagggagggggtggtgctacacacttttaaaccaccagattgcgctagaacgcactcactattgcgaggaaaataccaagaggatggcactaaaccatttgtgataaaccgtccctatgatcctatcgcctcccaccaggccccacttccaacattggggattgcaattcagcatgagatttagatggggacacaggtccaaaccatgtcaggttataaagagaagtggggggccaggcatggtggctctcgcctgtaatcttagcacttgaggtcaagagtttgagtcagcctggccagcatggtgaaactccgtctccactataaatacagacattagctggacgtggtggtgagtgcctataattccagctactgaggaggctgaggtaggagaattctttgaacccatgaggcagaggttgcggcgagccgtgggccaatccactccagcctgggcgacagggtgagactctgtctcacaaaaaaacaaaaaacaaaaataaaaaacacaacaacaaaaagagagagagagagagaa

SEQ ID NO: 1777 - DNA, 1300 bp, Homo sapiens
  misc_feature (1)..(1300): DMR11:106611401
ttagaaagcaaatatgccatcagagagagagagagagagagagagagagagagagagagagcaagccagccccctcagaagaccaggagacagtatcagcaaatgagtagtccaagccagaagcaaacttttaacagagatgttagtgatcaggggctggaagaatctgaaaagaagccagacttcttatcctactcttggttcaattcctaggactcacaaagacccacttgtacatgttgttacaccaaagatctcttcttgagagggacttgacaaagacactgaaaagccacaccagttctcaagaccaaagggcataggggtaaaaattaattggaagttcatctgaaacaaagggagatagtaggccatgcatagacaacagcattaaaatgtgtactacaaaagccatttttatagatttcaatgataagcctactaccagaaaggcagctgagcagggccacaataatgcttctgctgcagttcaagctatgacttgtccaactggatagtaagaaagcaaagcctgttggagagagaggatgcttagggtaaccatataatttattgagactgcaaggaattgctaacaatgggacaccagataatagacataatttgtaactgtcttgggcaaattagagcaaacccttaccctgggatgttgtatcactgttatggactgaattgcatccccccaaaactcacatattgaagccctaccacttagtgtgaatatatttggagacagagctgtttaaaaatggtaagtaagattaaacgagttcataaaggtagaaattcttaagggtgggattgtaatccaatagaactggcgtgcttataaggaaaggaagagagaccagagatcctcctctccatatgtgacaaagaacaggctttatggtgacacagtgaaaaggcagctgtctacaagttgggaggagaggcctcaccagaaaccaagtcaggacagcatcttgatctttgactttcagcttccagaaatgtgagaaaatacatttctgttgttcagagcacccattccgtacattctgttatggcagaccaagactaagctgactaagacaatcacaaagtcaaaatcttcatttctttgactagagctacaaactgagtagaacaaatgtgaatcaggctaattttgctggctgctgcctgacatgtcctaatttcagaggaataccactgaagtggctctagaattggaatgaaaacatcttgaagatctgtttctaaataaggcattctgtttgtgtttaggtggggcttc

SEQ ID NO: 1778 - DNA, 200 bp, Homo sapiens
  misc_feature (1)..(200): DMR11:107177601
gataatttgtacttgtgactagttctccccggctggcagcatagtggggctgccaggccccagctttgttccctggtccccttgaagcctgcaaacgtcgtcatcgaagggaaggatggggggcagctgcggtggagagctgtaaaatgacaaaagatacactagtcaaaaaaatgaaattataccgtacatatcaactt

SEQ ID NO: 1779 - DNA, 200 bp, Homo sapiens
  misc_feature (1)..(200): DMR11:108248801
tcacttgaacctgggaggtagaggttgtggtgatacgagatcgtgctgttccactccaacctgggcaacaacagcgaaactctggctcaaaaaaaaaaaaaagaaaaaagtggatttatttttattttacaggtttttaatgaagataccagatccttggagatttctcaatcttacactactacacaaagagaatctag

SEQ ID NO: 1780 - DNA, 400 bp, Homo sapiens
  misc_feature (1)..(400): DMR11:109294401
accattcatgatagcaaagatatggaatcaagctaagtgtccattagcagacgaatagataaggaaaatgtggtacatatacacaatggaatactattcagccatataaagactaaaataatgtaatttgcagcatgtagatggaattggaagtcattacatttggtgatataagccagacatggaaagacaaatactgcattttctcactcacgtgggagctaaaaaaagttaatctcatggaggcagagagtagactggtagttaccagtggctgggaaaggtgtgggtatgtgtgtgagagggaatgaaggaaggttgattaatatgtataagcatacagttagatagggggaataagttctaatgttctataacagagtaggaagactatagttaa

SEQ ID NO: 1781 - DNA, 1400 bp, Homo sapiens
  misc_feature (1)..(1400): DMR11:110835201
tggactgctttttgtagacagcccaagacttcactccttgccgatacagtgacaagatatgctctgccctcttactcactcttatctagaaggttcctgaaaacggaagaccacgtgggagttctgtaaactatgtatgtttcttcactatgcacaacaggaaacaagctgagtgcacatgtgataagatggtaatcaaaaaatatcaaacaaatatctaagtagagggaggttttgatatcttagaaccagaagtcatctcgtagataatctaacccaaaccattactttactgatgacaaaatggagacccaaagaaatgcagaggaaagaaaacatactttggcatccaaaaaagaaaagtttgaatcctgactctgcaactaattggctgttcaatcttgtcaatgtccctaacctctttgaacctcaatttatttttctatgaaacttcgaagagggttaccactttactccactgccaccaccatcactctttctaatagaacacaccatgttcctctgactggtttctgaatagcctcttgacttcttaccacttgcaatctgttcttagccaaagtggactttaaaaaaacataaatcagatcatgtcatacttaaagttcttcaaagacttttcgttggctccagaatcctgcaaagcctcacatgcactgatattgtttagctgtgtccccactcaaatctcatcttgaattgtaatccccatcatccccatgcattatgggagggacctagtaggaggtaattgaatcatgggggcagtttcccccatgctgttcttgtgatagtgagtgagttctcacaagatatgatgtttttataagcttctggcatttcccctgctggcactcatcctctctcctgctaccctgtgaagaggtgacttctgccatgattgtaagtttcctgaggtctcccaagccatgtggaactatgagtcaattaaacctcttttctttataagttagccagtctcgggtgtttattcatagcagcatgagaatggactaatacatgcactgacccagccttcctgcctcccttcccttcttggctttcctcagctctcctctggccacacaggcctcctttctttcctggaacatacagagctctttctggcttgaaagcctttctgttagctgttccactgtctgggattctttctgtcttgttcttccatggatagctccatctcatgcttcagggctcaagtaaacccccattgatgcctctgaccattccatctgaaaagacccatctattgaactttgcgtatcatataactttgtatatttctttcacagcacttttcatcgtctataattatcttttttatattaatagataaaatatgtttaaccttaattatc

SEQ ID NO: 1782 - DNA, 200 bp, Homo sapiens
  misc_feature (1)..(200): DMR11:111622001
attttataaaacataatacagtgctatttttctttaaacaattatcttttaaagagatttccacattttttgaaaattatctatcagtgtagctacctttttctttaaacaattatcttttcaagagatttccatattttttgaaaattgcatctatttatcaatgcagctaccatttctgcattcatatgtatgtatat

SEQ ID NO: 1783 - DNA, 200 bp, Homo sapiens
  misc_feature (1)..(200): DMR11:111888401
caaacttttccataatggctgtaccattttatattcctaccagcaatacacaagggtttcagtttctccatattctcatcaacgcttattttgtttttgtttatgtcttataatagccatattagtggatataaagtggtattccatggtggttttgattcatattttccctaatggctaatgattaaacacctcttttt

SEQ ID NO: 1784 - DNA, 300 bp, Homo sapiens
  misc_feature (1)..(300): DMR11:112729201
cagagatggaagggacctactcaggggatcatctttctggagatgcagaaaaggagaaagggagaagggagaaagtgaagttggggagaggagaagaaaggaggggaaagggaggcagggaggagaggagggacattcatgtggactgggtccctgcagggtgccttagcagatcccattcactacagccaaacagaaacgggttcaactcctacttaagccaactactgagtaatgtcagaaaaatttcaaagctttagttacacatcttaaaatggagattgcccaggaatggtggct

SEQ ID NO: 1785 - DNA, 400 bp, Homo sapiens
  misc_feature (1)..(400): DMR11:113687701
ggggagtggagagggagagtggagagggtcctgactcccataggcttcatctgggctggcccagccttgaccccatctgcccaggagcctctcagccatggagtcctctagggaggcacttagcccacctagagcacaggaaaaaggtgggacggggggcacctcccagcaccctcccaaaagactcacacaggggcagggaggggagagggcagaagggcaggcttcctgctgcttctagcagcctcttcatctccagctcctacctctctcctccccctcatccctcagcaaccacagcatgcccaaccaagtcccagcctctcttctgtcattgagtctctagtgagaaagaggactctgaaatcagggcccaagaggagagacctgttggctgggt

SEQ ID NO: 1786 - DNA, 600 bp, Homo sapiens
  misc_feature (1)..(600): DMR11:114469001
attcacaatgaaaatagttataaaactttggatactaaatagtataaccctgaaatatataaaacaaaatctgttacaatgtaaggagtaatttaaatacagtgctagctttttttttttttttttttttttgagctggagtcttgctctgtcacccaggctggagtgctgtggtgcgatgactcactgcaagctccgcctcctgggttcatgtcattctcctgcctcagcctcccgagtagctgggactacaggcgcctgccaccatgcccagctaattttttgtgtatttttagtagagacggggtttcaccgtgttagccaggatggtctcgatctcttgaccttgcgatccgcctgcctcagcctcccaaagtgctaggattacaggtgtgagccaccgcgccttgccacagtgctagctttttaagaatagctttattgaagtataatcaacatacaataaactgcacaaatttgaagtataaaatttcatactttttttttgagacggagtctcgcactctcgcctgggctagagtgcagtggtgcaatctcggatcactgcaacctccgcctcccgggttcaagcaattctct

SEQ ID NO: 1787 - DNA, 900 bp, Homo sapiens
  misc_feature (1)..(900): DMR11:115581301
cagcccctacttgcatacagatgcaacctcccctgctcttgcttgcctggactccccctgccctcctaccagttccctggcctgtagtttatcttcctgcctctgttattttttccccccactctgcttccacccccaagcggaactcagcccagacacagcagctgatagttagcaaagtgcctgctttttaacctaattatctcaatgggcttgcctggggcacagggggtcagggaatggatgggaggtcacaccacaagcctccaggtcccctgggagtaggcggctcctctggcagcctcccagcactctggctggccacaccctacacaagatttcaaatctatgctggccaggaagacaaaataaaaactcagaggagtaggttcacagcaaggtttctcaacctactctaatttgggccagacaatgctttgttctggagtgttctgagcagtgtaggatgtttagcaagatggcaaccaaaactgtgataaacagtgacgcgaacacacccgctcaactttttcattattttagtgttaatctatgggtctattctctaaatgctgccattttgctcttgatgtgctgtgtgtgtgtgtacatgtgtgcacatgtgcgccgtagcaaatgactggaggagctgtccccagtgaaacgcagattggctccgatgtgattgatacactgaacaacgtgagcataaagcagacttcacgtttgcttatgcacgattctggcctccagaaacgctaggtgaacacagaaaactgaaccagctgcagtgaatataccaaacacacgcacacacatcaaatatcttcagaaagagggagcgtgagcaagccagcacactttccttgtcaaactcctgcacttttccttttttgccca

SEQ ID NO: 1788 - DNA, 1600 bp, Homo sapiens
  misc_feature (1)..(1600): DMR11:116719701
ttttacaaattaagaaactaaggaccagagagaaaaagtgacttacccaagactaatcagacagcgagtgacagagcagcacccagtcccagttcacagcctccccatcgggcctgctcgcaatactcaaactgtctctcttctttgatttcttgaacacaatccaccaagaaaggtccacccttctgaagatctgattctcatccttcttccagcagctggtcagaagccaagctcctgccaactcggctcccataaaaagagcaggatcccgagagcctagtgaccagggactagagacacagaggccctttctgatcactggtctggaagaatctggctgccaactggtgaggtaaaggtagacagcgacagccagagtgcaagtgcccatggaagagctggcaccgacggccctgtgtgagcagcacagcactaggaatcacacagatgccagttcaaagccccagcacttgcccttccacaagcacctgcctctgcaacgtcttcccttctttcctccacctccatgcccctcactcccaacttctccaagcccagtctccttattgatagcatggagtcatgacggctctcacacacattcctctgaaggttgaattcgaggaggtgatgggtcctttcacacccaagtctggtgattttctcacagcagcctccctgccccacctcctgaccccgcccaccaccctaagggatggaagttcttcgtgcctggttctgttcctacctctgcccccagtgccacatcagagccctctcccctttggctctgtgttctgaggcagcagcctgcttaccttcgcagtcccaggatcagtcctccgtctccagacaaaacctctcccacagagggttctgtcttcctaggaggccccctcagatttcccacatagaccctgggcgggccatctggctcccactgtccctgttgccctctcttcctgtctggtttttctaaagcccacatgtctttgcccggaccgggcaggaatcctctacctcaggcccaggagcccaaagcaggcctcattgcattggggtttggaggcgcacctgcacattttccaggaaagggatctgtagctagagggaacctccctagaaagcttgagcttcactgcctggagaccccctcccaccttccactctgccatgaaagacagctcaggtttcatccactgtaactcagtgtgaattttgccctttcaggtgccctgttaacatgattcctcccacctggcctgacacctatgtggatttcaagggcataaggctctgccacttaaatcgcctcaacacccctgtcccttcccccgactgtggtcctcagcacaggacatggccttactgctccaccacgtgcttagtattcaagccatgcgctgccaccatgcttcccaccatgtctcctccaaagcagagccttccgcggtgtgccctgcaaggtcctagtgggtatccttgatgagaactagattctgtacacagtggatgctgcatcaatactgtggccacttagaggttagagggtgtattagtcagggttctctagagggacagacctaatggaatagat

SEQ ID NO: 1789 - DNA, 3500 bp, Homo sapiens
  misc_feature (1)..(3500): DMR11:118775501
ggatccccaggacaaaacaataggaaagaaaaaggcaataaaaaaaaagaaaaaggcaatacaagtggtgaccttgagtatctaaaacaatatactcatacaataccttgctatttcaaaatactttggttgtacactacatttgatcttaacaataaaaatcctgtgagggagagtacttatttctactttacagaaaaagctggatgtcagattggttaagtggctgaagagttaattgcctatatgctataacaacactcagagtacaagtaacaaagttaattttaaattttaatacaaggtaagaaataggagtcagcaaatatccactaagaatgaggactgggctaagtgcagtggttcacatctataattctagcacattgggaagccaaggcaggaggactgcttgagcccaggaggtcaagaccagcctggtcaacatggcaaaaccttgactctaccaaaaacaaaaacaaaaacaaaaacaaaaaacaaccaggtgtgctggtactacactatcatccttactcaggaggctggggcaggagtatcacgtgagcccaggagtttgaggctgcagtgagctaagattctgacactgcatccagcccaggcaacttagcaagactcagtctctttaaaacaaatttaaaacaattacgtctcctaaattaactaatttccttttttgaaactattatataaaataacccataacatttttgagcatttatcacgtactaggcattgtactaagcatgtgaattatctcacttaatctttacaacaaccctatggtattatactattacctcaattatataggtcaggagtctaagacttatagatcccaaataaccaatttatgaaggagtagagctgggatttaatctgggcagttccctacaccaagttcacctgcagacatgagttacctaagtttcatcaaagcacgctaaataagcacaggcactatgctaagtactagagataaaagttgaatgatgcagttcctactgtaaaggaactctcataagacctcagtgggccaggtgtgttggctcacgtctgtaatcccaacactttgggagactgaagcaggcagatcacaaggtcaggagatcgagaccatcctggctaacatggtgaaaccccatctctactaaaacacaaaaaattagccgggtgctgtggtgcacgcctgtagtccccgctattcgggaggctgaggcaggggaatcgcgtgaacccaggagtcggagattgcagtgagtggacatcgcgccactgcactccagcctggcaacagagtaaggctctgtctcaaaaaaaaaaaaaagaaagaaaaaaaaagacttcagtgtagataaaatggcttaacatgaactacatcatagtagattcctaggtatttctaatacctacacccaaattacccctctgatgatgcatatccttgttttgatactttatccagccaaaagcacactctcaactctgggcaatcattacccagcgttctctgcttggaacacagctcaattcttccaggttgtcccatcttcctctaatgactacatacatacgcaattccaactagaaaggtactcatcatattacagtgaattacctgtacaattagctgtcctttccagactgtaagacagcaaccatatatctgtcttattcattatagaattcccaaggtcaaacactttctaggtcactccacacatgttggctcaatgaaaaagtactcagtgatgtcacagggtttgtccttagcacagcctgaattcaatcatttcatcaatttaagtatgtctgttgtcatcatttatcaaactggcctatgtataatgcatgtttatatgtacgtgtatatttatgtgtatgtgtgtgtggatatgtatatacatgcatttatttccttgctctttccactgaaaggaccaagtagcaaacagggtacctaatgcctgggtcttggtccctaatactactccacactaaaaagaatcaaggatccttggatgccaatgctgggccaggataggtataagataagcctgcatcatgatatgtcaaaaagcaagaaaggggccgggtacgatggctcacatctataatcccagcactttgggaagccaaagtgggcgatcatttgaggtcaggagttcaagaccagcctggtctacagggtgaaaccctgtctctactaaaaatgcaaaaattagttaggtgtggtagcacacatctgtaattccagctactggggaggctgagacacaagaactgcttgaacccaggatgggaaggctgcggtgagccaagatcatgccactgcactccagcctctctgacagagctagactccatctcaaaaaagagaaaaaaaaaaaaaaaaaccaagaaagtactcaagaaaaatgaaggggacacatcataaaaacataggaaccaggctgaaagagcttacattggccagatctaggctatttttagaataataataaaaaaaaaattgaaaaaaattgaaaaaaatggtgagtataagtccatactgataacagatatatatggatgaggggaagggaagtttcttctttataggggcaaatacagagggagtgctagaattggaaagtcatcataacccatcagagcagagatgagatcaagcaagaatcaccaatgggtgctaaaactaggggggaaattttgttatttttttaaaaaagtatcatgccatgaattgcaaatcacaagatacgaagttaaatcccacctctaccactcatgagctacaagtatctttggctaagtcaagtttctcaagctcagcactactgacattttgggccacaaaattctttgttgtaaggggctgtcctttagcatccccccattgatgataataaaaaatgtttctacaaattgctaaatgtcccctgggggacaaaaatcctccctggttgaaaacaatacgctaagagaactgctctgaacttttgttttctcatccacaaaacggggataatacctagcctgaacatctatcttactgggttggaggaggagggtggccatagtattattgtatttgtatggtcttaaaatgcaccccagattgcttattcgtctcaagggagaggggaaagagcagtaattatagaagggaaaaaccacacaacatcttgacagggtaatcaaaattaacatcaccaaagaggaataaatggacactaggcacaccttcaaacatgataccctgagaaggccataatgtgatttctgcattattcgggctgagaaagcctaccttgaatctaattacttgggaatatcacaaaatcccaaaacgggaaatgtactattaataaaaaaagggggccaggcatggtggctaatgtctgtaatcctagcactatggcgaacccaggagttttaatcagcctggataacatagcaaaatcctatccctacaaaaaaat

SEQ ID NO: 1790 - DNA, 1300 bp, Homo sapiens
  misc_feature (1)..(1300): DMR11:119147701
ctattgcttaacctccctatgcctcagtttttcatctctaaaggggggttgtaaaacctgtcgcatagggatattgtgaagattaaataacataatgcctggtacaaagtagttaataaatgcaactgttgggggatggggaggtctatagtagctgatgagaagttgacttggagaatggagggtccatctggagaacaggaggttggtcctgaggaatggtggtgatgtggggcatggagttgggggaagataggaaagactggatccaaaccccacacaaacctcagagtaacagggcggggcctagagaaatcctccagggatcgccagcttttagggctgtggagaggtggttgggaggggggccagcaggggagaggtttgactgctagtaaccctcaactgctgcagtaaggagaagcctcagcggtggcagtcacaccagcagcctcagagccttccctccccatcgtctctgctgtgtgacaggtgggaacttaaaagctcagatcacgtgtcttggctagctaacctacttaccccttgaagacatagtggctgggacaggcaagggccaagaggaattggctgagaaaggggcagagcaggggaaagccccaagtgtgttctggggacctacatttgaaggctttgggggcaagggagagaatgtgcaggtgcatgagatgcccagggcatgtctgcgagccctgtgcatgccctggcacacaggtccctccaggatatggcatgtgcctgtcttgaaggcctgtatctggctaggtgactacagtcggagcaggctgagcactgggttccagtttaactctggagctactgcaggctctcccaaagctgctgccattttcccttctttattagtgtcctaactcagagaaagtgtgaatggggagacaggaggatgttccaatgtcccaaggctcctgcgtttttgaaagcctttgcacctcgtttggggattcctggagggaggcctgcgctcattcatgggctggaactgagggaaattgttgggggactggtatcgtgtgtgaagacagactgacacctttacaatccctccactttcccccacccccaacacccttgcctaatctgtcttccagggacttgtccccacggagtgactccagctctcctttcctcactgcctccaagtcggccctttgccatcaacccccagtcctgagttcacccctgcacctcctccggcccccgcgccgcaagcgctgctctctcctttgccgtcctcgccccccgcgggctgccgggcggc

SEQ ID NO: 1791 - DNA, 300 bp, Homo sapiens
  misc_feature (1)..(300): DMR11:119711001
aagtaaaaggaaagcatcagaagttttcctttcttggcatgggggttaaatagggttgccaaaaaaaaaaaaaaaccaaaaacagaaagaaaggggcacgggaggctggctgggcacggtggctcatgcctgtaatcccagcactttgggaggccaaggcaggtggattacctgaggtcaggagttcgagaccagcctgactaacatggtgaaaccctatctctattaaaaatacaaaaattagccaggcgtggtggtgggtgcctgtaatcccagctacttgggaggctgaggcaggag

SEQ ID NO: 1792 - DNA, 600 bp, Homo sapiens
  misc_feature (1)..(600): DMR11:120393001
tcggagttctcttaaaaggaaggctgtggtttctggggtaacttatatcctctgtagttctcaataaaaatgtatggaatgagtgaattcatgtagtaaaaatgtattgaattgtcaggcgtatgctcagcaccataatagttaagtagaatacaaaatcaaatagaatgtggtccttgccttcaaataatttaaaatctagtgagagagccaaattaacggaatattaaaattgttttaaaaatcagttgattaaaataatttaaaagatgaaaaagagaaaagggaaacaacagatgagacaaatagcaagatgatagacttaaatacattagtaatcacactaaaggtaaatggtccaaacaccccaattaaatgtatagactatcagattagatgaaacagcaaagcccaactgtatgctacaagaaacacaccttaaaattaaaaatacacattgtttaaaagtaaaaggatggaagaagatgtgccctgctaatctacattaaaggaaaactagaccacattaatatcagataaagtagatttaagattatagaatatcaacagggataaaaaaagtaatttcgtactgataaa

SEQ ID NO: 1793 - DNA, 200 bp, Homo sapiens
  misc_feature (1)..(200): DMR11:122497301
ggagcttaaaagttattttgtataatgacttcattttgtgggtgacagagcccccaaatgacaatagtcagaacctagagttaaaatgccagtatctaagtccaaatccaatgtcctttccactacatcaaattcatcgtccagtatcaggcactatgcctccgctcaaagagtttgcacatagagaaacatgcaaacac

SEQ ID NO: 1794 - DNA, 1000 bp, Homo sapiens
  misc_feature (1)..(1000): DMR11:122501601
ttgggatatataccgagatgaggtgtatatctggatcatatggtcgctctattttaactttgtgagaaacttccatactgttagttgccttctcctctatgtcttcacatttactctgctcagcttcactgcttacaattcctttttcctcctccagcctgcgagcatgttaaggacaggtctgtggctctcagctcgatttcccttgctcctagcacagggtgtccttcgcaattggttttcaataaatatgtgttggccaggcgcggtggctcaagcctgtaatcccagcactttgggaggcccaggcgggtggatcacgaggtcaggagattgagaccatcctggctaacacggtgaaaccccgtctctactaaaaatacaaaaaaaaattagccgggcatggtggcccacgcctgtagtcccggctactcgggaggctgaggcaggagaatggcgtgaactcaggaggcggaagcttgcagtgagccgagatcacgccactgcattctagcctgggcaagagagcgagactccatctcaaaaataaatgaataaatagatgttgaaataatgaatgattatagagggaaacacaaatggtcagtaaatggaaaaaaaggtggtaaaaggtgcaagacaaacttctgataaggaaacaaaaagttcaaattgccaatgtttgtgcagctttaggagaaacatacatgcattgtatgtcttccaacttgattaatgtataattggcaaatagaaattgtatatatttaaggtgtacaacatgatatattgatgtatgtatacactgtgaaacaattaccacaatcaagctaattaatatattaatcacttcacgtagttactattggagtgtgtgtgtgtgtgtgtgtgtgtgtgtgtggtgaaaatttgtaagatcaactttcttagcaacttttaagtatgcaatgcattattattaactatattcttatgttatacattagatctccagaactta

SEQ ID NO: 1795 - DNA, 200 bp, Homo sapiens
  misc_feature (1)..(200): DMR11:123946701
atctcggctcactgcaacctccacctcccaggttcaagtgattctccttcctcagcctcccaagtagctgggattacaggcaggtgccaccacgcccagctaattttcgtatttttagtagagacaggtcaccatgttgtccaggatggtctcgatctcctgacctcatgatctgcctgcctcagcctcccaaagtgctg

SEQ ID NO: 1796 - DNA, 1100 bp, Homo sapiens
  misc_feature (1)..(1100): DMR11:125660201
tagaagtagaattttttgatagtgatagtttttacaattgttgggtacaggcttctgtatatctccatgtaattaactgagttaatcatattcagatcttacatatctttactgcttatacagtgaattactagagaagcatgttaaaatttactatgatttggatttgtgtatttttacttgtggttctcatttttttctttttttaagagacagggtctcattatattgcctaggctacactcaagctcctaggctcaagcgatcttcctgcctcagtctcccaactagctgggactacaggtatatgccaccatgcctggctaggttctgttaattttgctttatacattttgggactatttccttaggttatatactgatacatacttgtcatatcttcttagtgaattaaaccatttatttatttagaagtaacttctttatagatataatacttttgccttaaatattctttatctgatattaatctagccccacttgctttcttttggctaatatttatatgattttcataaaggatttattaacaaaaaaaaaaaagaaaaagtttgcatggcataacttttttgagacggagtttcactcttgttgcccaggctggagtgaaatggcgcgatcttggctcactgcaacctccgcctcctgggttcaagcgattctcctgcctcagcctcccgagtagctgggattacaggcatgcgccactacgcctggctaatttttgtatttttagtagagatggggtttctccatgttggtcaggctggtctcaaactcctgacctcaggtgatcagcccaccttgtcctccccaagtgctgggattacaagcgtgagccactgcgcctggcctggcataactttttatctttttacttttacttttctaaatcatataaaatgtccctcttttaattatcttaaaaatccaatctgacagtatttgtttttcaatggaccattgattccatttgctttcactgtaattactgatatatttggatttatttctatcatcttactttggttccactggatttgcattcttttctaccattttttttttgccttaaaaaa

SEQ ID NO: 1797 - DNA, 1700 bp, Homo sapiens
  misc_feature (1)..(1700): DMR11:125870401
ggttaagggagcatttataaagccaatggctccccctccttttggtacctcttttaagggaaagagagtcaaggctgactccttaggtgtggagggaaatgggaaattctgattatcttttttacaatgttctacttcacactggagtccttttagagaggggtatttaggttgggagagaataggctcttgggacggtaattcccaagagtcagggttataagaaggagggataacgtgaacagaagaaggatttggaatggaatctgaggcggcagcagctgtctgaggggaaagattggggacactgagcaggcatagatggtctagggggtcccatgagctggagtctttaggcatgggaactggctcctctgacttttcattttgaggtgcaagattgggctcttccctagttgtttttaaggaaaaaaggacaggtccctgcctccaacaaagacctgttcttcttgagaaactggacttttatcattaacatattgaattagaagctagcacattacattctcattccacccaaactttggccagaagattgagggtttgaggatagggccctgagtccaaataaaacaataatattttatggccgggcacggtggctcacgcctgtaatcccagcactttgggaggccgaggcgggcggatcacgaggtcaggagatcgagaccatcccggctaaaacggtgaaaccccgtctctactaaaaatacaaaaaaattagccgggcgtagtggcgggcgcctgtagtcccagctacttgggaggctgaggcaggagaatggcgtgaacccgggaggcggagcttgcagtgagccgagatcccgccactgcactccagcctgggcgacagagcgagactccgtctcaaaaaaaaaaaaaaaaaataataataataataatattttatcatttgttgtttcttcttgtgtttagtcccttcattatccttccagtattttaacatgagatctagggggctatcaaggggaatatccttattaccatctttatccttcttgctccttgtcttgcttggggtatttcccacattgggtcctggttaggctcaatctctcgtattagagatgtctcacctagccttctctggaggcttgctggggctattagactcaatcgctcatattagagatgtctcgcctttcctttagccccacctgctggaggctccttgcattcacgcacactttcaacccccagaatatccccaccaccaaggaagtattttgttgtccctgcgacatttcttaccttggtctgtgcacagagttacctggtcgcagttgtatctgaggatcctttcccccaagtcgccagctggtttctttctgcattgctgagagtctgggtttattcatcacactaggtgggtcttgattccttacccctgaggccactgtaacaaggcagcgggcatgcctcctcacgggagagatctagaccctccccagaagagaatgggaatcctggatgagccctcaaatttgtatttgtatttcagtgctgcaaaagaaacagcactcgagcataaattttctcagcaaggcaatttacttctgtagaagggtgcatctcacagatggagcaatggcaagagcacacctgaacaaagaaggagaagggggtcttatccctgatgcaggtagcccctactgctg

SEQ ID NO: 1798 - DNA, 200 bp, Homo sapiens
  misc_feature (1)..(200): DMR11:126050401
aacttttatatgatatcaatgctcgatcatttagtcttcatgatttccattctaacaaagattttacaatctcatacatttcctgtaagtagcaaacacacacacacacacacacacacacacacacacacaaacaaaaaaaagtctgtaaaatactccaaaatacaaagggctctataaaagttatttaagaaatgatc

SEQ ID NO: 1799 - DNA, 300 bp, Homo sapiens
  misc_feature (1)..(300): DMR11:127916301
gtgtcagtcttacaactctctccttcttattcaatattatgttggctactcttagtctttttcttctctatatgagccttaggattagtttgttgacatttacaaaataacttgcaggccagtgtctttgaggaacatcaatgtgaaaatcctcaataaaatactggcaaacgaaatctagcagcacattaaaaacttatccgccatgatcaagtcaactttgtttcatccctgggatgcaaggctgtttcaacatacgcaaatcaataaacgtaatttatcacataaacagaaccaaag

SEQ ID NO: 1800 - DNA, 300 bp, Homo sapiens
  misc_feature (1)..(300): DMR11:129145601
gatcacctaacaacttaaagagcatgcttgaaatatagttttcagtttaatgattaacaatagtcacatgcttaagcattggttcaacaattcaaacggttataggccttacgttatgaaactgccaattgttaaaattttgacctataaaattatcaatttcatagactccaactatcagagttctcagtaacgtattaaataacttcaataattaataccacttgattcatgccagagaagtcacagaatctttagccagagaagtcatagaatctttagccagagaagacgtaccac

SEQ ID NO: 1801 - DNA, 3500 bp, Homo sapiens
  misc_feature (1)..(3500): DMR11:130080901
gttagccaggatggtctcaatctcctgatccacctgcctcggcctcccaaagtgctgggattacaggcgtgagccaccacgtccggtcgttggatttatctttctagattcatatgctttgagctacaaactccaaacctttaagttctccaagttattacaaaaaatttagaaaatacagttttgaccaaaacaaaaaacaaacccccccaaaaacaaaagagtagattcccccttatgtgtgtataacccgttttttccttcatttaacatattgaataatttccaggtcattacatattttgtaacgtgtatagctttttttgggatcacacttgatggtttggggcttttgaacactctgcaattttaaatgtacaacattcatccctctaaataggtattcatgctgtgaatttggatttgagtaactaaactattgtatgaacattttgagttattgcatagggatgttgcctactagccagtgattggatatttgcagtagtattgaactgttacttgactattttaccctcattttataagggtgataaaaaggagggaaaatgtttattttattgataagcacatggtgataactggtgcttttttggtgtttttctaggtagtttctttgaacttatataaatgctcagtgggttcaattatgtggaaaaaaattaaggaatgcctataaaatgctggaaattttcaagggtgttttcccccctaaaacactggaagtaattgggatctgataaattattagcttgctagtagcagaatccccaaataacatgcatatgtttgtaacttgttcatgtttacagaaatataccttatgtgaaagtagaggactgcctattttgtaatttatttgattcttttataactgaacatgtatgtttctcattcttctctaatgtaaacagcatactgtggatatcttttaaaaaaaaatcattgtagctatatcccaaattggcatttaaaagaacctctggaaaggacttgatctaaaatggaagactttatggtaattggttcgtttgaggcttttcatagtcatcattattagcaaacatttatggaattgccatatgtagggcaccgtgacagaacaaataacaccatagctgaaggcactgtatggttcttaagatgatataataactagaaacttcttctgttggagagatggtagtcaacacttttccagtcttctcatacagattttattaatttagccttttaatttttattactcaaaacttcatttttttttttgtttgtttctgaggtggagttctgctcttgtcgcccaggctggagtacagtggcacgattttggctcactacaacctctgcctcccaggttcaagcgattctcctgcctcagcctcctgagcagctgggattacaggtgcccgccatcacgcccagctgatttttgtatttttagtagagacggggtttcaccatgttggccaggctggtcttgaactcttgacctcaggtgatccacccgcctcggcctcccaaagtgctgggattacaggcgtgagccacctcatccggtctcagtttttaatttaattttctgactctgtgcttgtgcttttaatactttcacactgattttctgcttctcaataaggaaagcacgtttgatctggtcacaaacacaaaacaaatggaaccactgtaggccccgatgccatgtgttttgttttgaataacctcataagaactcctggtctcccagcatgaagccctctaagtcagcctgggcacacgccactgcaggtgttggtgcatttgggacagcctagttttgttagaggctgtattgtaggaaagcctgtgacagtatgtcagactcattgcctatagacagcatccccagaaagagagaggggggaagcttttcatatacagatttttaaaatctaggttatctgttttcttactgatttatagtgtttccttccagatgttttacacatgtcagccacaagacataagcattttctaaattgaacagcctaaagtccacagatctttttgtgtatatggtaaaatgtacataacaaaatatattaaccactgaaacttttcttttctttttttttttttttttttttttttttgagacacggtctcacactgttgtccaggccagagtgcagtggcacaatcatagctcactagagcttcaacctcctgggctcaaatgactctcccacctcagcctcccaagtagctgggatcacaggcgttgagccatcatgcctgggtaattaaacattttttttgtggagatggggacttgctctcttgcccaagctggtcctgaactcgtggcctcaagcagtcctgccttggcctccccaagtgctgtgattgcaggtgtgggccaccaagccctgccttaaaacattttttttttgtggtaagaacacttaacatgagatctaaattttaagtgcacaatgcagtattgttaactgtagagaaaatgttatacagcaaatctctagaacttatgcatcttgcaaaacggaaactttatacctgttgaatagcaactgttttttcctcccttcagcctgtgtcagtgacagttctgtgaatttgattatgttagatatcccatataaggggaatcatgcagtacttgtctttttgtgacttgtttattttacttagcataatgtcctccaggttcatccatgttgttgaatgtggcagaatttacattttttttaaggctgaacaatattccattttatgtatatatcatattttccttatccattcatctctcgatggacatttaggttgtttccatgtcttggctattgtcagtaattctgcagtgaacatgggaatgcatatatctgtctgggataatgagtttaattcttttgctgtatacccaggtgtgagattgatagatcatatgataattctacttttaattttttaagaaccttcatactattttctatagtggctgcaccattttttcaccagcggcatacaggagttccgatttctcggccgggcgcggtgcctcacgcctgtaatcccagcactttgggaggccgaggcaggcggatcacgaggtcaggggatcgagaccatcctggctaacacggtgaaaccctgtctctactaaaaatacaaaaaattagccaggcgtggtggcgggtgcctgtagtcccagctactcgggaggctgaggcaggagaatggcgtgaacctgggaggtggagcttgcagtgagccgagattgcaccactgcactccagcctgggcgatagagcgagactccgtctcaaaaaaaaaaaaatgctttttctgcatcttttgagggtatcatattatttttgtccttcattctgttaatgtgatatgccacattttttggtttgtatgtgttaaaccattcttgcatcccagggataaatcccacttgatccaggtgtatgatc

SEQ ID NO: 1802 - DNA, 200 bp, Homo sapiens
  misc_feature (1)..(200): DMR11:130785501
tcaaaccttgagtttccattaggaccacccattgggttcttgtttcctgtgacctaatttgttgtgagctaatctgccgggagctgatttgcttaacagaaatgattgatacctcctttgtccaataactgttcaagcctctcctgcttctgtttttagcactcccccttcctcaaattccctttgttgactcattcctc

SEQ ID NO: 1803 - DNA, 2900 bp, Homo sapiens
  misc_feature (1)..(2900): DMR11:131145401
atttttgatagagacagggtttcaccaggttgcccaggctggtcttgaactcttgacctcaagcaatccacctcagcctcccaaagtgctgggattataggtgtgagccaccatgcctggcaaaaatttagtttttttaaatgacaattatttaatagcaaataattattgaatgttcactcgaagcagggaattatcttgagtgcattacacgcaatcacttagcctttgtaacaaccccataaggtaagtcctgtgatgactcccatcttaagggtaatgaaggaaggtagagaaagagtaaataacttttccaagattattcagctaattagtgatggagtcaggttatgaatgaaaacagcttgcctcctggtctcttgctctgttactctgatacacagccttctagaaataaacagagttataacatgtatctaagggattatacaacctacagcctggcctctcaagttcacagatccctttccaggaagagtccatgacaggtggggagtaattcctccctttttgctcctagactcgtcccttgttctggatatcagttcaacacccgtcacctactttctacattctggagtcctgcccgaggcatctgttctgtctgggagattgtcgacaggaattatgttctttttctgtgttgagcctacctccatgaaggagcaggtcccagctctgtaattccatccagcgagcaaatgcaaaagacttgcagagattgtctgcctgttgggggggtcaggctggtaatttcctgattcctctagtacaactttccactttcttccttttttcgggggggtatggggtggttcttcttctaatgttttcttggctgaagcatgatgcctgtttcgatctcctctggatggttcataagtgcctagaggacggtgatctgtcctctctgtatcacttaatgcatatttgcacacactgggctcatacgaagttagtgttagatgaatgaatgagggcatgagtaaaattaatataggtcagtcctgtttagcatccagcctcctgccctcatgtccccctctctcaattttttaatctgttgaacgcttttaaaatcaggtcacataacttagcagtaccttaatatattcttccagaatcttctattaattaacttagtgatttaacaacactggactttattgtcgttttatagtgctttgctaatccttcatttttatactcgttttatttccctacccccaatctgaaataattttttactatcttccgtgcagcactttttcccctcataatcaatattaatttcattctaagatcatattttgagatggagctgtttgcttggttcaagttgggagatcaagaggcagtttgtagaatctgtgttttcaaagaaaatttcttattaagataattatctgctaggctagcaggataatttcaatcacattgttgcagaactcacaagtggatgtgtttccacttcaaggtgactcggtcactctctgagagagactgtcacagcttgggagaagctagcacaggcagaaaaggaaaggaatccaacaggcaggtggcgttcaccccattgccctggatttctgtacagttggcatggccaggcttggtatagggagccaaaagcccatctctccaagctctgggaagcatttgacacgctgtatggagtgaaggttctaggaacaaagccatcaatgggaaagggccaacgagagaaaaagatgggagagagctggccgagagatatcaaaggtaatattcaggagaattgcagtgatctgaaaacacttctttggatatttgtgggaaatttgtgctctaaattccaagtacattatgaatgcaagatactccatttgtcataaaaacttaaaatggtttcagtagaattttttaaagatgaataataggattaacttattcatcacttaaaaagctaagttgttgctatacaactgcagaacagaaacaaaataaaaaatcatttctgttctttctggaatcagcatttctgaaaattcaggataagcctttcttttcttggctttatttattttttggaggatcaggagaatgttatcaattgggtaattatgcaaaggtttgcacagggaaaatgcagaaaatgaacaaaactctgtaaaaaggaaacatatatagcatcatggcttatttaagaaggaggccttctgatttataaatacatcatgagatgatgaggctggaggcagagcgagcattctgaggatagaaatggactttgttttctctgtgtttacgcaagtcttttttttttttcttattctctgttttaaacagctaaatggaaactgccctagcatcctttctctctctctctctctcttttcctttgtcacccttctctttcttccatgtctttttctctctcttcctcccccattgctctcttcttctctctcttgctcgatgctctttcaaaattgctccctcaggtatctccccgaatgcacactgatttttattttattttattttggtgtgttttttaatttttattttagattcagggggtacatgtgcaggtgcatcataagggtatgctctatggtactgaggtttgggtttctgttgacttggttacccagagagtgagcacagtacccagcaggaagtttttcagcccttgtcccactttcctccctgcatttggagtcaccagtgtcttttgttcccatctttatgtttgtgtgtacccactgttagctcccacttgtaagtgagaacatgtgatacttggttttctgtttctgcattaatttgcttaggataatggcctccaactgcacccacattgctgcaaaggacatgatttcattcatttttatggc

SEQ ID NO: 1804 - DNA, 1300 bp, Homo sapiens
  misc_feature (1)..(1300): DMR11:131592801
gcagtcccccaggtcccctctccctggcccctgcctccccacaatgctgggctcagagcagatgtgcagcagcctgccatcatctctgatgctgcccttccctgccaatctccggccacgtctggcagctggaattgcagttctccttgtttacaatgcattgtaattgcagacacaggctatgctgtcatttgtaattttctcttgtcctgttctccctgcacactcccttgcctaagtgtcaagcagttgcccttgtgagtggtactattggcaggaaatgtgctccaacatgcagcaaaaagcaaactattatttatttctcattctctccctctccactcaatagatgaaataggcaaagagcagtcctgtccctcctgcagcccccacccatccctacacctctccttccccagtgccattagttcctctaattgctaggtctcctctttcagtttggattttgcttcaggatgtctggagattacagggagaattgccttccctgctacagttgtctttcaacaagtgagggagcaattgcctggcttagctctcagcaggtggggtacgagcatcttctggagacaggctgctggctgggacttcccaacccatcgtgtcaggcaggggactgagcctcaccagggtccatgggctcaaggcaactctgcctgtggatctcaaacaagccaagtgtaaaggctcccctgccccgcccccctgccatagcatgcactgttctaagtggatgacacgttaccccatttattccccattagagctttgtaaaagccgttatcacctctgcttcatagatgagaaaactgaacccaagtacctagtcaaaggtcattcagctgatagtacgtgggcaaagctgagatttaaaattcactcaatctagttctaaaacctcttgtattttgttgtattttcttttgcgccacattctgtggcctcacgaggatcatgtttgtctgtgtctctggacatatcagtttctgcacttggcaggttgctttatgattatctgtttgtctgtcttctgtctgctactagactgtaagcactctgaaagcaaggcctgtatttcattttatttcccccttgtggtgcctgcatggtgcccagtggatcttttacatggatttgttaggatgaatgcattcagaggcaatatttggtcaggttgctgcccagagattgctaaattctgtgcaccagccttatatagtcttgtttctgaggaacatggatgattgtttgcctctaaatgcataaggatggttgttct

SEQ ID NO: 1805 - DNA, 2600 bp, Homo sapiens
  misc_feature (1)..(2600): DMR11:132694201
tttttttttttttttttaagacggaatcttcctctatcatcaggctggagtgcagtggcgcgatcttggctcactgcaatctccgcctccggggttcaagcgattcccctgcctcagcctcccaaatagctgggactactggtgcgtgccaccacgcccggctaattttttgtgttttagtagaggtgaggtttcaccatgttggccaggatgctcttgatttcctgacctcgtgatctgcccatctcggcctcccaaagtgctgggattataggcgtgagccaccgtgcctggccaagtcaatgtctttctctataaatgtttgatgagtgcttactatgtgccagctattgtgcacagtaaagaagatataaaaaatgaacaacaactttgtgctacatgctgccagttgcttcctatcttcatgctccccttctttcttctaagagaacctcagagctgttgaaggtggtgactgcatagataaaacacatctttctagactttcttgcagccagaggtgaccacgtgcctcaattctgtccaataagaagaagatgggtatctgcccaaggatcccaggactttggagtttacagatacctatgctgcaattctccccttccttccttagttttgttctggtctgtggtgacaaaggaaggaacaagcattttgagaccaggaaatggcaagacttagaaactatagactacgtatgatagagagaaaggaaagatgatacctgcgacattaatggcataaaaaattattgcctagctctgaaatgcataccttcaaagatctttgttgagaagaacggactcctactgggttcaaacacagcatgtgcgttttatcacttgcagccaaatacaacctcagctgatgcaatgcttccgtgcccttgagacacttagggggattataggcacatatgcaaattaattaaaaggatatgtggtaaaggttatgaaaaatacggagagagagtgagagactgttcattggaagcacggccccttagaactttgcctgtccattttgggagttggagtcaagtaaatgttcctgaaatacgatatgctgcataatccttgaatgatgggtactgttagtctagggggaaaggcagtgatggtatggtgtattctaggccaaataaaagcacaatggaagccatggaagtgcgggaggcaggagcagtattatggcaatgtgcaattcaaagtgagccctgggcaaggaggtgaagggctgagcatgagagcttatataacacattaaggagcttaacaatccatcttcaaaggagacagatgctgaggggtttcatgaccaggctgaataacttcactagtctgtgctaggcttagttgatacatagaaaaacaagcttagtagacctgtgtgcactgtatatttatgtaatgacacaaaagatgagggcagccagcaggacctgaacttggagatctcactagacacatctattggcgatttcttcttcctgacacccactacaatgacagtaaaggggaaaataaaaggaatcatcacataacatcaaagagcacaggtgagggaggatcagcagacaaggactttcaagaaaatcctagaagtatggagaaagatgaacaagacacaaggaagccactcctcaggagagtgctctagcacaagtgtgaacttgtcagacagaattcggagtggcttggaattgaaggcagaggtatggagggcagaaatgagcagtggggccaacaacagaggatgaaatggcaactgcacccacaagtcagttcttcctccagcccttcctgcacatctctttgcacacaaaacacagacagcccactattaacccaggcaaatagaacaaatggtttcttttaaaaataaataaataaataaataagctgccaaggaatttgccccagtttagcatttgagaatgcccgaccctaaagtttatttccatgtctgtgttaagaaatgtgccacctgcccataaatgagcttaatcacataagcacctagatgctttagcatttatgggagaaactcagtaggaagaaggatctacatttacaacatcacagaaagcccaccctagctatgatgaaatcctattccagtgcctcacaaatatatatgacaatcacaaaataaaactagtaaattttttagaaggctaagataaacaaagaaaactggtctcagaagaaacagggaacaggagaaagtattttttaagcacctctaattggtattcttagagatttaagatgatactataccaataagataaataaatagatactatgtagaagtaattgtcagggaaaaataacaagcccatggaattaaaaataatattgttgtattaaaataaaattaataggctacccagtaaagcagaggaaatctctcagaactggagcaagaagaccatgatggaaagtatgtgtgaggaagcactgctcgtatcagataggaactattgtatcacatacaacaaaacttatgcagagacacacacacacacagacacacatgaagatgtagtcaacccaaaaagtccaacgctgacccat

SEQ ID NO: 1806 - DNA, 1300 bp, Homo sapiens
  misc_feature (1)..(1300): DMR11:133271301
ttttcaaagtgttaagggataaagcacacacacaaagcactcttcttcagttctcaccagctggatctttgcctgacattgatagatgttgtctgaatctaaactgaaaacatgaaggtagatgggccttaaacacattaaggatcaacaatttcagtagaattaaatggtaggaagagaggatatcatcatagccatcaataataatgatactaattagcttccatttaacaagcacttactgtgtgtgtggcactatgataaacacatgcattgtttcactgaacacatacaacactaagaaatagctagagttgttcctcccattttactgaggaaggagctaaagcttagaaactgattggtagaaccaatattctcacccctatgcaatatcaccagtctatgacagtgcttcaaaaactactacaaatataaaattgccaccagaagtatgccagcataaaattgcacagataggcagcattgaatccaaaatgactttctcattcatttgtttgtgcactgatttattgtacaaaattcgatgagcacttagtatgcactcggcaggatgctcaatccaagggttataaagataatcacatatagtccctgcatctgtgatgctcagagtctaacacacagatgcaaactaattaaaatgatgcaacatagttggggtggacacccactcactgccctttctgtccacaccactgcaggtatgcctcttggtgcaagctctctgagcacagggacaattcctgaaggaaaggagtgcttcagatgcagtaaccacctgcacacaacagtatccaatgcagagattagccccttacaagaggctcatgtttcttagcccttatactgcttgctgtgatagttagggttagtaataaattgaaagttgaagtggtctttatttaagcagttgtaggatatttggactaaaaaaaaaaaaaaaaagaaaactgaaagataaatgcaattttcttgtagaacaagaaaaaaatctaacagcccagaatatcatgcaaattgcagttatttattatcagacagtgctgtacagcattattgactaaataaaatgcactgcaataagacccacaaagcactatattatgaggcatatatcaggatgcagattttttcatatacagaacaccacctcgaaacagtattccctgtcagggagttatatttctatctctgagcaggcctgaaccctgtgtcccttctggccacgtgaaagccatgctccttcccctctgggccggcccggggacgctcgggg

SEQ ID NO: 1807 - DNA, 300 bp, Homo sapiens
  misc_feature (1)..(300): DMR11:133591201
gcacgttgtacacatgtaccctaaaacttaaagcataataataataaaaattttaaaaaaaaagaaaaaacgtgttacctaaaacagcagcttaacctggatgagtatatgcagaggaagaagacagaggcactggccccaagccaccaaatccaaggtggccttctaccccaccatcctcattccatcgacttcccacaaaacaaccctggaccctgaccacatacagggtaacaacatcagaatttcttctttaggaaaaaacatgcattatgttgtctttcctcaggatcatctcat

SEQ ID NO: 1808 - DNA, 1400 bp, Homo sapiens
  misc_feature (1)..(1400): DMR11:134048001
tctcccccaagaaagagttcaaagctctataatcataaaatattagagcttaaggcaatcttaaaggtcatctgtagcgcctctccccttccctgcttccatgcatctacacgtggattcatttctttatctatctgttcatcagatagccactcagttcctacagtttgcccatgtgcaacgcacgcactggaggcctcacagacgcactgtctcctcaaggcgcttgtcatctagtgggtgagaaagcaagtgacaaggcgttggaataagtaggacaggcactgtggtaggaagagtgcatgttctagaagcaccgagagggcacgtcacccccaccttggggtagtggggggaattcatggagacttactgggagatattatatatatctatgtatatgtacataataaatataaaaatgtattataagtaaatatataaaatataaacaaaaatataaaatatataaatatatattatataaaatatacatatatattttttgagacagagttgggctggagtgcagtggcacaatctcggctcactgcaacctctgcctcctggattcacgcaattctcatgcttcagcctcctcagtagctgggactacaggcacacaccaccacgcccagctaatttttgtatttttagttgagatggggttttgctgtgttgaccaggttgatctcgaactcctggcctcaagtgatctgcctgtctcagcctcccaaagtgctgggatgacaggcatgagccactgtgcccagcctgggaaaaattatatttaagttgagctataaaaaataaggaaattccttttcaatcaataagaggtctgctcatcactcagtacggctaaagcatagtgtcaggcacactgcatgatgatgaatcgaatgtagtgtccacacatagagtttaacgcctagtgagggacatacagtaaaggtacgcatgactagaatattctatgctcccaatagaaagaaaaatgttcagggatggccatcccaagtgccctgacttaatcatcacacattatatacatggatcagaatatcacatggtccccaaaatatctacgatgtatgaaaaaaccagaatatacctcgaagcaccagataatgctcctaaaagaaggatctgtggagtcccagggagggtttcagagaggatgagggaagttcccagctggaaagacttgcaaaagccccatggaagaaatctgagttcaccttcaggatggctaggatttaaaggcacagagggagaaagaagggcattctgagcaaaagccatgctaccagcaaagtggaagaaccagtgccgtctgggggaagaaggatacaccagtctgaccgaggcacacgacaggcagtcggggcagacgcggc

SEQ ID NO: 1809 - DNA, 1100 bp, Homo sapiens
  misc_feature (1)..(1100): DMR11:134905901
ttcacccagtccttgggggctctatgcagcaaagtaagctggtgaggaaaggctggctgagcttcctctgggagccggggcagatgctcattgccaagtgtggggaggcgatcctggaatgggtccaaataaacattcaataaacttgtcagcccgctgtgggggtccctgcgaaggacaggcatctcccctgtttgcggtgtcctggcagtgacctcacttacttcatgaggggctgccccagcacctcctaccacggccacgtttctgcccagggagcgtgtcatcgggggctccagctgtgctgatttttattttgtggcaggaaatcagcactccccaggcaccgcgtgggctgggtaagggtggaacggttcaggggaagagcagagctcacgtctggagtatgagtaaatctccgaccctcatgtctgtctgattttgtttttaagagttttggggaagctggtattcaggatgggtcctgactggcagtgagcagcacctgcgggcactcgggagggagcagggagcaggtggagagacggagcaggaggtggaccagacagaacaggaggcgatgaggaaagcgaggggaagacagggatgagaacggggcagacaagaggcagaggaaagaaatgggaactaaaagggaaaagggaggcaagaaaggatcagaaagtgtactgtgtggaggacatgagggaaagtcagggagaatgcaaggagacagctctgcccgaaaggtgagataaaaagaaccgatggcagaacctgaaatgtgaaaggaaatgtgaataaaacagaaggaagagtggctcgtctgagtgcggagagcgggaaagcagccagcacgtgagtgtgctcacggccggggatcggggggatgcaggggctggacgatgccccttccctgctgcccacattttgctcatctgagaagctccacagctgaggtagatgaccaggcggagacaggtggaactcctcccacccatccccaggcttcctcgtggtggccaggctgacatgtcagtagtgaaccccgaggctccttctccaactttgtctctggcatagagatcatccaggggccg

SEQ ID NO: 1810 - DNA, 3500 bp, Homo sapiens
  misc_feature (1)..(3500): DMR12:58301
aatcaaacaggtagaagaaagaacttcagagctcaaagacaaggcttttgaattaatccaacctgacaaagacaaagaaaagagcattttaaaaatgaacaaagcctccaggaagtttgatattatgttaaatgaccaaacataagagtaattggtattcctgaagaagaagagaaatctgaaagtttgaaaaacttatttgagggaataattgaagaaaacttccctggccttgctagagatctagacgtctaaatacaagaagctcgaagaacacctgggaagttcatcaccaaaagatcatcacttagccacatagtcatcaggttatctaaagttgaaaagaaaaaagggatcttaagagatgtgaggcaaaagtatcaggtaaccaataaaggaaagcctgttaaattaacagcagacttcctagcagaaactctgcaagccaggagggacggagatcctatctttagcctccttaaacaaaataattatccagcaagaattttgtatccagtgaaactaagcatcataaatgaaggaaagataaagtctttttcagacaaatactgagagaattcactaccaacaagccagcactacaagaactgctaaaagtagttataaatcttgaaacaaaaccttgaaatacacaaaaatagaacctccttaaagcataaatctcatggggaccatacaataacacaatgaaaaaacaaggtattcaggcaacaaccagcacaatgagcagaatagtacctcaaatctcaatactaacattgaatgtaaatggctgaaatgctcctcttaaaagatacagaatggcagaatggataataattcaccaaccaagtatctgctgtcttcaagagactcacctaacacataaggactcacataaacttaaggtaaaggggtggaaaaagatattccatgcaaatggacaccaaaagtgatcaggagtagctattcttatatcagacaaaagagattttaatgtaacaacagttaaaaaagacaatgaagggcattatataatgataaaaggactagtctaacaggaaaatattacagtcctaaatatatatgcacctaacactggagcttcaaaatttataaaacaattactactagcccaaagaaatgagatagaaggcaacacaatgatagtgggggacttcaatactccactgacagcactagacaagtcatcaagacagaaagccaacaaagaaacagtggacttaaactataccctaaaaacatccattagcacatggaacattctccaagacagatcatacataggccacaaaacaagttgcaataaatttaagaaaatcaaaattatatcaagtactctttcagaccacagtgaaataaaattggaaatgaactccaaaggaactctcaaaaccaagcaaatgcatggaaattaaataatctgttcctgaacaaagtttgagtcaacaatgaaatcaagatggaaatttaaaaattccttaaactgaatgataatagtgacacaacctatcaaaacctctgggatacagcaaaaacagtgctaagagaaaacttcagccaaggcgggcagatcacctcaggttgggagttcgagactagcctgactaacatggagaaaccccgtctctactaaaaatacaaaattagctgggtgtggtggtgcatgcctgtagtcccagctacttgggaggctaaggcagaataattgcttgaacctgggagaaggaggttgcggtgagccaagatcttgccattgcactccagcctggacaacaagagcgaaattccatctccaaaaagtaaaaatttaaaaaaaaaagaggaaatttcataacattacagtcctaccttaaaaaagtctgaaagagcacaaatacacaatctaaggtcacacctcaaggaactacagcaacaagaacaaaccaaaccaaaccctagcagaagaaaagaaatagcaacgatctgaggagaactaaatgaaattgaaacaaaaaaataaaaaaagctaaggaaaaagctggctctttgaaaagataaacaaaattgatagatcattagtgaggttaaccaagaaaagaaggagaaagtcctaataagctcaattagaaatgaaacaggagatactacaaccgataaaatagaaatacaaagaatcattcaatgctactatgaacacctttacaagctaaactagaaaatctagaggagacagataaattcctgaaataagcaaccttcctagattaaaccaggaagaaatagaaactctgaacagaccaataacaagcagtgagattcaaatggtaatttaaaaattgccaaacaaaaaaaaaagtccaggaccagaaggattcacaactgaattctatcagacattcaaagaagaattctcaacaattctactgaaattattccaaaagacagagaaagagggaatcctccttaaataattccataaagccagtatcaccctaatatcaaaactagggaaggacataacaaaaaaagaaaactacagaccaatgtccctgatgaatatagatataaaaatcctcaacaaaatactacctaaccaaatccaacagcatagcaaaaagataatcccccatgatcaagtgggtttcacaccagggatacagggatggtttaacatccacaagtcaataaatgtgatacaccacataaacagaatttttgttaaaaaaatcacattgtcatctcaatagacacagaaaaagcatttgacaaaatccagcatccctttatgattaaaaccctcaacaaaatctacatagaaaaaaacataccttaaggtaataaaagccatctgtgacaaacccacagccaacattatattgaaggggaaaaagctgaaagcattccccctgagcactggaacaatgtaaggatgcccactttcaccacttctattcaacatagtactggaagtcctagccagagcaatcagacaagagaaagaaataaatgacatccaaattggtaatgaggaagtcaaactgttgctatttgctgatgatatgattgtatacctagaacaccctaagcactcacccaaaaagctccgagatctgataaatgaattcagtaaagtttcaggatacaaaatcaatgtacacaaatcagtaacactgctagactccaacagcaaccaagctgagaaacaaagcaataactcaaccccttttacaataactgcaaaaaataaaataaaatacttaggaatatacctaaccaaggaggtgaaagatctctgcaaggaaaactacaaaacattgctgaaagaaatcatagatgacacaaacaaatggaaacataccccatactcatgaatgaatagaatcaatattgtgaaaatgaccatactgccaaaagcaatctataaattcaatgcaattctcatcaaaataccattatcgttcttcacagaactagaaaaaaaaaaaaccttaaattca

SEQ ID NO: 1811 - DNA, 400 bp, Homo sapiens
  misc_feature (1)..(400): DMR12:1184301
cacatattgtcagaaagttttttttatttgttatatttttaatttctcttagcaacttattgggcctagaattttattatcttcaccttctacattagggtctattttttggtttatagcttatgtgtagatttacatgaaggactatttggcgtattttcttcttggaaactattactgtattattagtgttctaatttacattttttcaaaagcctgtgcttatcattgaaattttaaaagtagatttcttctctgttttgtttggagtaggaaatgactggtcttgaggtaatgataattggagtcatttttgacctatttatagcttaagaatgtatatcctgtatctgaatattggcattccatgtcttcagcatgagataatatcctcagaatt

SEQ ID NO: 1812 - DNA, 1300 bp, Homo sapiens
  misc_feature (1)..(1300): DMR12:1307101
ctaaagctcagctgttgtcagtttctttggattgattgtcttaaagggaaagataaatcaactttgtttttttcctgaagatagctaatcaggtcatttaattttggaccaataagtaaaagaataactgagtttaatgagtattgcgtaaaataagttcttggtgatttgaccctgggttgacttggcatgaattttctttcttttcaactccctgctgcccactttgtggtgttgtatgaataatgagtccacaggccctgtaaacatgttaggtgaggtgtttgttgtttattagtagttgggattaaatagaagttgcacactgaaattgagtgaagtgacttttctgcagttaacttggatgtcattggtttgaaggagtttttctgttgcagctgcttgtcctactacttttagctgtgggtgcatcctttctgcgtcctgctaaaaattatattcttgttttcacttttaaaacctaagacggttccagagctgtgtttggtttttgctttaaactaatgcccgagcgcccctttagttagtcaccaatcactgtttaggtaagttgatgattcctttttgctacccaagatttttttatttaaaattgagcatttttaacttgctttttaggtcagaggatcaatgtcctctgtggtattcctcctccatctaagcttcttaaagcagtattataaatagaggctttcaacctaaaaagtactgtgtatttcattgactagaactgaactgaactgtaggctaataaaaagtaccaaatgaaaatattatggtatctcattgcactccattgtagatgtaatgtagtgtgaccagcagtagctttgattcattgtaaatcccatctgaatactgacaacagttcaaaacatcaggagataaacctcaaaggtcacatttgtgtgaatggtcattgtgcatataagacatcattttattatttgaaaactagtagtgtagctcttaagacagggcagtgtcctaacctctgacagggatagaggcgagaggagaatcagtgggctgccaaacagtcatgtgttcataggtgaggttctgtttcttctttagctgttactattgttattattattattattattatttgcatgaatggtagcagttacttcacaggcaaatttcctatgaatcccagagtattgcaacagattagcagcaaataaagacctgagataaagaaaaaaaaaatgcttttattcagttatattaaaattaggacatttcaataaaaaactaaagcagcttatgttgt

SEQ ID NO: 1813 - DNA, 800 bp, Homo sapiens
  misc_feature (1)..(800): DMR12:4264101
taacttaggcagttctgttccttaggacaaggaaaacagcatttttcctcagccgacatgtaccaagtgcccatctatatgaggaactaaatgttaaaagttccaactcttgatagattaattctcccagatacctgggaagtgagagcatacctaaacccacaatttaagaatccttgtttaaaacataaagtatataataaattgattccgattttgatgatgataataaagtcactggaattttatagattttgagctgaaagggaacttaacgatcatttactacagccagttaattttgtagctgaggaaactcaatcttggaaacacataatctatccccaaggtcacagtgctggttagtgcagagtagaagcaagaaagagggtacagtcggccctctctatgcatgggttccgtatccacagatacacccaaccacggatcaaaaatattcagagaaaaaaacacagtaaaaaaataacaaatgcaacaatgagaagtaatacaaataaaaacacagcataaccgcttccaaagcatttactttatattaggtactgtaagtaatctagcgataatttaaagtgtatgggagaagtgtataggctatatgcaaatattacaccattttatatcggatttttacatcctggattttggtggtggggtgggagtctttgaaccaatatccccacagacactgagggatggctgtattctgacttctaggctagagctgtttcaccaacatgatgctaataaaaaggacaggattttctgcatcaattctagga

SEQ ID NO: 1814 - DNA, 300 bp, Homo sapiens
  misc_feature (1)..(300): DMR12:4789201
acactgagtgcttgatttgcctcataggggtctcatgcggatctctaaggcaaacctgagagcaccttgtggaagtgagactctaggcaaacactaagggcctgctaagaagggtgactgttcattgagcaggatgggtggtccctggagggcagaggctagaatggctagcgggtgagaagctccagaaagagaagaggagagaagaggaaactgggagggaacagagagcttggaaggctcacataggaggtgggaggactgagtggaccttttggttggttggaggagcagagttag

SEQ ID NO: 1815 - DNA, 1300 bp, Homo sapiens
  misc_feature (1)..(1300): DMR12:4834401
gatattaagcctataatgtgtgaggcactagagaattaaaggtgagcaaaactttaatcttctaagaaggtcatgtctagatggcagatacgagtaaacagctgactgaagtacaatggtggtaaatggtagaagcgggggcttggggatttagggcagactttcagggcttatgtgagggctcagatcctgccctgctgttcatgccttatcaccagtgggttctgacagtaaagaccaatgcaggcagcaaggtaccactttattagtatctaaagcaggacccagctacctgcaattcagggctctccagtaaaagactgagttgaaacccgcaactgggactacaggccaaagtggggtctcctactctcatcgaccttggagccaaaatctgtgacaagctcttttacagctgactttcaggagggtgagagaacaagacccaaaagtggttctaagccctcttacccagctgatttcatggagtgagaatcatacggacagaaaggaaaggtgcccggtctgacccaagggaccagggactgaaaagcaagctggttttgaggactgacctaaggcacaacaactctgttaactagtaaaatgtagcctaaccaatgtattgggttcaactgttgggactgggaatttagcattcttggagtctatataggagggaagctaataaatgcaaactgagtactcccatttttctaagaaacagagaatgattttttttttttttttttgagacagagtcttgctctgtcgcccaggctggagtgcagtggcgcgatctctgctcactgcaagctctgcctcccgggttcacaccattctcctgcctcagcctcccgagtagctgggactacaggcacccgccactgcgcctggctaattttttgtatttttagtagagacggggtttcaccgtgttagccaggatggtctcgatctcctgaccttgtgatccgcccgcctcagcctcccaaagtgctgggattacgggcttgagccaccacacctggccaagaatgattttttttaaattatttttttctttccttttttttcctccatttctccctgttcccacttcctacttagccctttataaatgtaattctaacctttaccttcccttcagcagacactccctatagggctatttcatctaactatgcgcttagaagttccagagtggaactctcccaccaggagacttcctcatgggacaacagtcaacctccaacccaaagttgcttgttaggaaactctctcccacctggagagtctt

SEQ ID NO: 1816 - DNA, 500 bp, Homo sapiens
  misc_feature (1)..(500): DMR12:5120901
tgctcttctcgaggagtatctttgtggcgttctctgtatttcctgaatctgaacgttggcctgccttgctagattggggaagttctcctggataatatcctgcagagtgttttccaacttggttccattctccccatcactttcaggtacaccaatcagacgtagatttggtcttttcacatagtcccatatttcttggaggctttgctcatttctttttattcttttttctctaaacttcccttctcgcttcatttcattcatttcaccttccatcgctgataccctttcttccagttgattgcatcagctcctgaggcttctgcattcttcacgtagttctcaagcgttggttttcagctccatcagctcctttaagcacttctctttattggttattctagttatacattcttctaaatttttttcaaagttttcaacttctttgcctttggtttgaatgtcctcccatagctcagagtaatttgatcatctgaagc

SEQ ID NO: 1817 - DNA, 2400 bp, Homo sapiens
  misc_feature (1)..(2400): DMR12:7120501
cacagggcgcctggatttgcccaccagatctcctcacctcttgcccttcacctcctgctgtacctacaaggtctccccgattctcatctgcccataatcatggacacagccccaggatgtgcagggtgagtccccagggaccctgaaagcatgggtactcttatgactgagggcgttacaccagggagagggagccggggagacttcccagagagctggttgggggttatgaaagtggcctcacggctgatgcggtggctaacacctgtaatcccagcactttgggaggctgaggcgggcagattgcttgaggtcaggagttcgagatcagcctggccaacatggtgaaacccagtctttactaaaaatacaaaaaaattacgtgggcctggtggcacgtgcctgtagtgccggctactcaggaggctgaggcacaagaatcacttgaacctgggaggcggaggctgcagtgagccgagattgcaccactgcactccagcctgggcggcagagcaagattctgtctcaaaaaaaaaaaaaaagaaaaagaaaaaagaaaaagtggtcccaggccaggtgggagcagcaggctctaggggaggaagtgcatcctgtggaagagcagggagccgctggaggggtggggagggaaggggcagctcccaccctcatctccatcgtccgcatgctggggataccaggcctcttacttggggtacttaaggctagaccagatggggttcctgcatcttagggagtgacattagggtgggggaaaggtaccaaaatggccatgcctctgctgtctcttgggatcttgagatctgtggtggcctctaggagttctctgctgccaataagtggtccaaccatgttacaggattggacccgggatggcctttgtgctttagagctgaggcacttcctgcttctacctgagctccttttcaacatataggcctgggcacgtaggcgtcagggtcatgtgggaggtggaggccgaggggagaggtgggcagtggggaggggtacacggctagaccttgttgctctgcctcctcttgggaccccccagtgggatggagcccaagtccttgggcagcacatggtcctctgcttcacaggacacacacctgtacccatcctccccatccacttttgctcagtttattttggggacagggctctgaattgacctttggtctttgcagactctcagggaccatctggagttccagctggaatctgggcctggtggagtgggagtggggcaggggcctgcattgggctgacttagagagcacagttattccatccatatggaaataaacattttggattcctgatcacatccctggagtttaagactctggccaaccaagtcaactccacaactttgtgtgtccctgggagggtctggtgtgggacccacctgtctgtggccctcgtcccctcccctgccctttctccactcacatcttggtccctctggtgattatctcttccctctgaggacagatggaacctgatttgaatgaggggtaatggtcttgtgaggaccaggacatggattgggtgtgtgtttatatgtgtgtgtgtgtatgtgtgtgtgtgtgtggtgggaatggaatatcagagaaggtggtggaggagggaggattgaatttggagaatccctggcttctagtgtccgcaggggaaacagcagctccagcttcccacagcggtcccctcccctctgcaggtcgagctcccaccctcttggaaatgcctctgaagctgcatagtcctcccctgatgcttgtgctcccttaggggatctccaggcctttgggtgtggtctggcccctggagaagtgtggtcgagtggaggatggggtcctgcagtggccatgttctggacgcccacatcacggggagttttgagggattgagcccactttagcttgggtcttaaaaccaccatggtaagaagtgtcaacctttgggggaaaaataaaaatatatagaaatatttagaaaaacccaccatgggggcctacaagttcctgagtcaaggcctctgccgagactccactgaccagcatggtcactgaagggcatggaggaccgtcctgtgggaagaggcttggacatgcactgtgaactcaagagcaaggacactgtgttgatctggagatgtgggcaatgggcgagtacacacggagcatcctcctgtgccttggaatgggacaaggtggattccagcagccctcagagcttctgctgggtggctttgcaaagaaggggctttccactctactgtggacatctgcagagattgggcagggaataagattttccattcaaccctgagttccttttttttttctattccaaattcattccagagcatgtggt

SEQ ID NO: 1818 - DNA, 2200 bp, Homo sapiens
  misc_feature (1)..(2200): DMR12:7859001
attttttggcatacagttatcctcttctcccttcaccatttgttgaaaagactattctttcccccattgaataatcttggcacccttgtcaaaaatcagttgaacaggctgggcgtgatggctggtgcctgtaatcccagcactttgaaaggctgaggagggcggatcacctgaggtcaggagttggagatcagcctgacgaacacggtgaaaccctgtctgtactaaaaatacaaaaagttagctaggcgtagtggcgcatgcctgtaatcccagctactcaggaggctgaggcaggagaatcacttgaacccaggaggcagtggttgcgatgagccaagatggtgccactgcactccaacctgggtgacagagcaagactccgctgtctcaaaaaataaaaaaaaaaaggaaataaattttggaaaggaagtgatagtcaatgtgaggtgcaaaatatacaggttttgcaaggagcccatttattatacatgaccagggctagggtattaaccatgggaataaatgactgaggtggactggaaaacaagatgattggaaatgagtggacaagaaactgagggccagttgtctccatacatcatggaatagccaggactgatgacagtaggaatggtgaaaaccaagagaatgaatcaggcttctaaattttcagagaatgtgggggaagtgacccaggagttcagtagattattacaatatcctgatggcatgcactgaaaagaagctgagtttttaagggattagcaacagtttgaagtaggcaaagagcagcatcataagagttacaaacgaaatgctgaacctaccctgtagtactttcagagaagtgagatcctctaacttgaaagatcaagaaggggatcatgggaaacgtggcatttatatggaccttgaaagatgaaaagaattttgagagaaatagacttggaaagataattccaggcagagagatgctattaccaaccaaagagctgacactgctccacccacgcctggtgcttttgcaaatccgcctccagagcccgttgctgtggtgctagtaacatccttggtattaccagagctggttagcagttggccaccaggtggcagtgtatatctttgcgccatccctcccagtactggccctggagaaaaactggaagtgagaattagcacaggtacagctgaggtgagatcagtggcttgtggattgtgtatttagttaggcctgaagaagcaaagccctcagagaagaggataaatttgggaacatttagggaaaatatcaggcagaagataaaaggaaaggaaattgcctcagggcgagagtataatgaggtctaaaaagtagtagggggctcttggagggacagccatgtcctcctggccattcctttaggaactagttggtcaggatagccacgctgccctaggctttacaaaactccggaaatacactcttggaaccagaggtgataattcactgaatgaggattaccccaaccagccacagcgggaaatccttggagaaggtgtgcgctgattggatcagaggcacaaaggaaaagaatcccagcatgaaggaccagttggaatgccaagactccataaatcactgcaagaaaaacgccttatggtgagggttctgggatttgggatcatttccagatgagaatccacagatgactcactgcctcacacagtccttctgaggttgttaaacagattgtttccatcagtattgagtcaggaattgaggctgctccccactgcacttacttgtcaactttttttttttttcctgagacagagtttcactcttgtggcccaggctgaagtgcaatggcgcaatctcagctcactgcaacctctgcctcctgggttcaagcgattctcctgcctcagcctcccgagtagctaggattagaggcatgcaccaccatgcccagctaattttttatttttagtagagacggggtttctccatgttggtcgggctggtctcaaactccagaccacaagtgatccacccacctcggtctctcaaagtgctgggattacaggcgtgagccacctcgcccggcatcaactgttttcataaattaattatcagttgtttaaagaaagaagcagccaaaaggaagaaccaaagagagaggggagatgtgaagatctgtagtgcaaggtgaggaaa

SEQ ID NO: 1819 - DNA, 100 bp, Homo sapiens
  misc_feature (1)..(100): DMR12:10160301
aataggaaactgacgagagaggcatcaaaaagaatgggaaacttacaagtggggcatcaaaggagaaccgtcctcccagagccatgggtagctggggttc

SEQ ID NO: 1820 - DNA, 1700 bp, Homo sapiens
  misc_feature (1)..(1700): DMR12:16465301
tttatgggaaagtaggaccaatcggattcaactctagccacaacctatatttgaaggcctaggtttaactggttaacatttaaatcagaggtccccaaatcccggccagttgaccggtactggtccatggcctgttaggaactggatcgcatagcaggaggtgagcgtcgtgagtgagcattgccgcctgagctccgcctcctgtcagatcagctgcagcattaggttctcataggagccgaaccctattgtaaactgcacgtgacggatctaggttgcacgctccttataataatctaatgcctataaggtgtcactgtctcctatcaccccggatgggactgtctagttgtagaaaacaagctcactgattctacattatggcgagtatgtaataataatagaaataaagttagcaataaagtgcacaataaatgtaatgcatttgaatcatccccaaattatcctcctccttcccccaccccaatctgtggaaaaattgtcttccatgaaagtggtccctggtgccaaaacccttggggactgctgatttaaatggttggagatattagtgcataaagtatgatagttttgttcccaactcagttacatcttcccacaccccttcgaccattgtccctttggcccttttttctttgtatgtgcgttctcagttaatatatagctaataactcttatttttcttatgttttagactgtttacgcttatctggatgtaagaatgaaaattgacttagtggaaacacttgcatatgtgtaaagacctaaatggtggttcattcaagaaaattaatctgtgtaataaatggattaaaacagccataagtttttttagagacacgtcatttctgatttctgctcacattcattggcagctagtcccatggctgtactgagcctcgaaggaggctggcaagcatagtgtaactttgtgccccagaaagagaaggaatgaatttgtgatttgtgaaaggttcaggagcttcaccccaccatccctctctcaggattctgaaatttttaaatagctggcgaggtcaaggctactaattctgatgaaaagtgaaggaatctactgtatacaactgaagcttgataggacactttaacataatatgtcattactgaaatgtggccatgacaaagatgctaacacagcttccttttgtcatctggtcttagatttaaaaccttgatttaatgaaagtgttgataccacactgaagaaaaaaagactgattttttggggtcattaaatatgagccacttgaataaaggaaggatggtcttggataggtaaggtaaagggtatagtttatattagcatgggacaaaaggagaaactacagaaacctacaagaatcccagtgagatacatttttcctctggatagaaaccaatagcaaaagtaaggcaagggttaaataattaactctctattttctttcttttaacacactttctcttttgtgtcagacactgaaaagcatggcctcaaactttgaacactttgaaatttcctctctttttttccctaaagatttcacattttccacaattgtgttgcactgataactatcactcccttccctccactgataatcccagttttatgtaacttataaaaggcagtctgaccccgagacttcatagcaggtagcagatggctttggtggatg

SEQ ID NO: 1821 - DNA, 2600 bp, Homo sapiens
  misc_feature (1)..(2600): DMR12:16855201
gggaaaaaaaaaaagctctttgagaaaatgtgtggaagtacagaggatcagagtgagggtttaagtcttaaggggcatttccagttagaaatcaggaggagccatcgagactgcctaaaaggtagaataactggccagagcatttggggaactaatgaattgacatgctctgaaacaaaaaagagaagaaaactgcaaggagcataagatttaattgcagtaaaagttttgaataaataaaatatataaaagtccattgaatttgaccaaaaggagatgattttaaacctttcagagatcaatttcagtgaagtggtagtagatgagaatgaaggcaccaggtagagagatagttggtgtataaatatgcccaactctctctgaaggagagtatattagaatttctaagatagccctgagaaagtactttagtgatcaccgctgaaattgatggagtgctgcagtagaccccgatgtccccaaacccctcagtcatccagagtagctccattttatattatatgtatatgtatgtgagcagatgcgcctgtgtgtatgtgtgtgttcacacatatatagatttaagaatttcatatattttatcggaagaggtgctttatgctaaaataaaacaaacacttaataatctgctctagaattttggaaatcaattaaaaaatactagatgagtgctgccaaggattatggggtaattttaaaacaggatattaataactcccaatatgttagaaaaaataggctgtggattcatagatctctcatttttaactttggttctattgactagctatgcatgtgagttacttaacctctcttaacctcagttttctccggtctgaaatgtaccaagtggtatttgctgcatagtgtgattgttaggattcaccaggagtagacaagggtactggtttcttttgtctcaaatttccctttcagtgaatgtggtctttacaaaccaaacactcaaccacacagaagatgaaattggatgttctataattaagctttgtcttcagctcccatctctactgatggcagaaaatttactcatttccagatgaacccaacagtttagttttcttagacattttacgattaaacccaggtaaactcgtgatttacgtcttcacacattttcctcagtgtaacttcaaagatcccacagatgtctcttggcttctgggtcaggcgtttagtccatggtcagtttgttcatcattggcatccattgggatttgttctcttgtctgtccccggagtgcttgccgtccgccatgcgcgcactggctgatgtgtaaacatgttctgtggggtaatccaggctgaatcttccatggggtggtggcatcttcttaccctgaccaagcctttcctatctcttcacaaaatctttctaccagctgaaatatatttgccttctcacggacgtgtgaaaatgtgactgtctcttggcaacaggctgagatttgcatctgtttgggagaccaccctgagctcctttggacttcatgtagactcattgctaatctacctctcaggtaccctattagatactttttccccaaacatattgtccttccagactacattttgggaaggtaaaactctgctcttgaatttacaaatctagctgaaatttctctgcttttcccctctgggaaacaataggaaaaagagagcagcttacagagaatttggagttttttcagacttacatcaatgctcagaatctattgctcttgcttctcctcaccttgccctaaatgcaccttttttcttcaggcttttgtatgtttttctggtgtgggaaaacacactggttgcccctggtcatggatatttacaaaacttttctgcttcagccggatctacagtagggaaaatgtctttggatgttttgctaccttagcaatctacttgtaacctggcctttgattgtgctggacaagttggttgaacgagggcctgtcaagctgttcaggagaggctggggcccagttttatgccaactgatggctctgtagtcttccctgagtattgtgctttccttttgttttgtttgtttttacattaagctacttacacaggcgtggctcacgaaggaaatgaattaacttggatcttggaggtttgaaagctaattacagggaagtttgaggatactgcagcagccttagccactctgcccacctggtcctgtcatgctagtataatttggttcttctgtcaactttttaagcacagattgctaactaggtagattaataatcattcaaaatggaatatccctattgggctgctttcaattcagtcacagttttctggtataatcatctaacaccagaatagctgagaaaactacctgtagcagcttccctcagaaaggggaacagaaactggttattattttgaaagcttctggactacccccagaaactgtgatggtggaaaaatacaagcttttttgatctgtggaaacttctcctcatcctggcattctctctctgtctctaatacacacacacacacacatgcacacacacacacagacacactccttcccatgtgtttaagcaata

SEQ ID NO: 1822 - DNA, 2100 bp, Homo sapiens
  misc_feature (1)..(2100): DMR12:20139601
ctacaatattgggcatatgtggcctgcctggctcaatgtggtggccctggattgagcactagaacttaagtgttatcacgcagcccaggggtttatttttttatcttaatttgggcaatccttggcccagaaaagaatccagaatgaaaacaagcagagacttgaggtttattataatttgacttgtatgatagaaatacaccgaatttttaaaaacgtttagtaattcaagaaacaacagcaaaaattatataggaaggaatactagttgcaagaaaatgtagcccacactctagtaatgctttgaaattcaaagaaaccagaattatcctggactctgatataaaggagaatgaatgttttttccaaacttggattttattggatgcatggactggcacactttctagatggtccaagacctaggagccaacactgcatctcatgaaaaggcaacatgtttatgataaaatgcagcctgaactaagaaatagtgtaacttatcatgtttcttaaatatttagggagcaatagcataaatatttcagtgaatatggctatagaaaaatgcatgaagaggccaggtgtggtggctcacgcctgtaatcccagcactttgggaggcggaggcaggcggatccccaggtcaggagatcgagaccatcctgggtcacatggtgaaaccccgtctctactaaaaatacaaaaacattagctgagcatggtggtgggcacctgtagtcccagctactcaggaggctgaggcaggagaatggcttgaacctgggaggcagagcttgcagtgagtggagttcacgccactgcactccagcctgggcgacagagcaagactccgtctcaaaaaaaaaaaaaaaaaaaaaaaagaccaaaaagtacatagaaaactctatcacaatgtgactttttctttgtggaaaataaaacaggacaataatttttaagactgttaatatatacaccattgaatttgcttcccaaggaaatcaaaaggaatagaatggcatgttagtgaaataaaatacattagaagaaagtaaataaagaataaatatgttagaataaagcatagaacaaggcctaatgcaatgtgttgcagggaaaaataaaaagtgtgttgaaagaaaaaaacagaagaaatataagaaatttggcaagtaaaagacaaaagagattattgaaaataaccttctaagtcctcatagagagattaagaattttctctgaagataggaacccatggggcaattggactgggttggtttcaaggtgaggccttgaagaaaaagaggaacaatgattgtgagattatagagctgggagaggtttgaaatatgagtcacgttctgctgacacctctccttgaagctgatgtggtgctgtcataggcgtcacatggaaggggctctctggtccctactcataaatcacagaatacatcgttaataatatcccccagaacatttaattaatacctagtacatgtcccactctatgtcctggtcttaaacttcattacttactaccctatttttacctcagcttcatactctggacttaacagttacagtaaagctttggctttgaccatgctctgctctccacgcttgatccagtccttggtaccctcatatcatgacacacgcccagctgctcgtggctagccccaacctactttgtttttgtcctctgaacaagacttacaaaaataagtgcaacctattgtgaagctaaataaatgaagcaatgtagacgttaggtagcttaccaaagctactcacctttgggccatttctactttctctgattttttttttttttttttttttttttttttaaggctgaggcgtgcagaagtgtctcctcttaaacatgttccccatcagcacattcagctggtgagcagactatcctggtccaattacatccattacagttattttctcaccacaattttcttttctttctttctttcttttttttttttttttgagatggagtctcactctgttgcccaggctagagtgcagtggcgtgatctcggctcactgcaacctccacctcctgggttcacgccattct

SEQ ID NO: 1823 - DNA, 1400 bp, Homo sapiens
  misc_feature (1)..(1400): DMR12:20593101
agtgattaatttggtgtcagtttgagaatgaagctggaatgtttttatatattaaagttgaatcttgataatcaatactaaataaaagaaatgaagtggtaggcagaagtaacaccataaaccaaagcatagggttgtggcatcatatctgtaaagagaatccaggttagctggagggatgaggcattagtagagcacgtggagatgtaactggaaaagggcggcgggttaaaggttaaatgttaacacacttaaagacaaccaagaagttgaatgttgttccctaacttcgcggagccctgaagtggcagagcagcataataatatctctgcattgggaaaagccaagtttgtggcaggaagaaactagaagaaaaaaatattgtagccatcctcgtgtgatataatgagagatggattaaagcagggatgagaggctttttaaggaaaaaaaaaaaaatgtcagtcttgcatgtaaatttccagatccactgaccaatttgatgttgaaggtaagaaagcaaagaataaatacaaataaaacctaagagtcaacgtgtccagttttggttagtgattttggttttagccaagtaggaaatacatgaggaaaagatttccaaagataaaatattttcttttggaaagttgagtgtgaaattgctttggaatatctgagtggagctgtccagaagctcgaaggagtggtcagtgttggaacaacagattagcgggtactgtattcattataacatagggtgagggctgggagggaagggcacagattaatgtggataaaaataataaaaaggaaagcagacagtgagtttgttctcaggctggaaaaaagctaggccagaagaagaggagatggctgtgcctgaggtgctaggcttcagtaatgtctggtggtgaagcaagaaaaagccaggaatgttgtcattagatattttgattaagatatttattaatattgatagagaattagtgagagcagaactctctttaagggctttcaaaatgttaatagattataattttttaaaaaatggttagctccttagagatggggtcaaagaccctaattttgttagtagaggataatgctaacaatgtttttaagttgcgaggaaaaagcgaggaggaaaaagagaatgaataagaaatgcactaattaaaacaaatatgctgtctattagaaggatgaaattaaaagtacagtggtaggagactggtattaaccaaaagaaaaaatattatttgctcattgaaacaatagggaggaagtcaagaattaagaagtcctttctatatttagaaattcatatgaagccgaattaaagtcctcaataaagattggatagcttatttttgtatattttctgccaagaagaactgga

SEQ ID NO: 1824 - DNA, 200 bp, Homo sapiens
  misc_feature (1)..(200): DMR12:25033301
ttcctaacacacatcatcctgtatgataattatttgtttctgaatgtgagtaatatgctagtccaggatccacaggagccactcagataacaaaaatgagtaaagctaatggaatatgcacgcatctacattatgcaaatggaaaaggagataagtgcattaccgatataaaggcaaaggggttactctgtttagctcca

SEQ ID NO: 1825 - DNA, 200 bp, Homo sapiens
  misc_feature (1)..(200): DMR12:25463201
ttttgttggctaaaagagtgtgttctatgtggccaccccgtctctcttcagccccagagggagaactttggaagccagtgcctaaattcctccaggcttcacctggtttgtctttttcccttgcgaggctggctgtatatcttatgcttgataaaccatagctgggatcatcttgcctctgagccctatgagcccttcta

SEQ ID NO: 1826 - DNA, 300 bp, Homo sapiens
  misc_feature (1)..(300): DMR12:26203701
ctcaggctgctataacaaaataccgtagactgggtgacttaaacagcaaacattcattttctcacagttctggagacgggaagtccaagatcagggtgtcaacatggtcaggggctagggagggttctcttcctggcttgcaggcggctgccttcttgctgtgtgctcacatggtcttttctcagttcatgcatgtgaagagaagaagagatctctttctcttcctcttctcatgaatcctccagtcctgttggattaggaccccatgcttaggatcttatttaaccttaattacctcct

SEQ ID NO: 1827 - DNA, 300 bp, Homo sapiens
  misc_feature (1)..(300): DMR12:28283101
ggttactatagccttgtagtataatttgaagtcaggtaatgtgataccttcagatttttcccttttgcttaggatttgtttctttgagctttttttttggtcccatatgaattttaggatttttttttttttttagttctgtgaaaaatgatgttggtattttgataggaattgcattatatctgtagattcctttggggagcatggtcattttcataatattgattcttcctatccatgaatatggtatgtttttccatttgcttgtatcatctatgatttctttcatcagtcttttgt

SEQ ID NO: 1828 - DNA, 300 bp, Homo sapiens
  misc_feature (1)..(300): DMR12:31068601
ctcatcgtggctttgagttgcattttcccagtgactgggatgtcgagcatcttttcatgtgcctgtgggccatttgcacatcttttacggagaaatatctatttaagtattttgccaatttttttaatcagattgttttcatgttgctgagatatagaagttctttatatattctggttattaaccccttatcagatagatgatttacaaatacttgctcccattctgtaggttgccttttcactctgttgatcctgcccttcaatgcacagaagttgtaacttttgttgttgtccaatt

SEQ ID NO: 1829 - DNA, 400 bp, Homo sapiens
  misc_feature (1)..(400): DMR12:31070001
ggtcctattattatctttattttattcgtgagaaaagcagagactcagaaggcttaagtcataggccaaggtcatccagccagttgaatggtggagtggggaatatctggatccaggcagtcagactgtttttttttgtttttttttttttgagacggagtctcgctctgtcacccaggctggagtgcagtgccgtgatctcggctcactgcaagctccgcctcccaggttcacgccattctcctgcctcagcctcccaagtagctgggactacaggcgcccaccaccacgcccggctaattttttttttttttgtatttttagtagagacggggtttcaccatgttagccaggatggtctcgatctccagacctcgtgatctgcccaccaggcagtcag

SEQ ID NO: 1830 - DNA, 200 bp, Homo sapiens
  misc_feature (1)..(200): DMR12:31139801
cagaatggcatggagaaatgagaagaaacacacaccaagtcaactccaggtaagagaaagtctagcattgttaaaaatacaaatcatagttttcggactcaacagttcccagtacagcacacagggaaagggcttggactgaatgggcctggaagtggaagcttccaaaaaacatggctaaggggaaataatcagatcac

SEQ ID NO: 1831 - DNA, 4200 bp, Homo sapiens
  misc_feature (1)..(4200): DMR12:31225001
gcacacttactgtcatctcccttccttagtcctggaggtggtctctgctgtggctctgcatgccaccaatgctctctgaccatctctaacggcagcctttgatctcaaaaatgccccagcctctaagtaacccatggcagtatgaagccaacaatgaggaatttcttccgagctctctcctggagatggggtggcgggagggcatgcctgcgactgagataactcccaaagcacagcagggaaggaagaggagaacaatgaggaagaaagggagctgagaagggaggggaagcagacaggagatgaggcggtgcatggaagagagcctggtgccacccccataggctaccctatcacctcagtccctcccagcatccaaggcccttcctcagggctgctgtgcctatcacggccactaacctggctgctccctgagcctggcagccaacaatcacacagaagaagtccaagagcccagctctgcacaccttcagcactcctgtcacagcagcgggaaagggttctggtgtcatggacctggtgccttgagccaacctgggatgggcaatgtctgtggccactaagaagctgacctcagcatggtccggctgggactagaatgggagcagagacggggcttctcgagtctatctgtgcggtgggaaggtcttcctgtgtgtgtggctgcaggtggatctaggaaagggggataaaggccctgccttcagggcaccccaactctactggggagactcactctgacacatgaagcacaccagacatccaagaggcacatgaaatggtgagacatgacgggtgaatacaaaaagccaggaactccattctggaaaaacaggactgatggcattggatcaagtctgcaaaatcacaaaggacaataaagagaactgacacagacctgaaacagaaccccaggcatcccttgaagctcaaaagaatgatctaaggacaaataaacggcagttgagttttacacaacgggcaaaggcaaggagttccttaccgtggggatgacacaggataaaacatggctgagaccaggagaactcagataaactcgtgggagaaccacaatgtgctgtggaggggagcaggcatgcgggtacactcctgacctccacagacggcccctaccaccaggcctgatggagctgcctacctagcatgggtaggcctcattccttcagagaaatggaagaaattttaatttctttaaaataaaatcctttaattttaagagacttaaaatgaaaacctttaagccagccctgcccttgtgtgtgctgagttccagaaccaggcactgccagtgagcagcagagggaatgcacctgcctaggctggaggggagcagggcctgggggtgtgggtggtgtttgctattcttcccaggatcactgagcacctaggtgagctgagctaccggagtccttggaaagacccagtgcccttcttcttagggtcaagaaggaaggcacaaagagggagagaggctcagcagaagaggcccctaagctcccaaggcaggctgctggatgctgagagatgaggccaccaggtcaactgccctaggaggggaaggggaggggagagccctggcaaggaagcccccaaggctactgactccacaggaatcatctcctgagcctggctggggtggtgtgagcctagtgaaccacacgcgctcctttctctgctactccagcaggaactggccgctgtgaaccctcttcccacattagccggctctcacactgtgactaaagagaccagccaccacatggtcccggttacaggggcagctggggccttgccatctggcaggacctgctgccactggcgctcgctgtctgtgagcacagggtctggtgggcaggaggtgactggagggcatgtcttcccaaaggagagctcgccaggccactcctcagaggccccagcccacaccaccagctgcctctgctcctcccaactgtgcacctcgtgccatcgagggagggctgggacccagctccagggctgcggctggcagagaaggacctggcctcctgcccactgggacagagaggtagcgggtgggaattctaccttcctcacctcccgagatgtccacaggctttggggaaatggttgaggggctttggaagttcagggaaagaaaaggaggcccaggaagaggatgaggccagcctggacttgttcatccacagggaccagggtccatgtggctgacagtctcttggggaggggacgggactctgggtcaagaagcctaagtcatagacatagtcatctccctgcctctgcgcagactgctggggtcaaaaacagcatcacgtaagcaccctccaccttggagtgcactgtttggggcaaggtgcccccagacaggccctgttgctaacacttacacccagcagttccgatggacaagctgtaaggacagcctcgccccaggtgccaggcaccagagaacttacaactgacagccaaggccagctggtaagcccttggttcccagcgagagagcctgtgagcacagtggagcctcaggacagcacgatcagagctggcttctcaaaggcggtgcccttgagctcagtcacctctcgcccctttgccgcccattgctggcacctggcttgggctctccgtctgcccaacagctcacttcagaggaaacaggaaaccaacggggccttcgctgccctcctcagccaaacccatgcaaggccagcccatggaaagggagccagggagggtgagagtggaggggcagaggcctggctgcttctcctgctgtgatctgggcacacactaagctgcttagccaacagctctatctcctgggctcagggctcagccatgtgaggaggaagggatcagtacagccctgaggaagagtgaggacctcaagtcagccagagctggtgccccacaaactgctgtggaacgcgagcaacttacttaactactctgagcccccttatgtgcaaaataggaacaacaaacaggagctcccacctcctggggttgtatcggaaattcagtgaggtggtaaagcaccccgctccacgcctggcctatgagagatgctccacaaacggtggctgtgatggcagtggggtcaccaccacatgatggctgagcccagcagacaataagacatggaaatcaaccactgcgcagccactcgcaacaaggaagaaggtggaaaagctcatgagaaacaaacatccttatgacaggcttgcagggacgcctctgtattcagttatttttttctgctttggtttttgtgtttgtttgtttgtttgtttgatttcctgagatggagttttgctcttgttgtccaggctggagtgcagtggcacaatctcggctcaccacaacctccgcctcccaggttcaagcgattatcctgcctcagcctcccaagtagctgggattacaggatgcccggctaattttgtatttttagtagatatggggtttctccatgttggtcaggctggtctcgaactcccaacctcaggttatccacccgcctcagcctcccaaagtgctgggattacaggtgtgagccaccatgcccggcctctgctttggtttttaagactcaacaatgatagcctccttcattcccccaaatataccacccacaccccagctttctcaggctgattcagaggctgtgctacgaggcctctggggacccagttctccacagaactcctggctgaataccctgcctcagagtccctctaggacaggcccacacttcacttctgcgcaattgggaatgtgcgtgaggtacgggtgcggccgccatagaaggaaaggccccgggcctgggtcaagcccagcgactactggagccccttgttcgtctgttacatcctctgctggcaggcaaaggggaaagaaaactcctggccatcggggcacccagattctactctgggctctttccagaactggccatgggagcttgggcaggctgtgtcgcatgtctaggctgttgctccttatctgcagaatgggagccgtgctcactggtggatggaggaggggacaggggacagactgggtggcatcccagggctccaggcattggacagaaggcatgtccagggcctgggccatgcccaaaacaacctagagcagggcaagtggcag

SEQ ID NO: 1832 - DNA, 3100 bp, Homo sapiens
  misc_feature (1)..(3100): DMR12:31870401
cccaggctggagtccagtggcgcaatgtcagctcacttcaagctccgcctcccgggttcttgccattctcctgcctcagcctcctgagtagctgggactacaggtgcccgccaccacacctggctaattttttgtatttttagtagagacggggtttcaccgtgttagccaggatggtctcgatctcctgacctcgtgatccgcccgcctcggcctcccaaagtgctgggattacaggtgtgagccactgcgcctggcctattttatttttatttatttatttttttgagacggagtctcgctctgttgcccaggctggagggcagtggcgtgatctcggctcactgcaagctctgccttctgggttcacgccattctcttgcctcagcctcccaagtaactgggactacaggcacccaccaccacaccccgctaatttttttgtgtgtttttagtagagacggggtttcactgtgttggccaggaaggtctcgatctcctgacctcgtgatctgcccgcctccgcctcccaaagtgctgggattacaggcgtgagccaccgcgcctggccattttttttttttttttttttgagacaaagtctcattgtgttgcccaggctggagtgcagtggtgcgatctcggctcactgcaacctcctcctcccgggatcaagtggttctgcctcagcctcccgagtaactggaattataggcatgcactaccacacccagataacttttgtatttttagtagagacagggtttcaccatgttggccaggctggtctcaaacttctgacctcaagtgatcctcccgcctcggcctcccaaagtgctgggattacaggtgtgagccaccaggcccgaccaatgctaggtctttgcagtgggtctcatatcattccacgtacactgaggcgcacttgttgccagagaccaaaaactttactgagcaccctttcacccccagcgcccacttggctgggtctatttccaattcttttagtctctggggctgatgaaatgaagatgggagggtagggcaagagaaacaagaagagctagccaagaagatagaaaataatgattttcagctcactgccacctccacttcccgggttcccgcgatcctcccaccacagtgaagtggtgtcatttgcctgggaaaatacccaaggttcattgtctcataccaaggaaatcgaagacacggacacacaagagatgagtaagagcagaggcttaataggcaaaagaaagagaaaagagaatagctccctctcctgcagagagaggggtgcccgagtgggtcttccagttccatggtgaggtgcacgggttttatagactggcttgaggaggcagtgtctgatttacatagggcccaaagattggttagaccaggtgtgacgtttacatagctcacgaagaagctggccaccccaccttaatcttttattatgcaaatgggttttctacctggccagagccatgttgcctgttccttactggacatgtggttgacaaagaaaagggaagatggagctgccatgttgaacatgcctagcccccaggtaaccttttcctattgtcacagctgccggcattcacccatgcaaggttccagcttgcttatctatgtctgcagctcaattttacaggctgactttttcaaaaagaaatgacttggggactgcttttcattaaaaggaaaaccttactgaggactttcttaccctcactatctgcctaaatcatttctttttaactcctatatcaatagcctcccaagtagctgggactatacgtgtgcgccacgacactcagctaatatttgtattttttgtagagacagggcttcaccatgttgcacaggctggtcttggaactcctgagctcaaagtgatctgcctgccttggcctttgaaagtggtgggattacaggcatgagacaccatgcctggccttcaaaaagttaatctaaaaatatatatacatatatcccagaaggagaagcagaagggtcagataggtgagaaccagggctttgaatatcagaaaaaccaggaagagataatatgtcaagtatggagtgatcaatactctcaaatgccgtaagaggatttgtgagcaattgagaaagccatgggatttgttcattagaatgccactgtgaggctcaactgatgaatctcagtagggtggtgaatgtaaaggctagactatgggaggttatggggctgggaggttgagagaaggaaaatcatattttatactgttcctgagacatttaatgaaggaaaaaaaggaaacaaaaaagcaacttaaaggttaagtcccacaaatgaattcttcaagtgaactgaagagtagcaaaacatgccactccaaacatgccactttggcatattgattattttgagataaagacagtgaaaggaagggaaatgggatacttccctgattccccttgcaggacgtgcaacagaagtgtagctcacctgttcagttgcctcactgcttaatccccttgtgagacagagagcatgcagacaggcaggtgcagaggctggggtgagcgctctggggtctggcccggctgtagtgtctaggagtggatgcctgcagccccagcgttacaaagctttcagcttggccgcccgaagacagcttgaatgttaaccagcttaatggaccttttgccttttcacaagggcagagggccaacatgatagcttgctgtatcccgagctcttgttcagcgtcctggaaaaatcaggtcacacacggactcaaaggatgaatgcgaggttttattgagtggtggaggtggctttcagagggatggatggagagccagacggtgggtggatggaatgggaaggtgatcttcccctggagtcaggccgcccagcggctggactcctttcctaccgcccccagctgaactcctcttggcatccagacgtctctcctcttctctctttccctgctgtgctgttccaccgtccatctgctggtatcctcctctactcacctgctgctctgctgtggagcttggggtttgcggtttacgtgggggcaggatagagggtgtg

SEQ ID NO: 1833 - DNA, 400 bp, Homo sapiens
  misc_feature (1)..(400): DMR12:33520901
gcagggcagggtgtcgcctcacctgggaagtgcaaggggttgggggatttccctttcctagccaagggaagccatgacagactacctggaaaaacgggtcactcccgcccaaatactgtgctttgcccaaagtcttagcaaccggcagacaaggtgattctctcccctgcttggctcagcgggtcccacgctgacagagccttgctcactgctagtgcagcagtctgaaatcgatatgtgaggctgcagcctggctgggggaggggcgtccaccattgctgaggcttgagtaggtaaacaaagcagctgggaagctcgaactgggtggagcctaccacagctcaacaagtcctactgcctctagactccacctcagtgggcagggcatagctgaacaaaa

SEQ ID NO: 1834 - DNA, 700 bp, Homo sapiens
  misc_feature (1)..(700): DMR12:35799001
gaaaccctctttttgtgatatttgcaggtggagatttcaagcgcttttaggccaaatgtagaaaaggaaatatcttcgtataaaaactagacagaatcattctcagaaactactttgtgatgtgtgcgttcaattcacagagtataacctttctttgatggaggagtttggagacactgtctttgtaaagtctgcaagtggatatttggacctctttgaggccttcgttggaaacgggatttcctcatataatgttacacagaagaattctcagtaacttatttgtggtgtgtgtattcaactcacagagttgaaccttccttcagaaagagcagatttgaaacactctttttgtggagtttccatgtggagatttcaatcgctttgagaccaaaggtagaaaaggaaacatcttcgtataaaaactagacagaatcattcacagaaactactttgtgatgtgtgtgttcaactcaaggagtttaacctttcttttgatggagcagtttggaaaaactctgtctgtaaagtctgcaagcagatatttggacctctttgaggccttcgttggaaacgggatttcttcatagaatgctagaaagaagaatactgagtaagttctttgtgttgcctctattcaactcacagaggtgaactgtcctttagacagagcagatgtgaaaccctctttttgtgatat

SEQ ID NO: 1835 - DNA, 1500 bp, Homo sapiens
  misc_feature (1)..(1500): DMR12:37051401
tcgtataaaaactagacagaatcattctcagaaactactttgtgatgtgtgcgttcaattcacagagtataacctttcttttgatggaggagtttggagacactgtctttgtaaagtctgcaagtggatatttggacctctttgaggccttcgttggaaacaggatttcctcatataatgtgacacagaagaattctcagtaacttatttgtggtgtgtgtattcaactcacagagttgaaccttccttcagaaagagcagatttgaaacactctttttgtggagtttccatgtggagatttcaatcgcattgagaccaaatgtagaaaaggaaacatcttcgtataaaaacaagacagattcattcacagaaactagtttgtgatgtgtgtgttcaactcaaggagtttaaactttcttttgatggagcagtttggaaaaactctgtctgtaaagtctgcaagcagatatttggacctctttgaggccttcgttggaaacgggatttcttcatataatgtttgataggagaagtctcagtaacttctttgtgctgtgtgtattcaactcatagagttgaactttcctttagaagagccgatcttaaacaccctttttgtggaattagcagctggagatttcaagcgctttgaggcttacggtagaaaaggaaacatcttcgtataaaatctagacagaatcattcacagaaacttctctttgatgtgtgtgttcagctcacagagtttaacctttcttttgatggggcagtttggaaacacactgtttgtaatgtctgcaagtggatatttggacctctttgaggccttcgttggaaacgggatttcttcctgtaatgttcgacagaagaattctcagtaacttatttgtggtgtgtgtattcaactcacagagttgaaccttcctttagacagagcagatttgaaacaccctatttgtgcagtttccagttggagatttcaatcgctttgagaccaaatgtagaaaaggaaacatcttcgtataaaaactagacagaatcattctcagaaactactttgtgatgtgtgcgttcaactcaaggtgtttaagctttcttttcatagagtagtttggaaacactctgtctgtaaagtctgcaagcagatatttggacctctttgtggccttcgttggaaacgggatttcttcatagaacgctagaaagaagaatactgagtaagttctttgtgttgcctctattcaactcacagaggtgaactgtcctttagacagagcagatgtgaaaccctctttttgtgatatttgcaggtggagatttcaagcgcttttaggccaaatgtagaaaaggaaatatcttcgcataaaaactagacagaatcattctcagaaactactttgtgatgtgtgcgttcaattcacagagtataacctttcttttgatggaggagtttggagacactgtctttgtaaagtctgcaagtggatatttggatctct

SEQ ID NO: 1836 - DNA, 300 bp, Homo sapiens
  misc_feature (1)..(300): DMR12:39280701
aaatgctcaattaaaaccaaaaacgacagaaaaagagcaaaagaaaaaaaaaagaacaaataacaagggcaatgaatagaaaatggtaacaaatatggtagatattaatccaactatatcaataatcacattaaacatcagtggttaaaattggatcaaaagacctacttatatgttgctatgaaaaactactttaaatgtaaaacatacaataaaagtaaaacaatggacaaagagataccttgttattactcatcaaaagaaagtgtaagtaactatactaatttcagtgaagtcttc

SEQ ID NO: 1837 - DNA, 200 bp, Homo sapiens
  misc_feature (1)..(200): DMR12:39698301
ttaaatatatatgcacccaacactgaagcacccagatacataaagcaaatattattagagtgaaagaggaagagacacactcccaatacgataatagttggagacttcaacattcctcttttcagcattagacagatcttccagaaagaacactgatgaaaaaccagacttcatctgtactatagatcaaatggacctaa

SEQ ID NO: 1838 - DNA, 800 bp, Homo sapiens
  misc_feature (1)..(800): DMR12:40633401
taatggaaaattatattggccaaatgctcattcaggcaagaccagcaaggagccagacatctcagaataaagatttggatcaacgtgcagacaaaacaaacaaaccatcaagcaaaacaaacaaaactaatcagctaaggcgttgggcaaagaatgtgatgtaggtcatagctatacatagttctatctgtttatgtgatgtatatatctctacctactagttaacttttttcttctcttcccttccttttctttttttatataggatttgtgtgtgtgtgtgtatgtgtgtgtgtgtgtgtgtgtgtgtgtgtaagacagggtcttgctctatcatcctggctggagtgcagtggtacaactatagctcatagcatcctcaaactcctgggctcaagtgatcctcctgccttagactcctgagtagctggaactgggattacaggcacacaccaccacacccagctaatttttaatttttttttgtagagatggagtctcactttactgcttaggcttgtctcatagaatgtatcatcgatgttaaatttctaatttaatttatagctttatacataagagaacaatctaagctgctgtagaagagagtctaaaatccagtagcttaaggtaaaggtttatttctctttcatataatagttgggcttatagtctagggcttgatggtggcttgagccactatcagagatccaaattcttctactgcttgctctcccattcctagaatgctttccctgcctgaaatgtcaaagatagttgaacctcacatgcatatttca

SEQ ID NO: 1839 - DNA, 2200 bp, Homo sapiens
  misc_feature (1)..(2200): DMR12:42888001
aggaagaatgaagagacagggagttgtgagcaaagaggaggatgtgaaatgggttagaggagggggcaaaagactggagaacaggtatgtaaagcaggaagaacatttgtatggaggaggtaaggtagcagtacaaaactgggattcatttgttaatattaactttgtccaagacttttcagggtcagtgttttccctggaaatacatttgggagaaaaagaaccaatagaatttttttttgggtaatattattgtgttaatatttattgaatatcttagttacactaggatgttattattaacttcattctgtaatgattgaagttaatttgggtaatttgagcaaggctccataaacaattactgacagttacaaacctaggtataattattaatttcagatgaatgtgtatattgtaacatcttttctatgctggcttatgggatttatgctctattttaaaaatagttttagatatttttattttttctaacttttcttttagatctttgcttttaggggtacatgtgcagatttgttacctgggtgtattgtgtgatgctgaggttaggggtatgaatgatcctgttacccatatactgagcatagcacccaatagttcatttttcaaacctttccctgtccctcctcactctagtagtccctagtttctattgttgccatcttcatgtacataagtatccactgtttagcacctacctataactgagaacacgtggtatttggttttctgttcctgcattaattggctttggataatagtctccagaggcatccatttgcttcaaaggacattattttgttcttttttatagctgcatagtattccatggtacacaagtaccacattttgtttatccaatccactgttaatgagcacctaggttgattccctgtctttgctattgtgaatagtactacaatgaagattaactcaagatggattaaatatttaaatgtaagaattcaaactgtaagagtcctagaagaaaacctagggcattctggacactggccttgggaaagaatttatgactaggttattaaaagcacttacaacaaaaacaaaaattgacaagtgggacctgattaaagatcttctgcacagcaaaagagactatcaatagagtgaacagacaacctacagaatgggggaaaatattcacaaactatgcagccaataaaggtctcatattcagaatctacaaggaacttaaacaattgaacaagcaaaaaacaaatagccttattaaaaatgggcaaaaagacatgaacagacatttctcaaaagaagacatacaagtggccaataaacttatgaaaaaatgcaccacatcactcatcatcggagaactgcaaatcaaaaccacaatgagataccatctcacaccagtcagaatggccattatgaaaaagtcaaaaaataacagatgctggagaggctgtggagaaaaaggaacacttatacactgttagtgggagtgtaaatttgctcagccactgggaaaagcagtttggagatttctcagataactcagaactactatttgacccagcaatctcattactgggtatgtatccaaaaggaaacaaatatttctacccatagaatcttaaagttgaaaagaattgtgaagtctgacagataaaagcaatttaaacaggcaagaatagtttgctatggatgtggtgggaaaatttgtacaaaaaaagcaaataattcaataacagccccattcgttgagcccatactatataaaagtcatctatatttataaactataactaagatgcagtactttttaaaataaaccttcttatcttttattggtaaagcagataacatgttattagtaatgtggttattagggacatgaatagttttctttctagaaacaatattggtgtgattccaaagaacaggaatctactcaatagcattatcaaaatatagtcattgaaaacctggaacttctattccatttttggacagttgtagggctacagactcttttttatgctgaacctaattatgcctcttttctgttcattcattgcagctcggttctttggagtgaaacagaataagcctcacccattttaggtatttgaagaaagctgtgcatccatataagtcttcctcatatggcatggctcctttcccctcacattcccaa

SEQ ID NO: 1840 - DNA, 900 bp, Homo sapiens
  misc_feature (1)..(900): DMR12:43629701
ttcttttctgtgatggcaaattatcttaattcatttcaagtatgttcttctttcttcataaaacctacttgtaataactgcattaaaatatttgattattccaacatctgggttatctaggaaaactgtttatttttttctcttgataactgtccacattttcctggttttatgctgaataattttgaattgtatcctggacattgcaaatgtcatgttgtgtagactctaagttctgttataatactctggagaatgttgatttttctttagcaggcaatcaacatggctaggttcagatcacaaagtctgtctcactttctttgtgtggtggttaaaatctcagttcagttccaaaaacacttagtccacttgtttgagcttgtctctcgcatccatgaataataagtgaggctgaaacatctgcaggttttacatagaatcaggggattctcttttctggttctctcttctctgagattctctcctctctccagcccccagaatcttctttgttggtttctctggttggaagacgagcttcctatcgaagttttaattatgcatccactgctgatgcgctgctctgtgactggggctcacccctggggcaaagcataagggaaaaaaaaatgcaaaagataccttgtacatttacttttgactctttgtctcctacttttgtttatttttttacagtcctcaggtagtttctttttgtttttgtcaagatccttttgttgtaattagttggaaatctggtttctagtgggctcttgccattatgctggacacagaaaattcttccttaatgtttaagtcactgtttctcaaactatggatcatgatcatttgtgggtcatgaaattagttctgtgaattgttgattcacattttaag

SEQ ID NO: 1841 - DNA, 1500 bp, Homo sapiens
  misc_feature (1)..(1500): DMR12:45149201
tctgatctgtgccctgcgaggcccatctgtatagactgcatccataagctcactttctcttctgcctccaggtagatttagccaatgggaggaacttgcaagagatcagagaacaagaggagttgacaagttgagttgactcatcaagggatggctgcatccttctcccagaggcagcccgctccacattgctatcctttctaggtgcctctctctgtcctggtaactgttctctcactttgaccctataggccttggggtggcaatggctcccaccagcaccaccaccatggttgctggtcccatcacattacagcagccctctgaagcttccctaaaccttgcccacacctttgttaaccactcttttattacactgtcccaagtcatccagttcgagggtactgtttcctgctctaaccctgacccatacacaaaataaggaagtaaattatatagtaaattgaatgttgataagctttgttgagaaaaacaaagcagggaaagcagataaggagtgctggaccaggacaggtgggtgctttttaaatagggtggtcagggaaagcttcatcaataaacgtgtctaatactgcagatttgtccatcttccagcagacctttcctttcaaaggaaatcttacaaggacctgaaaatttaaaacctggaagagagaaacatcactggttggagcagaggcaggagtagagatgaaggctcagagctcttccccatggcctatttctccctataccctccaagcctctacaaactcatgtaccaccccacccctagcttctgatgcatcttgactggccctagtacttcaagatacacacaaccaaggaagatacaaaatattgtgtttccttttaagcagcaggatctcactctatctcccaggctatggttgcagtggtgcaaccatagctcactgcagcctcctaatcctgggcttaagggatcctcctgcctcagcctcctgagtagctggaattacaggagtgtgtcaccaagcctggctaattttttaattgagaggcagggtcttgctatgttgcccagactggtcttgaactcttggcctcaagtgattctccctcctcagcctcccaaagtgcagggattatagggacatgctgccatgcctggccaatatttggttcttaatcctctccaagttttacattgtatcattccaaagaaacaaaactactccatcttacctttaggaaacagcttttgtagcgccatgactgaatgttatgtcctcatctctcactcactcctgaaaacagaaacggtctcacatatattttgtctttcatctttatttgtaaaattgacattcaggatcctgtttctattttctccatgtcatctatataagtacagatatgataaattatctcagggccaggaaaaagtttgtctcttctgttgaactacaatctttccttctattggacaataagaagtgtgtatttcatcatgttttc

SEQ ID NO: 1842 - DNA, 1000 bp, Homo sapiens
  misc_feature (1)..(1000): DMR12:45279101
acctttcaagtcttttcctaggtagggtggggttgggaggcaaccacttgtctttaagccttgaggaagggaatctggaggtccaactcctcaataaacagacttacgaccattctcctgccctaccttcagtcccacttccagaggagcctgtgctgccagcctcttgagggcttataatttaaatgaaattgcttcgaggctttcctattttagtatttagctttctccaattggctaagtagttgcacttgcctaacacaatgtctccccaaattgtgttactgtctctcctcctctattttctttgtctttattggtttatgttctggtagtacttgaggagggggcagagctaaatgcatatattcagtcttccatctttaaataaagtttcaccgacatgagtttttaattgtttacaaggcatttgatcacacttctgaaacaaatttctgtgtgacctctgagtccccatttcaccgtaattcttttgttacattatggggcgagtacgtggaaagcccctgggtcagtgtttaggacacttgggttccattcccacatttgctacaaactctttaatcctgggcatcctgccttgtcattatttctgttccataagactaaggaattaaaaatgattttaagatctctttttacgcatagatttatttccaagaagttgagataattgtatgtaactgaacaccggaataggaaacagagttgtggcagccagttgaagaaatgtgaagttaagtttctccttgtattttttagtcagtctcagtaattctgacattttcaaagtcaggtaaaattgcaacccacatttcatgaacaagagctgttaaaaggttaaaaattgtggattttttttcctctgggctattttcagctgataacagttcagctccaaagcacacttggattcatgttctcaatagccagataaaatgttagttttgaacagaagaacaggaaagataatagaggt

SEQ ID NO: 1843 - DNA, 100 bp, Homo sapiens
  misc_feature (1)..(100): DMR12:46884801
ctcttttctctcaaatctctctgaccttccctttgcctcatctctccccagcctttctcttgttccgcctctctttttctctttccggacagagaagttt

SEQ ID NO: 1844 - DNA, 400 bp, Homo sapiens
  misc_feature (1)..(400): DMR12:47591501
gtagacagaattcaaattaggaacgtggccaaatagcttttagatgcaacagactatttgagaaacttccagagagaaatagcctgtgctgttagctccttctgggaggagccactctttccagtgtcacaggggccaggaagctcacgcttggaaaccccacagccaaaactaaaccttcttgctgacattccatctcaatttgactcttttatttcatgtccagcccaagactgacaacatgacacacttttgtttttgttccagaaagcaaacaaatgtaaagctttgtacatggagaaaaaggccaaatgtggctattattcctcattaaaacttcaagtgtcaagctctaaacccccaggaagatggtaagcaggaatagctgagagacatttac

SEQ ID NO: 1845 - DNA, 500 bp, Homo sapiens
  misc_feature (1)..(500): DMR12:48813401
gacctaggcgacagagtgagactccgtctcaaaaataaataaataaataaataaaaataaagtggaaggtggagagatggtttctatgctatagtttcaggcagagaatgtggagggagggaaggagagaaggttgcgggaagccagggacaactgcttgcctgggccaacatcccctctctccccacctcccttctcctatggaaacttaagctgccgcagggcccagcggagctagtccattagctgtggtcagcaggggagtgtaggtggggagggccctctctccctccaggtcttcttgccaaatgaaaggcaaagcgtttgctccctctactagagtcaaaacaaaacaaaaccataaaaacctccacacgcatttttaacacacacaaataacataacttctttcctctgaatggtcgaagctgagcaacttggaggtgggtgggtggtaggggctccgtgacccactagactagactacagagggagtgggg

SEQ ID NO: 1846 - DNA, 700 bp, Homo sapiens
  misc_feature (1)..(700): DMR12:50019501
cctcaacatcaacgtgtaatatagtttaaagcaaaaagaacagttaaaagcgggagagggagcagaagtcctgggacaagatgggtgtggtggtgcgtgcctgtagtcccagctattcaggaggctgaagtgggaggatcacttgagtctaggagtttgagaccaccctgatcatcacaagacccccttctcttaaaataaataaataaataaataaataaataaaaaggtcctgggacaaacctttagctcttctatctaccagtagtataatcttcagtaaatcacttaaattccatgactcatctataaagtgaaaacaataacacttgctctatttacctcatagaatattacaaaaattttaaaatgtataagtttacaatctcactaccaaaatataaggtatcttttagttggtatgaagtgagtttcttttgtttaggtttggttttggtctgatagttgttacttccatcctaaaacagtgattctcaaatctaggtgttttcccccctaggctgtctccaaataaggatatcagtaaattcagaattttagaccatttttaaaaataatactatacaattagaaagaaaagaatccagtatttactaggtgctttgaaatgattcgggcactaaactagacacttcacgtacactttttctttaagtgaatttgactttttttctgagac

SEQ ID NO: 1847 - DNA, 400 bp, Homo sapiens
  misc_feature (1)..(400): DMR12:52256301
gggaacagccagagtcaagacagaactggcagtaagatgtgcagaggcaaggggtagaccacatggcccctgctggtctctcctggcctgaggatgcagctggagaatccttgtttcataattgcttattcagggctaagtgagggtctgtccaggtgggcctggatgggatgagcgacagactgagaggcctgtgggctgtgctgggttactgtcaggctagcggcggacagatgggggtagggggtagtgacaattagggaagacttcctggaggaaaggaatgtagagcagtgttgggagggatagagtagggagaatgcctctcactataagctccctcagggcagggcctatggcttatttattgatgtcctcatagccagcccttggcttggtg

SEQ ID NO: 1848 - DNA, 900 bp, Homo sapiens
  misc_feature (1)..(900): DMR12:53285001
actctgactcaaaaaaaaaaaaaaaaagaagaaagaaagaaagaaagataatatttagaattcagtcctcagtcacactagccacacttcatgtgctcaatagccacatggctagtggctaccgtattgagtagcacaaacatatcctcaggagggctgaagctaataataaaacattgcattgatggcacattttgtctccccaatcacatatacttctagtacttcatttgccccacactagacctcataaagctgagtgggagcatagattattttcatttgttaaatgagaaagttgagaagtctatgtttggggccagcatcacagggtaggaggcaggattcaggtgtgggcctgctggggccagcctgcttttctcagccatgtggcccctgagctgcaggtgtgggggctttgtggcctgcatttgatccattgttggttggaaagaaaacaaaaattttacctccaaggcgggcggatcacaaggtcaggagatcgagaccattctggctaacacggtgaaaccccgtctccactaaaaaatacaaaaaattagccgggcgtggtggtgggcgcctgtagtcccagctactcgggaggctgaggcaggagaatggcatgaacccgggaggcggagcttgcagtgagctgagattgtgccactgcactccagcctgggcgacagagagagactccatctcaaaaaaaaaagaaaaaaagaaaaagattttacctaaaaaataataagccatactaatatttgatatgttatacagtaatacatatatatacacacatatatatacacgtacgtatataaaacacatatattagagaattgggccccaaggtcgctcaggaagtgcttgatgccatttctccccgttttgtaa

SEQ ID NO: 1849 - DNA, 700 bp, Homo sapiens
  misc_feature (1)..(700): DMR12:53574901
caagactttagtcagaaaataaagttactctttcttgccattgagcttaagccaaaaaaaaaaaaaaattaaagaaaagaaagctacttggctgggcgtggtggctcatgcctgtaatcccagcactttgggaggccgaggcgggtggataacctgaggtcaggagttcaacaccagcctgaccaacatggtgaaaccccatctctactaaaaatacaaaaactaggctgggtgtggtggctcatgcctgtaatcccagcactttgggaggccgaggcaggcggatcacctgaggttgagagttcgagaccagcctgaccaacatggagaaaccctgtctctactaaaaatacaaaattagtagggtgtggtggtgcacgcctgtaatcccagctgctggggaggctgaggcaggagaatcgcttgaacccaggaggcggaggctgcggtgagccgagattgtgccattgcactccagcctgggcaacaagagcaaaactctgtcttaaaaaaaaaaaaaaaaaaaattagctggtttggtggtacacgcctgtaatcccagctactcaggaggccaaggcagaagaatcacttgaacctgtgaggtggaggttgcagtgagccaagatggcaccactgcactccagcctgggcaacagcgagatgcagtctccaaaaaaaaaaaaaaaatctactcata

SEQ ID NO: 1850 - DNA, 1500 bp, Homo sapiens
  misc_feature (1)..(1500): DMR12:57665701
tgggatgtgaggagcgcctctgcccagccaccccgtctgggaagtgaggagcgcctctgcctggctgctgtgcaatcttccaagtgtgaagtgacaggctttctgcaggtgtacccaacagctccgaagagacagtgactatcgagaacgggccatgataatgatggtggttttgttgaaaagaaaagggggaaatgtggggaaaagaaagagagatcagattgttactgtgtctgtgtagaaagaagtagacataggagactccattttgttctgtactaagaaaaattcttctgccttgggattctgttgatctataaccttacccccaaccccgtgctctctgaaacatatgctgtgtcaactcagggttaaatggattaaggtcggtgcaagatgtgctttgttaaacagatgcttgaaggcagcatgctcattaagagtcatcaccactccctattctcaagtacccagggacacaaacaccgcagaaagcctcagggacctctgcctaggaaaaccagagacctttgttcacgtgtttatctgctgaccttctctccactattatcctatgaccctgccacatccccctctccgagaaacacccaagaatgatcaataaatactaaaaaaaaagaaaaaaaagtaaaaaaaagaagaacaaagctatagaaaaacaaaaaacaacaagaacaaaaagctgaaagaaatgtgcaacaatgaggataccataacctatgaatgacacactgagaccggaaacctaaaatgatggtaactgagaatggcgctaaggccctaagttttggtcacactctcacctaagtgagaacctggccagaaaaggggaattttttaaaacaaaattatggaaggccattattttggacagagctcatgcactaggccctaaccaaatgaaactagaatggagtcacttgtgctaaatatgacacaatcaaactaaggctttaagaaaacacatagatcctagaacagatcaggttttgtttttctcctgtaaacagatgttccagcataaggagataccctctactcagtgcttattctctccttgcaaaacccactattctactgtttcccagtgggtttcaaaaccacataagtacatttacaacagtgacagtaacatcaatgactaaggttttggccaatctctcaaaattgagaaaatgaccaaaatgggagaattgttaaagcaaactaaatatggcctgagaaggactctgtacttccatatttgagaccttgtggatgaactgtaacttagcgtaatagtcagacaaaattgaaaacctaacttaatagtatgcacccgtaacaatagctgagtgctggccaaccactcatagactgctgagtgttcaaactagttcaagtaaggcaaaggcagagctgtaaccaatctcactgtttctgtacctcacttccgattcctgtatgtcactttaacttttttgtctataaatttgttct

SEQ ID NO: 1851 - DNA, 700 bp, Homo sapiens
  misc_feature (1)..(700): DMR12:61326901
gcctgttacccagttccaaagttgcttccacattttcgggtgtcttttcagcaacaccccaccccactctactgataccaatttactgtattagtttgttttcatgctgctgataaagacatacctgagacagagaagtaaaagaagtttcattggacttacattcccacacgggtggggaggcctcagaatcatggcataaggtgaaaggcacttcttacatggtggcagaaagataaaatgaggaggaagcaaaagtagagactcctgataagctcatcagatctcatgagtcttattcactatcgtgagaatagcacaggaaagactggccccatgattcaattgcctcccactaggtccctcccacaacacgtgggaattctggcagatacaattgaagttgagatttgggtgggggcacagcctaaccataccagtcatcattatcaaaaaaaaggggtaaatgttggtgaacatgtagagatattagaacccttacacaccgttggtggggatgcagaatggtacagccactatacaacctctgcagtatggaagttcctcaaaaatttataaatacagatatcatatgattcaacaaccctactccatgtatatatcaaaaaaatttaaatcagtacgttgaagagctgtctgcactcccatggtcactgcagcattattcacaatagagaag

SEQ ID NO: 1852 - DNA, 2600 bp, Homo sapiens
  misc_feature (1)..(2600): DMR12:61462501
attgagacagaaagtcaacatagaaacaatggacttaaactgcactattgaaaaaatagacctaacatgatatttacagaacattctacctaagaactgtagaatatatattcttatcagcatatggaacattctccaagatggaccatacgatatgccaccaaataacacccaataaattttttaaaaatcaaaatcgtaccaaatctcttctcaaaccgcattggaataaagctagaaatcaactataaaagaaacccccaaaactataaggatacatgaaaattaaacagtctgctcctgaatgatttttgaattagcaatggaaattttaaaattctttgaaatggataatagtggcacaattattaaaacctctgggatacagcaaaaacagtgctaagatgaaagtttatagtgccaaatgcctacatcaaaaagtctgaaagaacacaaattaacaacctaatgtcacacctctaggaactagagaaacaagaacaaactgaacccaaaagcagcagaagaaaaaaaataacaaagaccagagcagaactaaatgaaatagaaacaaaacaaatacagaagatcaatgaaacaaaaatctggttctttgaaaagataagaaaaaattgatagaccattagctagattaaccaagaaaagagagaaaagtttcaaataagctcgattagaaataaaactggagacattacaactgacactataaatacaaattatcattctagactaccattaacacctatacccacaaactagaaaacctagaggaaatggatacatttctggaaacatataattctccaagattcaatcaggaagaactaaaaatgctgaacataccaataacaagcaacaagattgaatcagtaaaaaaaaaaaattgccaacaacagtaaaaaagcttagggccagatggattcacagttgaattctactggacatttgtattagtcaaggttctctagagggacacaactaataggatagatgcatatgtgagtttattaggagaactgactcacacgatcacaaggtgaagtccctcaataggccatctgcaagctgaggagccaggaacccagtctgagtcccaaaacctcaaaagtagggaagctgagagtgcagccttcggtctgtggccaaaggcctgaaagccactgactaatcactggtgtaagtctaagagtccaaaatctaaagaacttggagtctgaagtttgagggcaggaagtatccagcacgggagaaagatggaggccagtagacttagccagtctagtctttccatgttcttctgcctgcttttattctgaccatgctggcagctggttagattgtgcccatctggattgagggtgggtctgcctttcccagtccagtgactcaaatgtaagtctcctttatcaacaccctcacagacatacccaggaacaatactttgcatccttcaatccaatcaagtggacactcaatattaaccatcacaacattcaaagatgaactggtatgaatcctactgaaactgttcctaaagattgagaaaaagagaattctccccgaatcattctatgaagccagcatcaccttaataccaaaaccaggaaaggacattaacaaaaattagaaaactgcagcccaatatacctgatgaacatagatacaaaaattgttaacaaaatgctagctaattgaatccaacagcacatcaaaaagataatacaccatgattaagtgagttttatccagggatgtgaggatggttcaacatacacaaatcaataactgtgatacatcataaaaacagaatgaaaaacaaaaatcatatgatcatctcaatagatgcagaaaaatcattcaataaaatccagcatccctttacaataaaacctcttaagaaactaggcatagaagtgacatatctcaaattaataaaagccatctatgacaaacccacagacaacatcatactgaatggggaaaagttgaaaccattccccctgataactggaacacggcaagaatgctcactttcaccacttctattcgacatagcactggaagttttagccacagcaatcaggcaagagaaagaaaaataatgggcatccaaattggaggagagtaagttaaactatcactgtctgccaatgataggattgtatacctagaaaaccctgaagactcctccaaaagactcctagatttgtaaatatattcagtaaagtctcaagttacaaaaatccatgtactcaaatcagtaacacttccatacactaacaacaatgaaggtgaacatcacatcaagaattcaatcccttttacaacagctgcaaaagatataaataaaaataaaatacttaggaataaacttaaccaaataagtaaatgatctctacaagggtactacaaaacactgctgaaggaaaccacagatgacacagacaaatggaaacacagcccatgttcatagattggaagaaataatattgtgaaaatgaccatactggctgggcgcggtggctcatgcctgtaatctcagcactttgggaggccgaggcgggcggatcacgatgtca

SEQ ID NO: 1853 - DNA, 600 bp, Homo sapiens
  misc_feature (1)..(600): DMR12:63079801
cctgatagttgtggtcaatgaaaatacggtgccaacccaatcgaaagaccaccaaagatgcaaatccctcaggcaagtgactctgtttagggaaggtgctagcaaagagtagggtaaacatgaaatgggtcacagaaggcagctgtgatcaccaccttgggtctgtgagcagctgcataagcagggactgtactagctactgtttatgttcatttattctcccctcccctttctctccctgctgactaatgtgaagcatattgatagtggcaaatgttttagattccatgtgggggcacacatgagttaacaacaccatatgctgatatttcacatgttttctatttggaggtacaagctttttacaagatggaggacaagagccaatcctgaggtgcaaaataggttggctgctttctgtttgcctgttcacattccctttctacccctttccaccatacactttgtcttgatatgcataaattacaccaggaagaactctttgtcctctggtgtcaggttcctgttcagtcaatgagaacaggcaaaacatgtgagagagtgaggtctgggtctttatttcctggcttccctcttcag

SEQ ID NO: 1854 - DNA, 1500 bp, Homo sapiens
  misc_feature (1)..(1500): DMR12:63525501
cattgggcatattcataatctttgctcagtacctgccaacatgaaacaggaagaggggtatatttcattgctgtttagatttgaatttctttgactactagtgaaattcaacagttttctctctattttttctcccctcatgccacactatggagattttaaatggaggccatattattaatactagttcacgtctccatttgctatcgtaggaccacagtcttttttttttttttttttttttttttttggagatggagtctcgctctgtcacccaggctggagtacattgccacagtctcagctcactgcaacctccgcctcctgggctcaagcgattctcccacctcagcctccttagtagctgggactacaggtgcaagccaccacacgtggctaattttttgtatgtttggtagagacagggcttcaccatgtttctcaggctgctctcaaactcctgagctcaagtgatccacccacctcagcatcctaaagtactgggattactggcgtgagtcaccgtgcccagccagaccacagtccttttaattgtgcccatatatatctcacatgagaagagacacaagccctgctgactaccatttggcatctgccaatttcttctttctcctgacctggcttccttcaaagatatctgcagtctccactgcctgaaaaactgcatgtagggactttgccattaactcaggtgtccagaaaaaggaatagcaatattatttgggctccaccaatattgttgggctccactctcaatccagggaatcaccttcctccgtaagttactgctgccacctccactgggtaccactcagtctatttatatgagaggtaggcttgctattgctgccacttctgcatggaaccactacctttgctggtcacactgataccgatgccctgaggccagagatacaaaacttcaaggtatttcatagttaaggggcagaatcctctgtccatttctattgaataatatataaaagtagcggtgctgagccccttttaagaaaacagcctctcagtcatcatctacattgttctacctcctcccagctgcatgcattatgttatgaatcagacagaaagctttggggagaaaaacagagacctactcatctaagcagtaattgcaatgctcagaattgcctcttccgcctccaatgactctttttgttttgtattgatgcttgcctgttctcttccctcaagacaagttctcactccttccttccctgagtctcctcaccttcacataaatggatattggttgactcacttcttcaacctgccaggtatttctaaatcccaatggaaatcatttaggtataagctagacactcctccccaccatgtcatgtatttatatagtttataaatgtattggtcattgaaatttctttttaaaattatttattattgatacatcataactgtacatatttttgtgggtcatataataatttcttatattcatac

SEQ ID NO: 1855 - DNA, 800 bp, Homo sapiens
  misc_feature (1)..(800): DMR12:68153301
cactgtcacttagttacccaataatcaaaataatgacccctgattattgtcaatgactcaaatgatcctttgtgtgatctatttcacataatcctactgttgctgttggaggtttatgtgaaattgttgagaaggaagccccagatgtctaaccctctctatccttgacattcatgatcttgccaccactacacgttccacagctggtagaactaatctcactatatccattatcttgtttatgtcggtaatcataagaagtctcagactcacaacacatccctatgcacgttcccttttatgacaacctctcttactttgtctcactgggtcttctggaatttacagcccagaactaaccaaatccatcatatcctcaacttcctccttctcaaaagataaactggccctcccctaaggacattgcttcccctgaattcctctcaagtgtggctgattttctcttccgtcttctgggcccagcacactggtctgctggttcttctaccactccaggaaaatctcttcagagcctttgcaaggatataccttttgcctggaattcaaatagctacctctcttacttcttaaagcgcttcctcaaatggcatctcctcaataaggccacatataattacccttttaaacctctagccctcccactccaccatacataggactcctaatttccctgtcctgctctcctttaactatttttccatgacaccaatcaccttagagaatgccatgcaatagacttacatattatgtattttgttcattgtttatctgtcccttgc

SEQ ID NO: 1856 - DNA, 200 bp, Homo sapiens
  misc_feature (1)..(200): DMR12:68299301
gaaataccagataacaaattcagaaggttgatgattaagctactcaaggagctaccagagaaaggtgaaaaccaacataaagaaattaaaaaaaaattcaggatatgaatgaaaaatttcccagagagatagatatcataaagaaaatgcaatcagaacatctggaaataaaaaacacacttagagaaatacaaaacgta

SEQ ID NO: 1857 - DNA, 1500 bp, Homo sapiens
  misc_feature (1)..(1500): DMR12:68559001
cacctgatcctcctcatggtcccatgagagaagcagaatggatattgtttttcttcatcttacctaaagaaattgagggtccaagtgatgaagggatttgctcaaggtcatactgagagagaaagaggcagagttctagagctgaggatacaacagggggcaccaatgcctctgccgtcagggagctttcattttaactacaatacatttatcaaaaataaattaattattacataataaatcaatgatttataatgccagggagttataactgctatagaaaataacaaagccggataaggggataaagagaaagtgactgtattgaagtgaatggggagagtcatttagataggacattcagagaaaacctcttttgagcagttgaggaagtgagtcatgtgaatatccatagacaggtcatagcaagtagaaggaccagcaaggacaaaggccctgaggtaggtgtgttcttggcttaaaaaatagcatgttgaacagggtgccatgactcatgactatattcccagcactttggtaggctgaggcaggaggatcacttgaccccaggagttcaagaccagcctgggcaacatagtgaggctttgactctacaaaaaaataaaaatagcaaatagaaaaaattagcatgcatggtaatgggaggctgagatgggaggatcatttgagcccataagttcgaggctgcagtgtgccatgctcacatcactgcactccagcctggacggcagagcaagactccaactcaaatagaaacaaacaaacaaacaaaagaacagtatgtccattgagcattaattttactgattatgattaagtgttatttgaaggaagcattctgtagtccaataactttcagagcctctggataaagcacagcttccaagcgcgaatagtcttaatatatgaatgcactctgtgatcttcttgaaggagctatagcgtgcagcattgtgcagtgttattcaagtatgaaaaccttttctcaaggagcacctcaggggatttgtactgcaaggagcactctggaaaatgctgcaccacaccctgcttctactggaaagaggaagttgggctaggaactagaacttcaggcactgcgtaaagccaatggaagccaccctcggagacacaaattgcatcaggcggtggccaactccacttatccacagtgtgaatgttcagccactcctgttttttgtcactatctgaaactactcgtggcccctatttcctgtctggatcactggtgttttccatgacttaaccctggtgagctgtttccaagctctgctgaccttcagtagtgttctcatttggggaaatggaagcagaaacaggcacgtatggcaatctgctcagaggatgctcccctgctgactgggggtgggaaccatagcgagggaagaggggatttccattgccctgaataaagtgtggagctggtggcctcccctgcagccttgagcaggaattcag

SEQ ID NO: 1858 - DNA, 1100 bp, Homo sapiens
  misc_feature (1)..(1100): DMR12:70226901
ttgaggcaggagaatcgcttgaacccgggagatggaggttgcagtgagctgagatcgcgccactgcactccagactgggtgacgaagcaagactccatctcaaaaaaaaaaaaaaaaaaaaaaaggtagttcttcacactttcagatgataaaaatttaaaatcatatatatgtcatatatataaatcatatatgtatatatgtatgtgtgcatgtgtgtatagtagtggctacctatgtaaataaaaaataaaatcacgtattcaagtaaattatatacagtgatggtgtatcatagctactctattttttttttgctaaaaaaatagtaagagttggaaaaaagatagtaactttcttggaggcaaaagcgtatgtagatatgtatgagtcaaggagagctgttttctcagacaggcacttggctaactccctcaggtccctgttgtttgctcaggtctaacctaattgagggccactctgctagcatacttactaatggaagctgttcttctccaagtaattagtacctccctttctctggcctacataccccattacagcacaaatcaccttctaacacagtatataatttattatgtttattgcttattgtctgcattttcctgctagaatgcaatctccaggtagccagggttcattattttattcaatggtatatagcaaaaacctagaataaagccttgaagtacagcaattactcaataaagatctgttgaatcaaaatgaaatgagtaagaccagaagcaacaaccagattttatgaagatattactgtacataacaatatgctatttttttgtaaaggcaagttaattgtatttctcggatggggttgttcagaatatacaaaaaatactgtccttaagaaatattaaattcatagtctgacacctaaatcatatgtacatcaacatgcacttgatgcaacctcatttcctgcagatcttttgcttctgttacctgctcagagatgtcttcactgactttatctaaaagagcacaccatccccttatcattctctagctgttatttccttgatagttctaatcactgcatattatattgaatatttatt

SEQ ID NO: 1859 - DNA, 500 bp, Homo sapiens
  misc_feature (1)..(500): DMR12:71380701
gcattttaggtcagtttatatatatatatatatatatatatatatatatatgctattgtaaacagtatcttatcgtctattatattttttaacggctgttggtgtaaaataagtctatttatcattacgtactgatttgtgctcagcaagcaaactgaactctctttttagctttagtcatttgtctgttgattctcttgagttttctatgtacttaaatcatctacgcgtactgacagttttgtctccttccttatagctttatcccttatttcttttacttctcatatttcattggccaggacacctagtcctttgtagaaaagaagggatcatagcaggcattcttttttgttattgacattaaagggaagacttctaaggtttctccattaagtatgatgtttgaacatttttaccatatctaccactgaggcaatacgatgtttaatggtgtgtttattaataaagaaattgaaaacctcattttgagagacaga

SEQ ID NO: 1860 - DNA, 2000 bp, Homo sapiens
  misc_feature (1)..(2000): DMR12:71721301
aaagcagtggaatatcatctttagagaaaaggcaagattctctacctagctatgctatgtgaagtatatcctaagccccctgactgactgaatggacccctcttggccaaggagaacccagaaaaactagaagttaaatttctaggccatgacaagacaggaagtcagtcacacctcagtatacccctttgttcattaactgttaccagatcttttctttctttctttctttttctttctttttttttttttttttttttttttgagatggagtctcgctttgttgctgtgctggagtacagtggcatgatctcagctcactgcaacctccgcctcccgggttcaagtgattctcctgcctcagcctcccaagtagctgggtagctgggactacaggcgtgcgccaccatgcccagctaatttttttttttttttaatttagtaaagatggggtttcaccatgttggccaggatggtcttgatctcttgacctcatgatccacccatcttggcctcccaaagtgctgggattacaggcgtaagccaccacgcccagccctggatcttttcttaagagttaaacagaaagcagccttggcaaacaaagaatggaaaacccttccactgacttcagctgcaaccaccacctgacactatggccagactcccctcccttttgcagttgagacatggcagcttaccagtttcacaaagtgttccttcctgataaataaccactgaccatgggctgtttctggccggtttacagcggctatccacacagcacctctgtgtcctaagtttcacattttgatgtatagagcctaattttagtgcattttaacattaagtctccaccccaaagtgaacatgaaacatatgtaacatgtatgtttgcttaccatgcatgaccacaaccccccttcatggatatttatagtttctcctttagcctgttaaatatgtgtttagccaacccatttagcatagaactcctgtcccaccctacctccctcaaagtgtctgcttttggtcttagctggaggctctgcttcccagcctacaggttgcagccttactcaagaaataaagttctcctttctggatttatagatctcatgttttttaggttgacagatataattaatctgtcaaaggaaaaaaaggtctttgagaatgtgcaataattcagagggtcactcacatgactcatctgagaaagatattaaagaaaagacaacaatttattttgagatgtacaagcacttcaaaatagtgagaagagagaaaaaacagaatgagcaaaaatacaccctgccatctatgtgcatagttatatgtaaatgaataagaatatactggatgtattagtctgttctcacactgctataaagaactacctgaggccggatgcagtggctcacacctgtaatcccagcactttgggaggccaaggcaggcagatcacctgaggtcaggagttcaagaccagcctggccaacatgctgaaaccctgtctctactaaaaaatacaaaaaaaaaatagccaggcctggtgacgggcacctataatcccagctacttgggaggcaggagaatcgcttgaatacaggaggtggaggttacagtgagccgagatggtgccattgcactccggtctgggcgacaaggcgcgattctgtctcaaaaaaaaaaaaaaaaagtaaatataaaagctgttcaaaagattaaaatgataaagttaacaagataataggcaaaatatctcaagcaaatgcaaacaagaaagcagaaatgacaccaataatataagagtaagtggaatttaagatcaaaagcactaaacaggataaagattgacattatgtactttttaaaaggcacaatatggccaggcgcagtggctcatgcctgtaatcccagcactttgggaggccaacgcaggcagatcacttgaggttgggagtttgagaccagcctggccaacatggtgaaatcct

SEQ ID NO: 1861 - DNA, 100 bp, Homo sapiens
  misc_feature (1)..(100): DMR12:71912901
cttaagtctgaaaatttttcaagtcttgaaaattgtaaaacaaggataattgagggttttataagaggaagtaaaaaagaagtttgacatgttcaggtga

SEQ ID NO: 1862 - DNA, 1000 bp, Homo sapiens
  misc_feature (1)..(1000): DMR12:73822301
tgagactgggtaacctataaaaaaatagctttaatttgcttacagttctgaatgactagggaagcctcaagaaacttacaatcatgatggaaggtgaaggggaaaaaaggcacatcttacttggtggcaggagagagagagagtgcagggagaggtgcccgttttaaaccatcatatctcatgagatctccctggctatcatgagaacagcatggaggaaacctctcccatgatccaatcacttcccaccaggtccctccctcagcacatggggattacactgcaagatgagatcaggtggggacacaaagccaaatcatattagttgttcttgcgttgctataaatacttgagacggggtaacttatttttaaaaaaggtgtaattggctcatggttctgcagactgtacaggaagtatgactctggcatctgctcagcttctagagagacctcaggaaatttacaatcaggctgggcacagtggctcacgcctgtaatcccagcactttgggaggccgaggcgggtggatcacgaggtcaggagatcgagaccatcctggctaacatggtgaaaccccatgtctactaaaaatacaaaaaaattagctgggtgtggtggcaggtgcctgtagtcccagctaacttgggaggctgaggcaggagaatggcatgaacctaggaggcggagtttgcagtgagccaagatcgtgccaccacactccaatctgggcgacagagcgagactctgtctcaaaaaaaaaaaaaaaaaaaaaaaaaaaaggaaatttacaatcatcacagaagatgaaggaggagcaggcatatcacatagtgaaagcaggaacaaaagggtgaggcagaaggtaacacagacttttaaatgacctgagaactcactcaccattgcaagaacagtaccaaaggggatgaagctaaaccattaatgagaaaaacacctccataatccaatcacctcccaccactccccatctccaaca

SEQ ID NO: 1863 - DNA, 300 bp, Homo sapiens
  misc_feature (1)..(300): DMR12:76057001
tataaaaataggctgggcacagtggctcagtggttcaagcccataatcccaacagtttgggaggctgaggtgcgaagattgcttgaagccaggagtctaagaccagcctaggcaagaagactctgcctctacaaaaaaaagtagattaagctgggcatagtagcttcagatagtcctagcaacttgggaggctgaggtgggagaatagcttgggcccaggaatgagctgcagtgagccaagatcatgccagtgtactccagcctgggcaacacagcaagtccctgtctcttaaacaaaaa

SEQ ID NO: 1864 - DNA, 200 bp, Homo sapiens
  misc_feature (1)..(200): DMR12:77516701
gcacatatgtgatttaaaaataactcatttagcaatttttctttgtggttttccaaaatattctacctagtttttctagaaccaaactttttaaagtgcaaattataccagtttatgtaatgtttcatggaaatacataatttcaataataagtacaactggtgtaagcaggtttggaaacaaatacaactgacttctga

SEQ ID NO: 1865 - DNA, 300 bp, Homo sapiens
  misc_feature (1)..(300): DMR12:77808901
tggctacagtggccttgcggagctgcggtgggctccgcccagttcgaattttccggtggctttttttacactgtgaggggaaaaccacctactcaagcctcagtaatggcagacctcccttcccccaagatcaagcatcgcaggtcgacttcagaatgctgtgctggcagtgagaatttcaagccagtggatcttaccttgctgggctctgtgcgggatgggatctgctgagctagaccactttgctccctggcttcagccccctttccaggggattgaactgttctgtctttctggctt

SEQ ID NO: 1866 - DNA, 2500 bp, Homo sapiens
  misc_feature (1)..(2500): DMR12:78516901
atcaacgacttgaatgagtttggaagcagattctttcgcagacacttcagatgagagtccatccttgattttggccttgtgagaccttaagcaaataatttagctaagtctgtctggacttctgacctacagaactataacatgatatacagatagacactgctttacaccagtgtttgggataacttttatgcagcaatcgtaaactaatatactcattaacctgttaatgaatatttgagttgctctcagtttgggctattgtaaataaagctacaataaactcttgtttaaatcttgtttttcattttgcttggatagatatgtagaaatgggattgctgagttactctgtaagagtatgtttttctctataaaaaattgcgaatcagtggttgcactgttttgtatccccatctgcgatgcaagacagttccatttattccacatccttgacaacactgtattgtcagtgttttttatgttaggctgttttgtggcatgtagtaaggatcgtcatgacattctaaaggaggaaaactttacctccaccctcttatggtctccaagtaggccagaggatttagttggcataaaacagatgaacaggaaaaaagactctctaaagaaaatctattaaaatgtacagaattttacatgtatgtgggagtacccataggaaaatgaagacccaaaaagcagttagagctgaatgtttacatactaaattggacgagtagtaaattgtgaaaacctgacaaaacacagggacatgggctaggatatttaattacggagaagtgactagagatattgagggttagtttaccaaggttgctttgtgcagattttccttggcttagactccccatctttggtgataagagtatccttcttcctcctgatatagggatactatcttttacatgggagtttcatctcttgctttcaagaagaaaaaggaagatcagattgcccttgttgcatctgctattttcttaagtgcctttaactcaaaatgattcttatgccaaaacggaatatttgggccacctttcaaaatgattactatatgtctttaattttagcatcttttaatgtacttattggacatttgtatgttttatgtgagtataatttcatattcttttattattgaaacatgagtttatatagttttaatacgtggcctttgtcaggtatactgtgaatataattttccagcttctagcttgtctttttatttttcttaatgtctcccaaccagcagaaattaaaaactttaataatttaaaaatcattaaagtcaaatgtatttgttaataaagtcaaattttttattttttaaacttaaggtgagtattttagtgtatccttgccttaggaatctttgcctcccctaagactgggaagattttctcctatatttccttcaagaagttttagagtttcacagtttgtatgttatacagtttgtgtgaaatttagtatctttcaccaggtatgttaggcaggattctaagttttccctgaagatttcccatctccctggtgtacacagcctatgtaattcttggatctgtgaacctgataaactttacttctgttaagttatgtatatggtacagttgagtcgaaaataaagaaattatccagtgagtctgacctgatcacatgcatactttaaaagcaaagagttgggggaaaaaaaaacagagtttgttggtgctggcaaaatggcagaataggaacagctctggtctgcagctctcagtgagaccaatgcagaaggcaggtgatttctacatttccaaccgaggcaccctcctcatctcattgggacgggttagagagtgggtgcagcccatggagggcaaacagaagcagggtggggcatcccctcacccaggaagtgcaaggagcagaggagcttctctttccccaccaagggaagccatgagggactgtgatacctggcccctctggggtactatgcttttcccacagtttttgtagttcacagacctggaaattcccttatgtgcctataccactggggccctagatttcaagcacaaaactgggcagctgtttgggcagatgctgagctagctgcagtaattttttttctccccccataccccagtcgcccctggaaccggggcaaaacagaagcattcactcccctggaaaggagtctgaatccagggagccaagtggtctcactcagtgggtcccattcccaaagagcccagtaggctaagaaccactggcatgaaattcttgctgccagcatagcagtctgaagttggcctggaatactcgagcttggtcgggggaggggagtccgctattactgaggcttgagtatgcggttttcccctgacagcgctaagaagactggaaggtttggactgggccaaaaacaacacagtgcagtaaagcggctgtggccagactgcctctctagattcctcctcactgggcagggcatctctgaa

SEQ ID NO: 1867 - DNA, 500 bp, Homo sapiens
  misc_feature (1)..(500): DMR12:78804201
tgagccatagatatccatgcaccgcacgttcaggtgagccatagatatccatgcactgcatatccgggttacccatagcatatccgggttacccatagcacgtccgggttacccatagatatccacgcaccgcacgttcaggcgacccatagatatccacgcaccgatgttcaggtgagccatagacatccacacaccgcacggccgggttacccgtagatacccacgcaccgcacgtccgggttacccgtagatacccacgcatcgcacgtccgggttacccatagatacccacgcaccgcacgcccgggttacccgtagatgtccaagcaccgcacgcccgggttacccgtagatgtccaagcaccgcacgcccgggttacctgtagatgtccatgcaccgtacgtccgggttatccgtagatgtccatgcaccacatgtccagattatccatagatatccatgcactgcatgcccaagttactcgtagatatccatg

SEQ ID NO: 1868 - DNA, 1000 bp, Homo sapiens
  misc_feature (1)..(1000): DMR12:79322201
aaacaaaaatttcatatatagtaagctaaaatctcctaaagagtttaacgcataacttattcaaacgtattctgagactgtgaaaattgaggactcatctatcctcaaatggaaactgccgctggcctcatcttctgcaccttatctttccttttaaaaaaaactctgagatttaccacttacatgcctgcatctgtttggattaactttcatgttccatatatttctgtttttattagttcatctttgtcctccaaatgtgggtcatcatacaagtgataagtttaagtaagatttacattctctttgttcttatgagtgtatcagtgaatattattaatattgcctcacatttgcaggacactttaatgtgctatggaagccattggaacccagccccgtatttctgaaccaaattctctcctccctcaaactctcggggcgttgggcatttcctcaattatgtggcgtctatggcagtttctaatctgattggggctcttaaaatagaaccagaatctcttttttggagtgagagagcgcagtgatgagtatttattaattaagggaaaagcctccacttgaggcagctgggaatgactttctgaagacactaaaatccaaataaaaagaaagacattcaaatgtgggaagaaaaagtaaacccagtaagaccctcctgaaagtgttaaatgttgaaacgatatctgaaagaaccaacttctttggaggatttttaaaaataagaattggggcatggatttgtagtcttgcttcaaggcaagggaatagacaaggtgatctcccgtgggatctaacagccctgtaattcatcaaagaaggtatttaaaagcaaagccatgggggaaagagaacagtagcatcaatctaaatcaagccttacatgcattttctctcttttttttttttttcacttctaatctctccctgcttttttgtaagacctatcacagcaggacatactctctacaattacttt

SEQ ID NO: 1869 - DNA, 400 bp, Homo sapiens
  misc_feature (1)..(400): DMR12:81062701
agtttttctcctgatgttaggtttcagaattgtctgtttttgtgattttctacctatgaaagattcagcctgctagttatgatcatgccctgaatgacttccaccaatcctttcagatgttgaatggcttcctttatcttcacctgctcccagactcttcttattctctgcttggatatttgcccaaatgattaattcagtgtatgatgttcattcattcaggtagtctccttaacaaagagctattaaatgtcaactctatgtcatgtattgtattagtccgttcccatactactataaagaactgccagagaccgggtattttataaaggaaagaggcttaattgactcacagttcagcatggctgaggagacctcaggaaacttactaatatcatga

SEQ ID NO: 1870 - DNA, 300 bp, Homo sapiens
  misc_feature (1)..(300): DMR12:82934301
acacatgccatggtggtttgctgcacccatcaacccgtcatctacattagttatttctcctaatgctatccctcccctagccccccaccccttgacaggccccggtgtgtgatattcccctccctgcgtccatgtgttctcatagttcaactcccacttatgagtgagaacatgtggtgtttggttttctgttcctgtgttggtttgctataattatggtttccagcatcatccatgtccctgcaaaggacatgaactcatccttttttatggctgtgtagtattctgtagtgtatatgt

SEQ ID NO: 1871 - DNA, 1100 bp, Homo sapiens
  misc_feature (1)..(1100): DMR12:83699301
aaacgtagccatatgcagaaaacttaaactggatcccttccttacaccttatacaaaaatcaactcaaggtagattaaagacttaaatgtaaggcctaaagccataaaaatcctagaattaaacctaggcaatacaattcaggacataagcataggcaaagacttcatgtctaaaacaccaaaagcaatggcaacaaaagccaaaattgacaaatgggatctaattaaactaaagagcttctgcacagcaaaagaaactatcatcagagtgaacaggccacctagagaatgggagaaattttgtgcaatataccaatctgacgaaggtctaatatccagaaactacaaagaacttaaaaaatttacaagaaaaaaaacccatcaaaaagtgggtgaaggatatgaacagacacttctcaaaagaagacttttatgcagccaacaacatgtgaaaaaatgctcatcatcactggtcattagagaaatgcaaatcaaaaccacaatgagataccatctcatgccagttaggatggtgatcattaaaaagtcaggaaacaacagacgctggagaagaagtggagataaaggaatgcttttacactgttggtaggagtgtaaattagttcaaccattgtggaagacagtgttgagattcgtcaaggatctgatactagaaataccatttgacccagcaatcccattactaggtatacacccaaaggattacaaatcattctactataaagacacattcacacgtatgtttattgtggcactattcacaatggcaatgacttggaaccaacccaaatgcccatctatgacagactggatagagaaagcgtggcacatatacaccatggaatactatggagccataaaaaaggatgagttcatgtcctttgcggggacatggatgaagctggaaaccatcattctcagcaaactatcacgagaactggaaaccaaacaccatatgttctcattcataagtcggagttgaacaatgagaacacatggacacagggaggggaatatcacacaccagggcctgtcagggggtgtgggtctaggggagggatagcattatgtgaaatatc

SEQ ID NO: 1872 - DNA, 200 bp, Homo sapiens
  misc_feature (1)..(200): DMR12:84800601
ggtagaactgcatctaaggatcctcatttgcacctaaacctgatttagatgacaaaatgctgagcctgacaccataaagcaatatgatattgggggtttggggagaaatattacgtatttcatatatgagagatctgttaattttttttcttttcttttttttttttttttttttttttggagatggactctcgctctgt

SEQ ID NO: 1873 - DNA, 400 bp, Homo sapiens
  misc_feature (1)..(400): DMR12:85137801
tagggtttgatctataactttgtataacatactttacatttttgtttaggcagtttggaagggctttattttgcgaaagaaactgacaacagctctagaggctattaagaatgaagaatccgatgaagaatacagagaaatagatttagaggattttatatttgatgaagtaagtacgaactatagtatataaatattggtcttaaaatacattaagtgtactattttgaagataaaccagtttctaaggtgtttatcctattaatattgttacagacttttttcctaacattgagaaacttttcctaacatcatcttcttttatcctacaagcttgtatagtgtgcaaaggtggcagcaaaatacttacaagagcgtctttgtgcccttcaaccatgtt

SEQ ID NO: 1874 - DNA, 300 bp, Homo sapiens
  misc_feature (1)..(300): DMR12:86421901
gaagtataagcagaaattgtaagtcttaatttgtaagtcattctgaagagttattctcaattacttaaatgtatgacaaaaccagtttaggcagagaaactaggttacttactagtggtttgttacaaaatatgttttccttgaattgaggcttagaaatggagttttatccaaagataagacagaatgatacagattgacagaatgatgaaaatcaagggggacccacaactctaaaaaaatggagatagcattaatatgaaatattcaaccatcccaaaacctttttactcaaatctg

SEQ ID NO: 1875 - DNA, 2200 bp, Homo sapiens
  misc_feature (1)..(2200): DMR12:92100301
acagcatgggaaaaacccacccctgtgattcaattacctcccaccgggtccctcccatgacatgtggggattataggagctacaattcccataatcccaagacgggatttggctggggacatagccaaaccatatcactgacctagtctaaaggtagaaaatggggagtggcagatcatggacggcttccctgagaagtgatcgtggagtgagatctggagaatgagtgaccattatgcagctaagtactgctggaagaaaaaccagggagggcccttctggccatgactatgttgggagaaggcagggaggcaatcaactgagaggaggtctgtgtagctgaagcccaaagagacaggacaaagaatagcagcaaataaactgtggggtgtgtctagggaatgacgggacacagtcctggctggaaaataacatgcatggcaggatacaaattaaactggaaatcatgatctgggccttgcacattctggaagaataggcaaattaggctcaagaatttgaatggcattctctaggcaataagaaatcattacaggcatacagtgacaaggtcaaccctgtttaaggatgattgttctagaagcaatattgaaacagactttggcaaagtgggagagtagggagagccctggaaggaaaagacaataattacaggcaattgtaatagccaagtgagagagagcaagatcccaaactagggcagtgggaaatggaagaaatgaacaggtatagagatactgtaaagaagaatcagcaaatatgagggttaattggatatggacatgaaggtgatgggggatgttgggggagacagagagagaaactcacaaatgaatgaaaaggtttgagcctgaacattatgaggaggaggagaaggaggaacattatgaggaggaggaggaggccgccaatatcagagtttgggaataagagggttttgggaggacaaggcaggtggatcaattgagcccaggagtttgagaccagcctgggcaacatggcaaaaccccatcaaaaaaaaaaaaaagaaaaaagaaaagcaagcaagcaagcaagaaagagaaagaagaaagaaagaaagaaagaaagaaagaaagaaagaaagaaagaaagaaagaaagaaagaaagaaaggaaagaaagaaagaaagaaagaaagaaagaaagaaagaaagaaagaaagaaagaaagaaagaaaaagaggagtcagaggctttgtgtgagatctgtttcagatatgctgttaatggcatctggggcagccaaatagctaattctgattagttaccatccttcaaaagttgcgtttggaaacatagatatgcaggtcagtcaatcgacaatatttactgggtggctactatgtgccaggcattttttagcttaattttactatgtgccaggcattttttagcttaactttacttatgtttatagaaatggggtctcactctgtctgtccaggctggaatgcaatgatgcgatcatagctcactgcagcctcaaactcctaggttcaagagattctcccatctcagcctcctggatagctaggactacaggcacatgtcactgtgttgagccaggcattattttatacactgaagacagaattagaaattagaccaaatttctgccttcatggggtatttcttgtatataaaaggtagtttaaaaaaacaaaacccatacggaaccaacggttatgtcgttaatccaaaaataagccataaacaagtgatatataagcaagatatcagttcaaagaattggtcattatctcatatcaaattcacaaaatacaactttgtgaaggttaagtctctctccttaggagacacattagaatgcaaattcaaatcaccaactctcatcaaacagcgaagtagactctacaagctccttgtgaatttcatccaggaatttagaggacacagcaaaggacaggataaataatagattcctattctctagaaaagagaaagaggacataccgaaatgccactagcaaggccacttagacatcttggcccttcatcaacactcagagtatgtaatgaatttcagaaatataaataaaccttctttgccatttttacttccacagagatgccaaaattatatcatatggagcagcagaagtgcaagggctttccggcctaatcatttttgaaaatgaa

SEQ ID NO: 1876 - DNA, 1900 bp, Homo sapiens
  misc_feature (1)..(1900): DMR12:92215201
catctgttgtaggatatgtaggttgattccatgtcttggttattatgaagagtgctacaataaacataggggtgcagatgtttcttcaatatactgatttcctttcctttacataaatgctcagtactgggattgctggatcatatagttagttctatttgtagtttttttgaggaatcttcatacttcttttccatagtgggtatactagtttatattcccaaaaagagcgtagaagagtagttctctttcggcacatcctcactggcacttgatttttttttagttgttggttttggttttggggtttttttggcttgttttttgtctatttgattaataaccaacctaactggggtgagatgatacctcattgtggttttgatttgcatttgttttggtgattagtgatggtgagttttaaaatatatatttgttggctatttgtatgtctttttttttgccttttttctttttcttttcttttcttttttttttttgacggagttttactctgttgcccaggctgtagtgcaatggcgtgatctcggctcaccgcaacctccacctcccaggttcaagtgagtctcctgcctaagcctcctgagtagctgggattacaggtgtgcaccattggctaattgttatatttttagtagaaacagggtttcaccatgtcgatcaagctggtcttgaactcctgaccttgtgatccacccacctcagcctcccaaagtgatgggattacaggtgtgagccactacacccagcttgtatgttttcttttgagaaatgtttgctcagatcatttgcctgttttttaacgggattttcttttttttttttctttttctttttttttttttttttgctttcgctgttgagatatttgagtttcttgtatattctagatataaggcccctgttgaatgagtactttgcaaatattttctcccattctctaggttgtctccactctggactgtttcttttgctttgcagaagctttttagttctatgtcatcccatttatttattttttgtttttcttggctgtgcttctgacatgttcataaattgtttttgcagaccaacgtcctgaggatttcccctatatatttttttctagtagcttttattgttttaggtcttatgtttatgtctgtgatccattttgagttgatttttgcacagcatgagaagtgggggtctagtttcattcttctgcatatggatatccagttttctcagtatcatttattcaagagatgagacagttatttccccaatgagtgtttttggcatctttgtcagaaatcagttggctgtaaataagtggattaatttctgggccccctattctgttccatgtgtctatgtgtctgtttttatgccccagtaccaccttgttttggctactatagctttgtagtgtatttttaagtctggtagcgtaatgcctccagctttgttctttttgctcaggatttctttggctatttgaaatctcttgtagttcactataaattttaggattctttttttactttctgtgaagaatgtctttaatatttcgatagggacttgagttcttagccactccagcatactgtcctttcccagaatgtattagaagagcaaatgtacccaaatatattaaatacatgtaggaaattaaaaacttcaaaatttagatggtactctctgacttagttaatttaaagaagagaaggggtggacagaggaaaaaagggagaagaaggagagtaaaatgctataaaaatgattttattttaggagaaggggagtaaaatgctataaagatgattttattttaggaaaagcagaattgaagtgcatttttcatttgcattatgtaacatgaaaccttccttcttat

SEQ ID NO: 1877 - DNA, 500 bp, Homo sapiens
  misc_feature (1)..(500): DMR12:93339601
ctaaaaatgcaaaattagcctggcgtggtgatacatacctgtaatcccagctactccggaggctgaggcaggagaatcgcttgaacccgggaggcagaggttgcagtgagctgagatggcgccattgcactccagcctgggcaacaggagcaaaattccatctcagaaaaaacagacacacaaaacagcctaacccaagatagatagaaatctgtcaacagttgaactattatggtttctattatcggatcatgcaatgaaaacactttaacccttcttcacttaaccaactcactcaattaatataggtctctgtttcctctctaaaacacactgacctgtcaccagacacccactgaagggatgccgcgggaagggtcttgatttgcatgtctgagtgcttctgttcctatctgctgaactgtatgctttccagttccagtggagattgtgcccactcccattgatgtccattgttattatcattttacaatttaatt

SEQ ID NO: 1878 - DNA, 100 bp, Homo sapiens
  misc_feature (1)..(100): DMR12:93923301
gtcccagttacttgggaggctgaggctggaggatcacttgagcacaggagtttgaggctgcagtgagctatgatcgccactgcactccagcctgggtgac

SEQ ID NO: 1879 - DNA, 2100 bp, Homo sapiens
  misc_feature (1)..(2100): DMR12:95446401
gagagagataacagttgccatgatcagaaagaggttttccaaattcttacgttttacttaaatcttagcagagagttataatctgggacgtcctttgtatacaagggacacacagaattttgtcctgggccgcctgcgaagctagagagctgagagggcgggccctggggcagcggccactttcagcttgtgctacttctttcgcttgtgccgccccctcccactgccaaggcgcggctgtccccggctgggtggactcgcgcgcgcgcctcctgccccaccccagcaggctaacactggcgcactgggcctggctccccgctgctactgcctcagcgcaggcctagttcccaggaggatccgccagctcagtgtttgggagcttccttgatgctgagcctttccttccctctactgctcgcttggccgcgcagctccagcctctaatgctttttcttatttctttatgtacctgattacctcgttaatgttgcattaccgggcaggctaaaagctctccttttaattccgcctgcttaagatagggactgatagctgtagcgtatccctggtttttttttttcttatctattggaggaggaggctcaggtaaagggagactttactccgtttcctctttgttatttcggccggccgggtgatactagggccgaaagaagaggaggtgataaggcaggtgacatttcctcctccttcccgtttttaggctcttctgtgggtaactgagccaggggtgctctaattaaagcccataacgttatagagattttactgggacctgttgcctttgcgcatgatgttgcttaagatttctccccacttgttccagagttctacatctttcgtttcttcttctgggaaccatggtcttgggattacagcagtttgtattattatgtcccttaattgagcctgcgaaactgatgctccactagccttaagcaacagtgttttaacacttctatatactgtttctgttgagctgataactgttgtctcataatgaaaactcagcttgaaccaacttccccaagaacttggtaacctcgagtgggcaccaacgacttactgattactcactgacttgaccgcgtggtccttcttcaccttctttttcgggggtccatcgcgttcttcacacttccttcacagcttgcctcacaaggggctccaactgtggggggtctgtttccgcagaccgctgactttcctcacacggggcaccaattgaggtattgctcctcacaagagggcgttagctgcgggggtctgcccacagaccctgacccaaacgatggatgaataacatgtacattgacacacagatattctgtgttgccagtcctgctgagtgtccgacccacctgcacaccaagagaggtttgtcactgcggccggcctcagctgggcaggcttgcattaattcattaaaaatagttaacaaaaacttgagtcaacaccattagagggtaattgacattgtggacttcctgagtgagaagcatacatcaaaggcttaaggcttaagaccacgtgagtgaacaagttaactagataacttccccacatcccgttgttgactactctaatttatttaactaaaggtaatgggaccaggccgccttcagcctggtctattaccaaagtcatacgaaaaccctcaggccttccaaaaggattttgtggctatcataactaatatttttccaactagcctgatcgaatcccaacaggactccatctcaggaaaaaaaaagaaacttgaaggccgggtgccgtggctcatgcttgtaattccaactctttgggaggccaaggtgggaggattgcttgaggggaggagttcaagaccatcctggacaatatagcgagaccccaatctctacaaaaagagagagaaacttgaactgagcacacgtaactttcttgttgctcccagtgtgtccagagttggttcctgccagtgggttcgtggtcttgctgacttcaagaatgaagcttcggacctttgcagtgagtgttacagctcttaaagatggcgtggccccaaaaagtgattggtagcaagatttattgtga

SEQ ID NO: 1880 - DNA, 300 bp, Homo sapiens
  misc_feature (1)..(300): DMR12:95948901
atgtgctttgttaaacagatgcttgaaggcagcatgctcgttaagagtcatcaccaatccctaatctcaagtaatcagggacacaaacactgcggaaggccgcagggtcctctgcctaggaaaaccagagacctttgttcacttgtttatctgctgaccttccctccactattgtcccatgaccctgccaaatccccctctgtgagaaacacccaagaattatcaataaaaaaataaattaaaaaaaaaaaaaaaaaaagaaaaaaaaaaaaaaaaaagagactgcacagaggggtgcct

SEQ ID NO: 1881 - DNA, 400 bp, Homo sapiens
  misc_feature (1)..(400): DMR12:96317101
gaagtgcttaaaggagctgatggagctgaaaaccaaggctcgagaactacatgaagaatgcagaagcctcaggagccgatgcgatcaactggaagaaagggtatcagcgatcgaagatgaaatgaagtgagaagggaagtttagagaaaaaagaataaaaagaaatgagcaaagcctccaagaaatatgggactatgtgaaaagaccaaatctacgtctgattggtgtacctgaaagtgatgcggagaatggaaccaagttggaaaacactctgcaggatattatccaggagaacttccccaatctagcaaggcaggccaacgttcagattcaggaaatacagagaatgccacaaagatactcctcgagaagagcaactccaagacacataattgtcaga

SEQ ID NO: 1882 - DNA, 1700 bp, Homo sapiens
  misc_feature (1)..(1700): DMR12:97261001
gggtctgttgtcagcgccctgcctgaatgagtgaatggctgctgtttgcagccaaaagcaggcgacggtggggcctcttcaaaccatcagtgcgacaatgttatcaagcggctgagtccctgcttctcgtcagtaagccatcattattcctcatgagccaactacaggagagggccactgtgacaaatacgctattatgttgcattttaatgtgtgccaatcagcttaattcaagctctgacattcctctcaggtactgctcttttccaccgcagctgcctgcatgcatccttcagttacagttccggaagtttctataagcgtgaataggcactgtgagcagccacctccaaataaataaaaaggaactcagcccgtgggatggttgagcttttcccaattaagcttcatgatatatttcaaagtactgtaaacattggtggctgaacaattctcacgttcactgatatatttggagatccaatactgagacatctatccagtcataatgaaattccattgtcagagttcgccaaagagtctattggtttttggagactttcaggtcctgtgaaggcttaattttgttctttagggagggatgtaaaatgtggttgtgatatttgccatcacttgacattttaggcttgggtttggagcctccagagattggttatttcctcaggggcctcataacttaacctaagatggccactgcatagtggtgtgatccctctgggtcccagcaacctgccctcctgggagaagatatgtctgggtcagtgatcttagcaacatttctgtccaaaccatgactgttctatggggggaatgcagaagaatttcattaaaatgtctgagcctgatagtcactatatttttaaaagtctgaatgtatacttcaaaacaaggctgtaagaaacacacagactctggtaatagactcttatcttcaggtagtgtcactgatacatctggactttatagagaaataattcaccttgaatttcctaaatgagataggacttccttgggatattctaggcagtcttatgtcaaaagacttttagctcgtgctctactgggatgtccctttagcccagggttttcaaatggcgtgatgaactaccaagaagagagaataatacggacaacatagtgaatatttcttaagaatagctttattgccagtcatggtggctcacacctgtaatcccagcactttgggaggccgaggagggcggatcacgaggtcaggagatcgaaaccatcctggctaacacagtgaaaccccgtctctactaaaaatacaaaaaattagccaggcctggtggtgggtgcctgtagtcccagctactcacgaggctgaggcaggagaatggcgcgaacccgggaggcagagcttgcagtgagccgagatagcgccactgcagtccagcctgagtgaaagagcgagactccatctcaaaaaaaaaaaaaagcttttttgaaattaaagttatgttttttaattttgaaattattatttttctgttgaggttgaattgttctttctctataaaataatgatgatagcatacagtgattttttttttttagtttaatgtcctagcttgacaaaataaactttactgtctgtggcagtatattcaatcacctattcattcacctacctatttttgtttttgaattttcatttt

SEQ ID NO: 1883 - DNA, 1000 bp, Homo sapiens
  misc_feature (1)..(1000): DMR12:98263801
tgcctctcttccccgtgtctatatctgttacttttctcttgtccatagctctctgatattttccatgtaaaactgggtggtctctcacaacttctccgagtctcttcaacagccacaatcatacacaattgactctggaacccacctggcaaggctctctccctaggagaggtcagaggagggcagactgtttctcctctgcaagcagaggaagggaaatactgtgactatttgaattacagtctttctctgccagaagggaactatttaataaaaattaattgaatacttatttttaaatcctacttaatatgaactttatcatgaaaatggacatgggccctgtcatcaaagagcttactctctagatgggaaggcaatgacccaataattgaataattactattatgatgagtgctgcagccaccagtagagtatgactctaatccagttgtccccttaagatgtcaattaaaatggtcaaataccattgtgtatctagtggaaagtccagagccctcttcaagatttctgcaaaatttctgcacagaggcagataggagaatgggacatgctttcctgcctctgctgaattctctcccatttcctgcctctgctgaatgcttgttttgtgctccatgccttgaagtcaatcctttatcttcctgacttctcactcaagtaaccagggaacaaagcttgtgatgtgtagcaaaactttcacatttctacaaaacttttctaggtcactgccaaaaagttacatttctgcgtgatacagcaaatacttaaaactacatatcagtcatgtctcatcttggaattcctttggtcatcaacacgtaggggatttctcactggtctttctagtctagcactcagtctttgactgtcttgctgtttctctgtcttacacacacacacacacacacacacacacacacacacacatacacacagagagagatagacagaaagagagaaagagagggagagagat

SEQ ID NO: 1884 - DNA, 1600 bp, Homo sapiens
  misc_feature (1)..(1600): DMR12:99384801
tactataataacattagttttaaatttttttttaccacaaagtttttgtgagaggggagcatgtcttcccactattatattatttccagtatcttgcctggatattaacattttataagtactaaaggaatatttgttaaatgaatgaatgaacttactttctctggcttttttagaaaatttgataatacacctaatttttgttcagtgtttacagttttatatttaatttataaacagcaataattgaggccccaaccacagtagctcatatgcttaaagttgttaagatagtattatgaacatacgacatcagctcttgcccaataatagacgtttggttttagattaatatatttaagattaatcttaaagtgcaactaataggctgagtgtagtggctcacgcctgtaatcgcaccactttgggaggccgaggcgggtggatcatttgaagtcaggagttcgagaccagcctggccaacatggcaaaaccccatctctactaaaaatacaaaaatcagctgggcgtgctggcacgtgcctgtagtcccagctactcaggaggctgaggcacaagaattgcttgaacctgggaggtggaggctgcagtgagctaggattgtgccactgcactccagcctgggcaacagagcgaggctgtgtcaaaagtaataataataataattttaaaagtacaaataattattgcctgaaagggaatatgctaaatatgagatacagggaaatgattcaggttcacttcaaatttaatattccagttttaatttgatataaggcaacctcagggaacaaacatgttgttagtagcaaactacttagcttagagaacttaacatagtatttattgtaatgttcccctgttctagaaaatcataactaataatagaaataaaacccagctgcatatcaatggccaagaacatatcaatggactagaaaatatgctaaggagactaaaacagacctgaacatttccttcaaatttaaataaagtaagtactttttacttattactaagatctgaaagatatattaaaaatactttgaaattacgtaacatgtgatctaaattgttcatctaaaacaacagcttgtcaaaatgctaatcactaggaaccgagaggtttgtttagttaatagtgcttcctttcacatgtgcttatgtgcttttcagaaggaaatctgaaatctattattagctttccatagtcaactcctgattatccgagttaataaaatagaacccagacatctgtgctaatagagagaacacagacatacaatagacctgattcagatccaaaaaagcagataacacaaaaattacatctttgactccggaataaatgttgattctttgtagcatatgtgccttcctaataacactccattagtttttctactatagcacaggggaactatgctacggaaaactcacctacacatgtaagtgagagttcactctagattgtgtgaacgcattgttagatgttagaattctgtcagtggtattcattccgcacactggattctgatcatcactaatatgttgaaaggtctcattctcttcaatgctc

SEQ ID NO: 1885 - DNA, 300 bp, Homo sapiens
  misc_feature (1)..(300): DMR12:99699301
tgccatccatgaatctaccattcaaataacagtgattcttttcataaataattacttacttaatttatgttttgctcagctctatctcttcagtgctgactttcttaagctataaaatcctggagagtaaaaatatatgccttttcatcccctttgcccttagtccagcacctgagaagccgttaagaaataccaacaataataatgcattatgcacagtggttgcacaataaatattgacagaatgaaaacaatacccttaataaatgtgaaagaacagagtcttcttgtattgctgtt

SEQ ID NO: 1886 - DNA, 1300 bp, Homo sapiens
  misc_feature (1)..(1300): DMR12:100061001
gtcttaccctaagcacaaagaaaacaaaaaaatagggcatggtcctttttccttaaaagttcgtagtttattacatgagacatatacaaacagagaaaaattacaatttaagtctatcagagacatgcaattgtgaagtggaggtgcctgccttttgggaatagaaataaagtgggtgctgcagagactgcatcacactctggaaggaaaggaagtaaagggaatatctcaacgtagattgattgatgatggtagtcacagagtagactagggagcaaatgctgcccaagactagagcacagaaagaaccccgatagcagatgtgggactgaaaaaggaacccaggacactaagcagtagaaagatctatatgcagggccggcgcggtggctcacgcctgtaatcccagcactttgggaggccgaggcgggtggatcacgaggtcaggagatcgagaccatcctggctaacacagtgaaaccccgtctctactaaaaatgcaaaaaattagccgggcgtggtggcgggcgcctgtagtcccagctactgggaaggctgaggcaggagaatggtgtgaacctgggaggtggagcttgcagtgagccgagatcgcgccactgcactccagcctggatgacagagcgagactccgtctcaaaaaaaaaaaaaaaaaaaagaaagatctatatgcagtttccaacagaagtctacttataaaacagattagtatgtagttaataatacttaaaagcagcttgtagaaactttgaatattctgatatcacgaagggaaagaagcagggtgcaaattaaatatgtaaaagaaatacatgcattaaaaacaagactaacaatgctatacttattgctatgggttgaattgtgtccctccaaaattcatttactgaaattctatccccctgtagctcagaatgtatttggagctaaagcctttaaacagacaattacggtaaaatgagttcactgggtgggccctagtccattatgactcatattcttataagaaccgaacaggagggacatacacacatacacagaaggaagaccatgtgaaaacaaaggggaaagatgaccatctacaaagagagcagtctcagaagaaataatcctgctgaagtcttcatctcggacctctagcctcagaactgtgagacaataaatttctgttgtttaagctgcatagtctgtggtatttgttatagcagccctaacaaatgaatatacttacgtttgagcagatatctaaaactgcaagcgtacaagcattgttttggctttt

SEQ ID NO: 1887 - DNA, 1800 bp, Homo sapiens
  misc_feature (1)..(1800): DMR12:100879901
cagggaggagaacctcatctgctcgggagttggggaagacactccaggatgatgagggttgagctattgaaagaggaatgggatttgttaaagtggaccagggtttgagggtattagaacacactccagttagagaagatggcacacacatgttcttggagctgtgatatagcacagtacacattgtaggggtagtttagcatggctataggaagaagtgggtaacataggggaaggaggtatggacagaattgagaaacagggatgattctgggaggttattagaggtcagagtttgaagaacatctcaaaacaggaaatactgactggtatctgagcttctctagaaggctgaagttaaattctataggtcatgtctcagtaatagcagtggtagtaatagcaatggctaatatttattgagcatttgttagagacaggtgcctttctaagcatttcatcttcttaataacttataaggtagatattgtctttatcctcatttgacagatgaggagattgaagcgtagaggtgcctcattcaaggtcaccgagcaagtccagactttaactcagagggtctggctgcagaatctgttcttaatcactatattatattacaacgcagaaaatatagtgttgtaatgctccaaagttaatttatacaataatacaatcacaaggattagaacttcattctcactttaaatccaaacagcagcatgaatcactgcttctgcctttcatatgttttttaatggcttgatcattgtcttcctgatgatttgattatgtgaggagggcaagttaaggtcactgccactaggtgctcactgttgttgcccatatgcaagacctcagtaaaagatgtctatatggcgaatgtaacttttagccaggtctttgcgctatgagagtatttagtctgtctgatctttgaagatatctatgcatggaccattggctctaaaatccccctctttgtatccccacaacaatgcatattttcatctagtgtactcttaaaaggggccagattttgtgaacatagatgcctgtccttcagagtttatttatagaatatgctccaagctcaattcccacctatgagtgagaacatgcggtgtttggttttttgtccttgcgatagtttgctgagtatgatggtttccagtttcatccatgtccctacatggacacaggaaggggaacatcacacaccagggactgttttggggtggggggaggcgggagggatagcattaggagatatacctaatgctaaatgacgagttaatgggtacagcacaccaacatggcacatgtatacatatgtaacaaacctgcacgttgtgcacatgtaccctaaaacttaaagtataataataataaaataaaataaaaaaagaagaaaggcaggaagaaatggaagaagaaaaaaacccattcctttatattataatacaaatgcatattcatattctgaattttaacattaacattataataaaactgtttttatctttaggaaaaaaaaaaaaaagaatatgctccaagcatttgcttctcaaattctccactattggataacaaataagccataatgtaacaggattttcatttaggtttttccattaagccttagccatggattgtgatggtatctggttgaggccagatctgagtttagtttttactctgctgccgaaattgttgtgtgatcttgagccagtcattgcactgttctcaacctcagtttcctcatctggaaaatgagggtgttggagcagacgatcagtg

SEQ ID NO: 1888 - DNA, 300 bp, Homo sapiens
  misc_feature (1)..(300): DMR12:101622201
tacgtcattcatatatatgttgttgaactggacacaaccagaaagatttggatattcaaattacctcctagcaatagaacctggtttctatgaaaaataagaaccattaaacatttcagtctcatcgaactcaaccaaatcaagccaggcaattttttgagaatttaaggtcagaatcccaatatcttaactacatttcccaatctaaaaaaaagtgccaggactgaagcaacttttaaaagaaaggaaactggctgggtgagatggcttgtgcctgtaatcctagcactttgggaggct

SEQ ID NO: 1889 - DNA, 1400 bp, Homo sapiens
  misc_feature (1)..(1400): DMR12:103547801
taacagcgaatccaagactgggatttttttaaagctctcttcccttccccaccttgagtgtacaatggagagtgctagtgtggtgtcacatggtgcaacatggctcagtgttgtgtgaaactaaggtaataggcttctcgtggcctatttcttcatttgtaaaatgagcaagttagacagtaagataatccactgcattgcaagaaaatcttgttcaaacagtttatatgtatttttacttgaaaatatgatgaaaaaaataaggttttactaatctgaattgacactgggctctggcctggggcctgcgtcaggggtctgtggtcacaccaggtaagtgaggaatcctgagtgaggagcaagagctccccaacgtggaggtgccgcagccctttgcttagatagccctttgctacctaattaacataaaattaatcagttcttccaaaatggacaagtgtttaaaaaagaattctgccaaagaaaatgcggactgaagataacgcagataaggcagctacaggttaaactacatgaaactgtcaatatttgctcagtttttatatttaaaagatagcaattgaatataattcaaactaattatattaaatgccactcctccaagtactaatcagccacgatttagataaaaacaatgaccatctaatgaaactcgacataaatagagctcaaaaaggtaaaattatgaaaaggccatttgaaataaggacatacatccactctctttaattatgaactatgaacagaataagtatatattttgctttaagatagtagctattgatagaatgaagacatcacatgtgaattgcttacttcatctttgcatcaacttttaatatttagatttggggcatattttataatgaacataacatatgagcataacagtcgtgattaacgtatacaattaaagatatgtggaaatgactccatctccgaccacacatcctctgagtaattttgatggggatggcttatgttctactgccacctcgtggtgggcattctgtgaacatgcatcttggaacagtggggagaaccagtttggacttctgaggatccaaaagcccaagaaaaaaatctgagttctcacgacaaagtcacttcctgctacaacacctggaaaatgtcatgacccgagctagtctcacttcaggtaacctcacctctatggacctgtcaattcatccataaacttgattttccaactcttgctgaacttcaaaaacacttccaattctaaaatatctatgttactaagtgtcactgttcagactttatgagcttctaaaccctttatgtgttttcattttttattctatgaagatctataaggtctcacagagttagtccttccttctctatttctatcacat

SEQ ID NO: 1890 - DNA, 400 bp, Homo sapiens
  misc_feature (1)..(400): DMR12:103686601
gttcaggtgatcctcctgtctcagcctcccaagtagctgggactacaagaatgtgtcaccacactcagctaatttttgtattttttatagagacagggtctcgccatgtgagatacctcaaactccaagtgattcacatacctcggcctctgaaagtgctgggatggcaggcctgagccaccatgcccagcccacttgtttttcttctaaacagctttccgctgcagtttagccgccacctccccagctccaggtctgccatgttcctctctctcctccccaactctggccttcccaccagcagatcaggtgcacctcagccctcctctcccttaaaatgtcccctctaagggattactcaggcatctctgctcttgtgtttattcactttcttgctaac

SEQ ID NO: 1891 - DNA, 2200 bp, Homo sapiens
  misc_feature (1)..(2200): DMR12:103723801
gggcaggaatgctggggagaaagaagtaagctcaaaggaggggaggttcctgtggaccaaaggaggttggagactgcagtattagaagagataagttgaaatgataaaagttggtggccagagagagagggatgcttgaaatggagctctcaggagcagtcagtgcactttaatgttgactgcaaagccaggggatggggacaggggtggtagaggccgttgacaagggtattgacactgccacggacggcaacatcaagaatgaagggaaaggcggtgatccaggcaacaccattaggaccaaagagtaaaaattggtaaaggattatggatactatgtgtttaaaggatgagggtgtttggaagtgacaatgtacagtaagaaagacactctcccagcacagccaggacattgccacttcaatccctcaccagtgtggaggtagtggaggaaaacagcttcacttgaggggcataggaagggcaatgtttgcaggagacaaagacctctgcaggaagaggtgaagggagcttactaaggtgagaatgtcagaaagttgctaatggcaatgactttgagaaagcacggggaagggtttgtgaggaaggggcctatggggtcaggtgatgcgtgtgtagaggaacatggggtgagtgtccctgcagtgagcgttcccatggatgttagctttgaaccgtgctttgctttgtttgtattttaggtctctgcccatcttccacaacttataagctctttgagggctgggacaatgtgttctattttgtaccacctgccttctctctgataatggttaccttttcctatgatcagagtttagcttaaagctgggaagtatcaaacaggtggggtcttcctagttaatacctggatgctgagaaatttccaatttggcaactctgggcttacctgtacagggctggagatctgctcaaagggacctgtcatcttaggatacaaggccaggtgaataagatgcccctatgagcatagggaattggaaggcaagctcaggaaaaggataaacaatacaaatgaatcaaagagagtgagacaaaaaatgaattcaaacgcagaattgctttgtaaatatcggtagagctggcaaactaactggtctaatccccatcccttgccccttggcaattttaccagaaaaatggcggctgtagtgaatttgccatctgcaaccacactgggcaagtagaaaggacttgtacttgcaagccaaactacattggagatggatttacctgccgcggcagcatttatcaggtaacgcgagacatgtttccatcaagtaaactctacttccctaaaaatgccaagaatccaggtagctaaggagtatttaagagcttggtgaaatgtaaagcgctataaaaatatgaaaggcaattttacataaatcagcaatgaaaagaaattttgtcttcctctgggaattcatttgacctgaggaagagtgtaatgtagggattaaggtggaccgacagctctggagtcagaaacacttgggtttgaattcagttctcctggttggtaatgtgactttgagcatattatgtcacctctctgtatatcaattttccaatctgtaaaagaaaataatggtggtacaaactgcatcaggttgttaaaataaggtaatatgtgcaaaggacacagagtgctcaatagctcaaccacattaccatggcgtggattgcagtgtgtgcatgtgtgcgtgtgcatgtgtgcgtgcacgtgttaatgtgtgtacacgtgtgtgtgcatgtgtgtacgtgtgtgtgcttgtgtgtgcatgcaggtgcatatgtgcatgtgtgtatgcacgtgtgtgtgcatgtgtgtgtgtactgagcatagtggttgaggcaaggtgatatttgcagctttctattataaagtaaatgttcagttatttaaagagggacaaaaatgttccggctgatcaaatattgttactagagtaaccaaatctgccataaacctataactgattttttttaaatatttgaaagtcagaaaatgctcttaaagttcagatacttctggaaatggctgaacctttctttcataaatcagatggcgattccagaaaggttatagaattcacactatgtccacatagtcattctgaacgttaattgtcagcctacagatgaagctccaaaaagg

SEQ ID NO: 1892 - DNA, 300 bp, Homo sapiens
  misc_feature (1)..(300): DMR12:106345001
tattaattaattatgtttgagatggagtctccctctgttgcccaggctggagtgtggtggcatgatcacagctcactgaagcctcatgagctcaggcagtcctctcaactcagcctcctaagtagctgggactacaggcacacaccatcatgcctggctaatttttaaattttttttgtagagatgaagtttcactatattgcccaggctggtctcgaactcctaggctcaatcagtctcccacctcggcctcccaaagtgctgggattacaggtgtgagccactacgcctggcaccatg

SEQ ID NO: 1893 - DNA, 1100 bp, Homo sapiens
  misc_feature (1)..(1100): DMR12:106901001
caagaattagacaagcctggactatactattgtgattaaaacaacaaacaaataggtagggtgtttttaaaacactcaattgctctgccgtcttattaaacacatggccttatgaggtagattttagcattatccccattttacagagacttcgatgaatttgcccaaagtcacccaatcagcataagtgactaaaaccagatcaaatttccagcttgtctaactctacattttttttaatctttcaagcttttatttaagtgcaatgatccagaatggaatttagatcttgttgaaagcagccacatccatgggctatacataatcctgaaaagcagcgatctgctcctccagcatatctgttccaaatttatcatcttcaaccacacactgtatttgaagtttcttaaatctgtatcccactggaactagtttagatgagccccagactaagccatctgcttgaatgcttctgactcactcctttcattttgccatatctgtctcatcatcccaaggtttcatgtctaagatggaagacttggcaacaagtgcaggttttttttcttttaggtttgatgatcctctctaatttttgcacttatcatgtattttttcttctattgatcttattttactttttttttttttatggagtctctgtcactcaggctggagtgcagtggcacgatcttggttcactgcaacctctgcctcccgggttcaagcaattctcctgcctcacccttccgagtagctgggattacaggcacccaccaccacgcccagctaatttttgtatttttagtagagacggggggtttcaccaagttggtcaggctggtctcaaactcctgacctcaaatgacccacccaccttggcctcccaaagtgctgggattacaggcatgagccaccgcgcctagccttaagtgcaagttttttggctttctttgattcatattgtgcaaggtgtttgttcttcccttaacctctttgcttcttcactttcctcctcatcagatccaaggagatcaatttcatcatcatctttactatttgtagctccacttcctgtagtgtcttccaccttagcagga

SEQ ID NO: 1894 - DNA, 1500 bp, Homo sapiens
  misc_feature (1)..(1500): DMR12:107915801
agcatggtgatttgtgaagggctgaactcagacagacctaggtttaagttctggtcatctcacttgctgtgtgaccttggacaagtcacttcacttctctgagcctctctccaacaacggggctaataatccctgccttataaagttgtggtgatgattaaaaagtggctgggaatggtagctcttggaaatagtagacagtcaataaatgtcagttttctgctcttcagtcctttaaagttactgtacagcaggtcctggaataatactaaaatgtttcattataatgttggtgagaaaaagaaaaatcaattcccagccaaggccatcatctgggtgcagtctgtacattctccccatgtgttcatgggttttctctggctctctggtttcctctcatattcccaggatgtgcacatcaagtgaattggcatgtctaaatgggcccagtctgggccaggtgtggtggcttacacctgtaatcccagccctttgggaaaccaaggagggaggatcacttgagcccaagggttcaagaccagcctgggcaacatggtgaaaccctatctctccaaagaatacaaaaattatcggggggtagtggtgcacccctgtagtcccagctacttgggaggctgaggtgggtggatcacctgagcctgggaggtcaagactgcagtgagctgtgatcacgccactgctcaccagcctgggtgacagagagggactctgtttcaaaaaaaataaataaaatggccccatctgagtgagtgtgggtgtgggtgtgagtgtgctctgtgaggggatggcatcctgtccagtgtggtttattgccttgtgccctgagctgccaggataggctgtggccacctgcaaccctgaattggaattactgggttaatgattatcttacttgtttttattaatctttcttaagtgtatgtatagctcacatttatttcaatgtttaatactagaaatgttttggtcttcatttagaagtttagtgatgtttggccgggcgcggtggctcacgcctgtaatcccagcactttgggaggctgaggggggcggatcacgaggtcgggagatcgagaccatcgtggctaacacagtgaaacaccgtctctactaaaaatagaaaaaattagctgggcgtggtggcaggtgcttgtagtcccagctactcgggaggctgaggcaggaaaacggcgtgaacccgggagacggagcttgcagtgagccaagattgcgccactgcactccagcctgggcaacagagcgagactccatctcaaaaaaaaaaaaaaaaaaagtttggtgatgtttttgtggccagaaatatgcctgtagaaacttaactctagttaatatccattagcctatggtaacatcggtgttgtagtacattgtttcacttaaagttgcagtttccaagaatctgttaatgacattaggtgaggacttaccctattagtaaaatttacacttgacaagatt

SEQ ID NO: 1895 - DNA, 200 bp, Homo sapiens
  misc_feature (1)..(200): DMR12:109046001
ggagacctatggaaaaagccagtgttgcaattcaggcagtctgcaagcagaattccctcttattcttccctcttgcttgggggaagtcagtcttttttttttttttttttttttttttttagatggagtctcactctgttgctaggctggagtgcagtggcgcgatcttggctcactggaacctccgcccccccgggttt

SEQ ID NO: 1896 - DNA, 600 bp, Homo sapiens
  misc_feature (1)..(600): DMR12:109681201
gatttataatcgtgagccaccacatcgggcctatttacttatttttaatataatttttaaatttcggatccacagaaaagtttttctttattttagaaacattatattttgcatttacagaaaaattacagatggttcagagatagtacagagttcccatatactccacaccatttctcctattattaacgtcttatgtgaagatggtacatttgtcacagttaatgaaccgatattgatacactattattaaccaagtccaaactttatttagatttccttagtttttacctaatatccttttcctgtaccacgatcctatgcaggataccacagtacatttaatagtcactttttcttcagctcttgttatgtgggtctgtttcttgaactttgttttgatgacctttaggattctacagagtactagtcacataatttgtacaatgtacctcagttggaatttgtctgatgtttttctcgaattagaccacggttatctgttttaggaggaagaccgcagaggtaagttgccattctcatcacatcaaagtacatattatcaacatgacctggccaggtgtggtggctcacgcctat

SEQ ID NO: 1897 - DNA, 2100 bp, Homo sapiens
  misc_feature (1)..(2100): DMR12:110020801
aataactgcgactttgggcaagtggcctcatctctccagttttctgtttccttagctgaaagaaataattgagtgaatctggagatgaaatctccaaagtctgtgactcttaagatgtcttgagaagagacattgttccccatattgttcaacagtagagttgccagagtcattgtttgttgaagtgcgatttgtgaagagagggtgacaattcctggctgttaccccactgagtataaatgggaaatgatagcatattccatttgtaccgaggactaaggcacattttgtatttttgtgcccacagggttttcagagttctcaagctaactcttttgcaactgacagtgtgtagctgagagagaatttttggaagacagctgctttgttttaatggtgctcagaattaaatgtgtgcttgtcgtgcattgagcaagaattgagccactccttaggattgataccagctacgaaaagaatatagctgctcttgaatgtgaggtttgttggtataaaaagtgtgtgaatttacttctgatcagaggtgtgagtattcatttgattgaatttggaaggtgtggccttctctcattttcttttctttctttcttttcttttttctttcttttttttttttttttttgagatggagtctcgctctgtcgcccaggctggagtgcaatggcacgatcttggctcactgcaacctccgcctaccgggttcaagcaattctcccactttagcctcccgaggagctgggattataggcaccctccatcatgcccagctaatttttgtatttttgtagaggcggggtttcaccacgttggccaggctggtcttgaattcctggcctcaggtgatctgcctactttggcctcccaaagttctgggattacaggcatgagccacggcacccagccccctctctcattttttgatggtcacttttccacttttttctaatccgttactcagagcttatgtgtgcaaattaataccctgccctgatgaatttttggcctgcagtatatacactgtggttgcagtttgaatttttcccttttctgaaagattatgctttgcccacctcaaacaaaatattccctgccaccttcatagcctttctcctgattgtgtagcaaccaccaagacacagtgcctgtgaagtggcctttggtgtggtctcagtggagacaggcagaggtgaaaatggcacgagagggaagccaggtgttctatcatcttcggatgcttttgcatgcaaagttaccaagggccacagagttattaggaaattaaaatttaaaacagggtatgaacattgggttgaataactaaactgcttccaagagtggaaatgctgagctgggcgtgctggctcacgcctgtaattccagcactttgggaggctgaggcgggtggatcacgaggtcgggagatcgagaccatcctggctaacacggtgaaaccccatatctactaaaaatataaaaaattagccagacgtggtggcgggcgcctgtagtcccagctacttggaaggctgaggcaggagaatggcgtgaacccaggaggcggagctttcggtgagctgagattgcaccactgcactccagcctgggtgacagtgtaagagtccatctcaaaaaaaaaaaaaaaaagagtgcaaatgcttagggcagtagaggcaggattgccgaaggagcagaggtagcccggtgaggagcttggtggttccttgggagaaaagcatagcgccgtcttcccagcgtgcatgaagggtgaggtggagcagacgtaatcatctttccatccatcagaagagtctgtgccagaaaacagtgacttcctgtggcaagacatcaagtgacttaagcaaacaaggaactgaggattgaaggaaaaaggctatctcgattttctggtattaatgataaaaggggattgtagcttattaatcagttgagtctggttccttaccttctgcccctgtgactgttatcttgtttctgaagtgtcagttggagatagcatttggtataatacttttaggattcctctgtttccatccacgggttgtgctgtcctaattgtag

SEQ ID NO: 1898 - DNA, 1300 bp, Homo sapiens
  misc_feature (1)..(1300): DMR12:111225401
acatcagctggcaaggtttatccatcacttagcgggatgcctgttgtgtcacctcctctcagcaacgcagccaggaaggcacagctggtattgtccccttttataggtgtaaaactggggctcagagaggtcaagtgacttgcctgagctcacacagcggttcatcagctgaacagagagcagaagatgcaaacctcagcttggagggccaaacgggccccttgaggggtctgggggtgcagaaggagctgaggatggtgattctagatttagggacccagctggagatctgcaggtggttagggccagaaaggagctcatcactcagccaggcccatgccttttagatgtttctttgctgaactgttctttcaggcagaatctgccaggaaagcccgccgcatacaaagagctgtgattcgagcccaagtctgtgtatccagcccagaacttggtacataataagtgctcaataaacaagagtgttgcttgcagctcacgtcagatataatgagaagaaggcctcccatcctctctactgcccccgacatgcacatgtgcacacacatgacccaccctttttccgctgccggagtgcagcagcgcaatctcagctcactgcaacctccgcctcccgggttcaagcaattctggtgcctcagtctcccaagcagctgggactacaggcgtgcgccaccacacccagctaatttttgtattttttgtagagacttggtttcaccatgttggccaggctggtctcgagctcctagcctcaagtgatcctcctgcctcggcctcccaaagtgctgggattacaggcgtgagccatcacacctggccttcccatcctccctcctctttgataacagaattcctttgatggtgcatgctccttggctgcccataaccaagtcttgcccctctggaagtctgccctgcccagcttggggtaaaacttaacgatgaactgaatgaacatccttccgaatttaatattaagaacccaccaaagcattattgaacctgtcacgccatattacaaccaaattaagaaccagcagcaatcctctttcattcagtattatatgccttataaagtaaattattaatgcttttttccccccagttaagtagttatttgcagttgttccgggtatttctcattagaaataacatcatctaaagaacgatattgactgatttttttaatcttggagtcatggacgtgaaccacatatttatatgacattccctttaactagaattctcgcgctttatttttatattattgatcttt

SEQ ID NO: 1899 - DNA, 200 bp, Homo sapiens
  misc_feature (1)..(200): DMR12:111421301
cccagctaataaataggttgccttttatttctggctccttttgcccagcataatgttttagagattgatcacattgatcgtacatgtcaatagtgtcttccttttttttttttttttttttttttttgagacaaggtctcgctctgtcacccagctggagtgcagtggctcgatctcagcttactgcatcctctgcctct

SEQ ID NO: 1900 - DNA, 1400 bp, Homo sapiens
  misc_feature (1)..(1400): DMR12:112319801
gaagaaaatatgtttaatgatatcccaaaatagtcaacgccaaaaattattttaattacaatcaaatggaaaacgtatactgtaaagccagctctttgctgatggaattgttccccttttggcttttctgttaatgcttccatgaaaattgggattagacctaattgaaagagcccaaatcataaaagaatatagttaagtgtgaaagtcagaaattaactccataatttattttagaaaattgaagtataaagccaggcgtggtggctcacgcctgtaatcccaacactttgggaggctgaggtgggtggatagcttgagcccagcagttggaaaccagcctgggcaacatggtgaaaccctctctctaccaaaaatacaaaaaatagccaggcttggtggtgtgcacctgtcgttgcggctacttgggagactgaggtgggaggattgctaaagcccgggaagtagaggctgcagtaagccatgatggtgccctgcactacagcctgagtgacagagcgagaccctgtctcaaaaaataatactacaaaaaaaaaggaaaaaaattgaagcataaacctttagtaaatgatcttgagttataaatgttgtttctaggacaggcgcggtggctcacgcctgtaatcccagcactttggaaggcagaggcgggcagatcatgaagtcaggagttcgaggccagcctggccaacatggtgaaacaccatctctactaaaaatacaaaaaaaattagccaggcgtggtggcccacgcctgtagtcccagctactcaggaccctgaggcagaagaattgctcgaacccgggaggtagaggttgcagtgagccgagatcgcaccactgaactccagcctgggtgacagagtgagactctgtcttaaaaaaaaaaagttaaagtttctaactcctattaccagatagagtactagtaaaaatggaaccaagttttatctctgttcttcaaaacctaatatatatatgtttaataaatgatggattattcacggttctttggttgtgaagcataccccattctttttttttgagatggagtcttgctctcttgcccaggctggagtgcaatggccgatctcagctcactgcaacctccacctcccaggttcaagcaattctgcctcagcctccctaatagctgggattacaagggtgtgccaccatgcccggctaatttttgtatttttagtagagacgaggtttcgccacattggccaggctggtcttgaactcctgacctcaggtgatctgcccacctcggcctcccaaagtgctgggattacaggcctgagccactatgcctggcagcataccccattcttaatagtgttaacccattattttaatttgtgacatggtagaga

SEQ ID NO: 1901 - DNA, 1700 bp, Homo sapiens
  misc_feature (1)..(1700): DMR12:113905801
acagacatcccacaagagacaatagatatccaaatggctcataaacataggagaaaatatttgacttcctgaactatcagggaagcacagattagaaccataatacagtaataccactgtagccattatccacctaccagaatggctaaggaaaagacagacaacaccaagtgtggacgaggatgaggcgcaccagaacaccataaactgaccgtggaaggaagcgcaaactgatacaaccactttggaaacctgcctggaaataaatatctactaaagctgagatatgcataccctgtggccctgcaattccatacctacacatacactctacagggacacatgcatgtggatgccaaagaaatgctcacaggagcagtatttgaaatagcccaaaccctgccaactacccaaatgctcattggtaaaatgggtaagtatattgcaacatattcacacaatggaattctagatggtcacaacaatgaatggattacaactgcaacatagcaagtgcggatcccagaaatagaatgatgatcaaagaagccagacacaaatgagaatatatgttccagttccatttacagaaagtacaaaaacaggcaacactaatatatgtttttcgaagttaagagagtggctgctcttggtggggggcaggtagtgactggcaggaggcgctgggcaggggctagctggaaatgctctgcctcttgagccaggtgctggttacacagtggtgctgaatttgtgaccacctgccatactgtccgcttaggatctgtgcacttttctgcacgcatgctagctggcaatcacacggggcaaggctggtcctgcctcgtcggggctcggcatttactgtctctggatctgcacgtgctcactccttcacaacccaggtctccacgcaaatgtcccctgcttggaggagccttacctaactgcccagtctaagattccctgtactggatgtctcccaaatgatgtgtacttgaaacctgtaatgtgaccttacttagaaataggacctctacagatgtgatcaagatcagatggggtcatatggattagtgtgggtcctcgatgcaatgcccggtgtccttatcgggagaaggcacagaaggaagaacgccagagacgacagaggcagagacgggactgacacagccccatgccaagcaatagcagggattggcagcagcttccaggagcgggaggaagcgaggaaggatcccccctgcagccttcggaggcagcatggccctgcccacaccttgaactgggacttctggcttctggaactgtgagaatacatgtctgctgtttaagacccccattgtggcatgttgtcatggcagccacagaaactggtactggtcttattctcatccctcctaactcttgctttaactgtcttcagaacgctcatgccaccatgtcacggaatttatttgttcatttgtttactgcccctactgccaaccaccattagaacataagagccacgagggcaggaactttgccttgttcacagccaccttcccagtgccgagcaatgcacctggtacagagagaggctccatcaacgccagaggaatgccaggggaataaatctgcatctcccgtggtgcagaggagacaggaggcaccccatgcacactgaaggaatgaaagcacgcattcattccgtcctt

SEQ ID NO: 1902 - DNA, 2100 bp, Homo sapiens
  misc_feature (1)..(2100): DMR12:114234501
ccaaatggagcctgtcattctcctcctcaggcacagcaagggcatcccctctaccagtccctcacccccttatccaatcaaccaccactccatccatgagccctgcctgccatatagtgaatgtaactgttcatcagatgcgtattttctgaatgtcgactgtgtgtgcagccccattcctgtgctgggcgtctgtgctgaacaacacaaacaaaaccccagacattctggtcatggaaataggaagtaaataaacatgtcaggtagtgacaagggctataaataaatgagtaaaacagagccagagtttagaaaggtgggaggtatggagggactactttaggaaggaagggtggtcagggaaacctctctgaggtggtgacatttgaccagagtcctgaaggaggtaagggatggagggagcatggttacatgtaggagaagatcagttctgggtggtgggaacagaagatgcaaaggccctgaggcaggagcgagctttgtatgctggaggctgggtgagaaggtgcatgtggtggagagaagtaggagagggctcagagagcccagccacctttcctcgcctcactgcagctcccaagctcaagcccctgtctctctcctgcattgctgcagcaatctcctaattgtccttgttttccactgcttcaatccatcctctgcaaccagagtgactggttcgatcacaacactgctggcctttgaaatgtccagagcccttggaatcaagtccacagtctgcagagaaacatacaaaggccaccttgacccagccccctgttgattctcctggcctcaatcaccccttgacactccccacccaccactcctccccagccaccaggaacatctaatccccatgctcaccacactctcgcttgcctctaggtatttgtgctatttcctctactagtattccattggctaccctatgcttcatccagacatcaactttgatgtcacctcctccaggaagcctcctgtgacccgaagcctgggtcagaggttcccactctgagtttccacagcccctagtattgagccatcagagcccactttagctgtatggaatgtgtcatctctttgagcacagtgactgtgccaattatgtctgaatccccagtgctgaacaagtgcttgacacctaggagatgctcagaaaatactgataaaataaaggggtaaggaaaatggagcaacggactctcaggtatgcagaaaagatataagactctgtcctcctggacaatctaacaacacacctggggtgggggagatgagattcacacacaaaaaaaaccacaggatgcttaaagctaagctgtaggggtcaagagacattcagggcaagggcagcttggggagggctggaatatttgggttttatttctaggaagagaaataggaaaagataggatgaggaagagggagaagaacttgagtggcatctccaagaataaataggatttgtataggtgcagaggaggaccagaagggaaacagtactatcaaagacaggggtgaggctaagctgagtccccatccaagtggtagctgttgaagaaccaggaggaaatgccagctgggtagcaaagggtaaggtgatgaagtctctaagaagtcatgggtaagagcagagcttctggagtcagacctgggttcaaatcttccctccaccactggaaaccatttgacctgaacaaatcactttccccttttgggtcccagtttccacctctgtaaaatgaagatcatgaaaattcagcttcaggaccctttaccctcacaggttccttcaagactccatgaggggctctagagatgcttccacagggtcacatggttttgcaaaaaaatggaattttgcccatcaatgatagactggataaaggaaatgtggtacacattcaggcaggagaaaatgtgtactctcatcttttccagagtcacctaggaggcagggcagggagggcaaggcagtcctgagaatctggaagggctgtcttggggaggctgaggcctcaggcgtccaggaccagagaacagcaagcaagcgtctgtgtcgccagcagcaggggg

SEQ ID NO: 1903 - DNA, 2300 bp, Homo sapiens
  misc_feature (1)..(2300): DMR12:118006601
gaggatcacttgagcccaggagttcaagaccagccttgacaacatagtgagaccccatctctacaaaaaatttaaaaattagccaggtgtggcggcacatgcctgtagtctcagctacgccagaggctgaggcaggaggatcacttgagcctaggaggttgagcctgcagtgagccgtgattgcaccattgcattctatcctgggcaacagagtgagatgctatcactaaactttaaaaataataataataataataaaagaattgaagaccaaaagcctttctccaaattttctggcctatttccacaacctcctaggcatcttgaatggccccagggaagggaagaaacccaacccgtcattcccaacagaatcaatttccaaaataccttagcttgagagggcaacagtgaaggacattaagccggatacatttaactgagaaaaacaatgaaatgtgaattttcttgagccccagtatatggagcaaattcatatgagttaacccttccaatctgaaaattagaatcagattcaggacatggtaaataaccatctattagttacttaatcaacacatgttagaggatgatgaacaagagaaagtttctgacaagagaaagtagttgggggaaagaggacctcaggtctttgagtcctgatcagtcagtctagggttttgccgtggtcatcgaagacaatggattttcccgttatacacactcttcaaattgccctttgagatgtttttctccttcaagtcctccctgtttatttaaacatgatttcaccagtataaacacattcaggagaaagacccagtttgattttcttctgccagcatcttccaaagatagccttgaattccattctcataagaagaagtcttaaaaataaacaaaggcggccaggcacggtggctgtaatcccagcactttgggaagccgaggcgggcagatcactccaggtcaggagttcgagaccagcctggccaacacggtgaaacctcatctctactaaaaatacaaaaattagccaggtgtggtggtgggcacctgtaattccaactacacgggaggctgaggcaggagaattgcttgaacccgggaggcagaggttgcaggaagccaagattgcgccactgcactccagcctgggtaacagagcaagactctatctcaaaaaaaaaaaactaaataaataaaataaacaaaggcagtaagtgctttgtccaaacccaagtttcttccaaagctgagagtagtgaaatcctgggctccctttctctaatccaatactaagagcaaatgccttgtgttggtaattttgcttgtaatgtatgatcctgccatctccaggacttgatgttttattaaactgtttccaaatctgatggtgattatataagaaaagtttgtacttgtgctcattaatgttacaattcacacagatatatcacctttacttgccagtaatgccccagaagggctaaaccacaggcagaaggggaaagtaaaaagaaatgactacatctttgcctgatcatctgtcctgacaaattggaagtcacaaagtgatccgtatagtgtttgtgcctggccagcagtttgtttttaattagttgccaacatttaatatagaaggatttcatataaaatccaaatttcacccaggcaccatggctcacacctgtagtcatgatgctttgagaggccaaagcgggcggattacttgggctcaggagttcaacaccagcctgggaaacatagcgagaccccatctctaccaaaaaaattttttaattagcagggtgtgatggtgcatgcctatagtcccagccactcaggaggctgacgggggaggattgcttgagcccaggagttcaaggcttcagtgagctaggattccatcaccccactccagcctgggccacagagaccctgtctctaaaataataaataggcttggtgaggtggctcatgcctgtattcccagcactttgggagcccgaggcaggaggactgcttgaatccaggagttcgagaccagttttgagaccctgtctcaaaaataaaataagataaaatccaaatttctgattttgcttgaaaaatccgaagaactggcaacatttgactataatccctcatggcggaatactggtgtgataaacacctgtgatacctttggtcaccagcttttgaacccctctcctttattcaaggatgtccccaattcacaagtcttggtgggaggcagatgtcatttcccactgttcgaacaatatacccgatactta

SEQ ID NO: 1904 - DNA, 1400 bp, Homo sapiens
  misc_feature (1)..(1400): DMR12:118191801
cttaatattacagtgccagaaaagcaagcagctcttaaatgccagtaatcaaaagagatatgctaggtagaggcctgtgattttataggaggctttaacaagtcgtagttttggtgaatattaattggctaacttaccaagtacattgatagagggggagaccccaaatacatgggcaacagttcagtttcacattgtaataacttgatttataaggataaccaatgacactagaatccacattctccacagggcagaccaaaacaaaatttattcatgtacaaatatgtgcaattttatttagtctgttttatctctgataaaaattaactccttagaaacacggtttagggctctgcttctccaattaaaagccacaatgtattttctaagtttactaaacttgaggaagttgaagtacaccggaaaaattaaaacttgaaatgacattgattttagttgacacatatgtaattaagtaactcaagtatatttttaaaataatgctatttttatagtccaaagaataggttcaaaattttaacccactttaaatataataatgctaatagtataattctttgcttccccctacatttttttccttttataaaattattcttagttttccagatcattttcataacagagatcactatcactaaaggtcttcaaatattatacaagagaccacaaaatggaacaaaattttagtctaacagtggatattcatttcaagtgcattgggaaatgaattttaatattcagttccactgcataaaacaggttcaaaactccaaagacagcttatgaagctatttaaaaatgggagaatgtaacttgagaagtaagctcaaagaaattaaagtatcaactttactggaaatattttctgttggttatactgcccctttaagtaacagtgcctctgtaagagaccactatacctggctcccagagtttctgaactgcacacatcttaagattaacaatggaaagggttaatttctatttttatgcagttatgcactagatacagattatttacaaatgataaggctgaaatcttcaaagaaggattttagaagattaagaagaataaatctattctactttgccaaggcaaaatatatggcatggttataatttatctttaaaacattatcatccaggaaaaaacaaaaataactccttgaaataccagttttaagtaaacctacgttaacctggtaaacttaccacgttgttgtttttttttttttttttttttgagacagtctcgttctgttgcccaggctggagtgtagtggcactatctcggctcactgctacctctccacctcctgggttcatttttgtgcctcagcctcctgagtagctgggactacaggtgcgtacca

SEQ ID NO: 1905 - DNA, 1500 bp, Homo sapiens
  misc_feature (1)..(1500): DMR12:120977601
ccaagcctgggtgacagagtgagactctgtctcaaaaacacacacacacacaacccaaacacacacaacacacacacacaaaatcagctgggtgtcgtggtgcgtgcctgtagtgccagctacttgggtacttgggtggctgaggcgggaggatcacctgaacccaggaagtcaaggctgcagtaagccatgatcgcgccacagcactccagcctgggtgacaaagtgagaacatagctcaaaaaataaaaaaataaatttgcacctgaggcaagtgtcacactcatcccaactcagtctcaccttgcatgttttctgccttgctggctgtatgaccctggacaagttacttaaccgctcagagcctcgatttcctcctctataaaatggggataatctctgtaactgctcacagttggtagcagaatgcaatgaagtgaattcgccctcacagagccagcactgttcttggcacatggtaatcttaacatattttttcctacagggaggcctggtgtcaggccgggagtggggtggaagggtcccaaaatggatggaagggccccaaaatggccgtgagcatcctctgcccttgagaagagctagcccagctgtctagagctccctgctgctgccgctctcgtaagcagcaagcatttttggctctcctgtctcagcatgatgcccctacaaggttctttcgggggtgggacccaacgctgctctcctgatggcctccctggctcccagcaccttccatcccagctgctcagggcccctcacctgcgcctcccccaccctcccctctgcccactcccatcgcaggccatagctccctgtccctctccgctgccatgaggcctgcactttgcagggctgaagtccaaagttcagtcccttcgctaagcacacggataaatatgaaccttggagaatttccccagctccaatgtaaacagaacaggcaggggccctgattcacgggccgctggggccagggttgggggttgggggtgcccacagggcttggctagtggggttttgggggggcagtgggtgcaaggagtttggtttgtgtctgccggccggcaggcaaacgcaacccacgcggtgggggaggcggctagcgtggtggacccgggccgcgtggccctgtggcagccgagccatggtttctaaactgagccagctgcagacggagctcctggcggccctgctcgagtcagggctgagcaaagaggcactgatccaggcactgggtgagccggggccctacctcctggctggagaaggccccctggacaagggggagtcctgcggcggcggtcgaggggagctggctgagctgcccaatgggctgggggagactcggggctccgaggacgagacggacgacgatggggaagacttcacgccacccatcctcaaagagctggagaacctcagccctgaggaggcggcccaccagaaagccgtggtggagacccttctgcagtaagg

SEQ ID NO: 1906 - DNA, 500 bp, Homo sapiens
  misc_feature (1)..(500): DMR12:122243901
aaagcgagaccctgtcaaaaaaaaatctagaactacatactcagtgaaaaattcattttcaaaaacttcccatttatgtttccaaagttgaaatattcagactttatgatcttgttgaattcccatgtttcaaaaaggagcctgagcaagaataaactagtgaacgggcaagaggaggcaggaaggtgataatgaagccaccaatttcaaagctcggggttgctggggatttcagtctcattatcacctgccacacgtgctgacttcccctgccgcagtcacactggctaaacttgagttttcagcatgaaccacaagttctattatagaggattctttatttgtagtacagatggcttcctcttaggcaaggtaggaaataatttaagacgataaagcaaatgtttatgatggaagtctgtaaactgcacacacttgcgcctccacctaccctccacacaaaaagaactttacgcaacgcgggtctgagaaagtttaaa

SEQ ID NO: 1907 - DNA, 200 bp, Homo sapiens
  misc_feature (1)..(200): DMR12:124223401
cgattttttattgtgggtgtttaataatcatttccactggtacacacccacaaggatggctgaaatgaaaaggactgactgtaccaggtgctggcgaggacagggagctacgagggctctcatacggtgcaggcgggatgtaaaatggtgcagttgctttggaagatagttgggcagtttcttaaaaagttaaacaggct

SEQ ID NO: 1908 - DNA, 2800 bp, Homo sapiens
  misc_feature (1)..(2800): DMR12:125512101
aaggtgcctactagggagctcaaaaccaagtgtgttttctcagaaatcacaaatgtccgcagggacttgggggacatgataagtgagtaaagtggctcaggcctattggaaagtttcaaccctaataaaggggacagtgttctgccccagctggttattaccacatgggaatgtggaatagtgttgcctaaccttctccagagaaggcagaattactattttggggggtatagattctccatatttaaaaatatcgccagctgattcgaattttgtaaaacatgatagtgggaatgattaagcaaagtatggctctggctgtgagcagctcagttatatgaagctgcaacctctgggatttcgatttaattttccccatcagccagaaatgctgtaaaggaacccaatttcttagagtatgcccagttggcacagtcctagattttttttaaagttctgtgtagcaatttgatgatgggaagtcagaaaatctaacgagtaatgagagaatgttttgagtcctaaaagataagtccctgatttagactagtggaccttaagtatttgtagcctgtagacctttgactgccaaccgctgcctgcctggtcttttcagagcatactcagagaaagcagaactgcccttgacaaaacggaaatgaggaggtggtgcctggatcctatgaaactgcagaagtagatggtttgtttatgctccattctgagagccagccattagatcctgatgaaaaaaaaggttgtatgagaggcagagagacgaactaaagacctctagtctgttgaagggatccgtgagcaggaatgtgccctctcctctccaggacatcagtgttggtggggactcagggagtgggaaggatgtcaggaggggaaacgggggtgatgaggggaccccacgcagtggggctgtggcagctgcctgtcatctagcccagtcctcaaagctcagccacagcccagcctccccgggagccttccctggcctgcctgcctacgcaggtctgtctccttcactcacctgcagctcaggggctctgctgcactcggcacatgctcctctgagacccgctcaaactgtgtttaacactcttcattcattcattcattcaacagatgtctaatgagcatctcctatgtcccagacagccttctaagtgtgggggatacattcgtgagcaaaacaggcacttacatacttgtatgtgcgtgtgcgtgtgcctgtgtgcgtgtgtgcgtgtgagagacagcgagagcgtgcgtgtgcgagagagtatcaacattatcaataaataacagtatgttagaagataaaagccatggaaaagctagagccggataagggggttggaattgtggagatgagaacagaattttaactggggtggtcagaggaggctttactgagctggcagccttcaaacaaagacttgaaggatgctcttttttgtttagcaccttgtgttcatgctgatggtttgggatacagttttcctatgaattttttagcttaaaatagacttattcattcagcaaacacttgttgaggatctgcttggtttctactcgcccttcaggtctcagctcagatgccagcttcttactccagaacgcccttccactgtcttctgttgtaatttatattctattttgaaatttaaggtgaccatttttaaattgtatttttttaatttttaaaaattgaagaattttgtttaattcttaaaacaactttcattcttccacttcgtgttcatgatagcatttgtcattatgtggtcttttattttcctgactagtaagacaggagtctcatctgttttgtctactaatgaatctcagtgcccagcacaccacagggggtgccaaataaatattagtgaataatgtgccaggaactgcagtgactatggtgttataataggttttggcttttgaggaacttactgtggtccagtagtgaagacagacgtgtcttctctaagcagagtatataaacagacttacggcctggaaggagaatacggctcaaggctctgctggctggtcgcttcttgtctcccagaatgcaaacgccacacgccccccacccccaacgagttttacagggtatcctattgggtcttttaagtatgttcaaagaattaaacaaatactcattgaactcctacagtttttcaggcactgtgtcagcactacagtcagggcagcagtagtacaggcacgtctgtgtcctcatggaggtcatggtcgagaggaggagtcagaggtccccgtctcccattgtatctcctgagaggcaccagcaaatcctatcttgggacatttgttcagtgtaatcatcactcagtagtttaccttgctttttggtcatcttaaaaattaatgcctagaaaaagtctcataagaaaaaacagatacctgagaccagagacagcttctcttgtcccatttttagaattcccatgtggggaaagtgttaccatctctgcctggtagctcagaaccatccagacgtttgcaaaaaataatctatgtaaatgacacaacttgctggagaacagttcaagctttcgaacttgcccactcttcttcatttcttcctccctcccacctttctgatccctccctcccttccctggtcctgtgaagcagtcactcttgtgatcatgagcgatgcactgaggaacagccgcatgtggtcctggggacacactgctgggttaggtgccctgtccctctctgctgccctgtgtcttctcctcctcctcctcctcctggc

SEQ ID NO: 1909 - DNA, 700 bp, Homo sapiens
  misc_feature (1)..(700): DMR12:125635701
cttgagaaatcaccatactgtcttccacaatggttgaactaatttacactcccaccaacagtgtaaaagcattcctatttctccacatcctctccagcatctgttgcttccttagataccatctcatgccagttagaatggcgatcgttaaaaagttagggctgctttaaatgctccctctgtaggtgggtatcagcaaatttggtatggtttctctttctgctataatagggtggcactgagttcaatgcctcacaattgcggtgctctccctcccccagtgcactgaaatgctctctgcagcacactgccactgctgggagtgggtgtgggtggtggtggtgattcgagactcccttttctacctcttcagtgcctctttcagtgatattaagttaaagccaggtactgttagtgctcccctgagttttggttcccatgaaggtgcttttttggtgtgtagatagttgttaaattggtgtccttgtggtggggacggtcgatggagccttctattttaccatcttgctttcctcttccccgggtttgattgctatatggttacactcagtgcaccatcggcttgaaattcctttagtgattccttgcacttagaatgtgagctaattttccagagttattttctcagtgtccgcttccttcttggctttgaatatttccaatgtgctcaagagagaat

SEQ ID NO: 1910 - DNA, 400 bp, Homo sapiens
  misc_feature (1)..(400): DMR12:125690601
gcagggatcccaggaagcccctggccatgatggggttggtgccctgtgagtgagtgttttctccaccgcatgtccactgctacatggccagcatgtaccgggaggcaaatattttcctctaatatttagatttgggaacatttttttcctccagttgctcttgaaacatgtaaccttggcaggagaaaaatgtactttttttttctcacttaattcagattctaccagtctcatttttagctcacgggattgaatgctgtgtaaatggtttttcaccctatggccccgctcaggagcatttttccataaggaggcatttaatgataagcacaagagcaattgcggtgtttttctctgactgtggtatctgtcagtaaataaccagaatgatactaatgag

SEQ ID NO: 1911 - DNA, 1500 bp, Homo sapiens
  misc_feature (1)..(1500): DMR12:127209201
aatgagcacatggaaagatgatcaacaacattagtcattagggaaatgcaaatcaaaaccacaataagataccatttcccattcattaagatggttataattaaaaagatggaaattaacaagtgttggtgagaatgtggaaaaactgacgatggaaatacaaaatgctacagccacttcagaaaaaaacggaagattctcaacaagttaaacatggagttaccatgtgactcagaaatctttaggtatttaccaagatgattgaaaatatatgtttaaaaaatactgttacacaaatgtccatgggcattactcatattgtccaaatattggaaacaatccaaatatgcatcaacttacagagaacaaaatggttatatgtccatataatagaacctgattcaaccataaaaattaataacattgatgaaacttgaaaaccttatgttaagcaaaagatgctggtaacaaaagtgattcaatttatatgaaattttcagaatatgcaaattcataggtatagaaagcagattagtgggtaccagcagtggtgaggaggagggagagaggctgttaatgggtacagggtttcttttgaaggtgatgaaatgttctggaattaaatagcggtgatggttatataaacctacgactataatttaaaaagtgtattgtgtgctttaaatagtgaatttcacgatatgtggattttatctcaaatttaaaaagaaaaaaaataaaccaccctttattggcttctctttcttttctgtctcactggtctccaccaatatttctgggacacactttctgcataaagaacttgtatttgaattctggtctcagatttttattttgaagaatgcaaattaaggaaaaacccatctcactccaagcttaaggtaaaagtaaagtgccccccttgctagctcagggaggaatgggggttataacatttcgacatctttctccaaagaaatccccacgcactgcttagcctcttggaatgtcactcttcttgtggcctccatatttgtagtcaccatctttacaatgttagtttagcttagcacttcacattgaaaaatgagggttcttaacctcaatattgctttgttgaaccataaacttggccccttattatattttattataaatgcaagaataatgtagcaactcccgtgtatgccggagtgacttcaggaataaaatcttacaaatacagtcgaagcctctgggatacttttgtctccctctcgctttaagatactcaccatcctgagtttggtgctaatcatgtttagtagcccttttaactttggggtttggcatgtttacattcacaatttgaaatacagtattcataaagtggagatttcaaattttgcctttcaattaccatatcgcatgcattttaatgtttcagaaagacacaatctatttcattacaacttactttatttcacctaacaaatcctcactcatagtctgtgctgacaa

SEQ ID NO: 1912 - DNA, 400 bp, Homo sapiens
  misc_feature (1)..(400): DMR12:127405201
cctcctcccctggagcttattttttttcctttttttttttctttttttattgagacggagtctcacactgtcacctgtgctggagggcaatggcacaatctcagctcactgcaacctctgcctcccaggttcaaccaattctccttgcctcaagctcccaagtagctgggattacaggtgcccgccaccatgcctggctaatttttttttttttttgtatttttagtagagatggggtttcactatgttggtcaggctggtctcaaactcctgacctcatgatctgcctgcctcggcctcccaaagtgctgggattacagggccccggccctggagcttattttctagtgagatgagacagcacacaaaaaaataaatgagacagttattaaacaatgga

SEQ ID NO: 1913 - DNA, 300 bp, Homo sapiens
  misc_feature (1)..(300): DMR12:128198401
tgaagtttgtggtacttagttatagcaacaatgggaaatgaatatatcctctaccctaagaacccattcataagcattttcctttcttaaatgtttttgagcctttctagccattgtaagtctccccacaggggtgtgggagaacactgaggatgtaattacttgtatggaacacactttgtggttcagagggcctgaagccaggcctagtttcacacatccactccaccaccacggtggacgtagtccttctcaaatatgtgcctcagagatgacatcagtaaaatggagaatttcata

SEQ ID NO: 1914 - DNA, 2000 bp, Homo sapiens
  misc_feature (1)..(2000): DMR12:128237801
tgagtgtgtatttcttacctactgagatgctgacagatacagggggtagggaacaatacatcatctccccttcccatccccccatgattctgcctttcaatccagtactgggttgaatggtgtctccccaaaattcatgtctacccagaacctcagaatgttgccttatttgggagtagaatctctgcaggtgtaattaagggaaagatggtggtaaaattgtcagaggcatttgaaccagagcaactccatcttgaatagaagctgggtaaaataaggctgaaacctactgggctgaattccctgttaaagcattctaactcacaggatgagataagaggttggcacaagacacaggtcataaaaaccttgcataaaaacaggctgcagtaaagaagccgtccaaaacccactcaaaccaagatggccaccagagtgacccctggttgtcctcactgctgcactcctaccagcgccatgacagtttaggaatgccatggcaactgcagaacgttaccctatatggtctaaaaatgggaggcatgaataatccaccccttgtttagcgtatcgtcaagaaataaccataaaaatgggcaaccagcatcccttggggctgctccgtctatggagtagccattctttcattcctttgctttcctaataaacttgctttcactatactctacggatttaccctgaattctttcttgtgcgagatccaagaaccttctcttggcatctggatcaggacccctttcctgtaacaaggtcatactggattcaggtgggcccttaagccagtgaggctgttctgttaagacacagaaaaggacacactgacacagaggagaagaccatgtgaagacagatacagagatgggagggatgcagccacaagccaaggaatgccccaggaccagaagctggaagaagcaggaacctcatcttgtagagactttggagggagcacagacctgcccacagcttgattttggacttctggcctccagaactgtaaaagagtaagtgtctgtgttttgggccaccaagcttgtggtaatttgttatggcggccccagaataccaatcaggaaactgagacagatcctaaccaaacagcaacatccagcatctcattgcagtgtctgcatttttcatataacattccaaaatgtttttctccatgggtgacaatgatgaagagaattttactttttcagggaaactgacgcagtcctaagagaggcctctttcatggtgccagcccttctgtaacaagggagtagccatagccccagcccagcagagtcctcagccctggaggaaggatgggttccgtggacagcagcgactctatgtctgcatgaagaccccagtcgctccctacttctgttctctcctgattccaaagtgtccttttgtttgcttttaatttatgaccaaatctcaagcagcctcacttccttccagtgcccaaaccaatacatctttgtccaagtataatctcatgacagttgtcagccaggtttttaattgtgaggaagagccgtgcttctaagaatccataagttttgtccacccatgtgccagggattttcaggattttaagcctgtctgcattggtagaaacatgaaaatggaaagcgtaacttgctaacaaggtttctgtgatgaattttatgcaggaatttccccctggggttctgcttgtttatttaggacaaatacagcaaaatagaaagaagaaaagactcattggaccatggatgccttttcaaagcttattttgtgttttaaagaaatgaaattagtatccaacacttaaccattggggcaatttacataaaactcagtcaattcagccacactgtgctccccatttgcacttgggaacattaagccagagttgaacactagctaccatttgaccgggatggtgcaggtctccatttgccacagtccccacctttccttgctgtctgacacctgctctattt

SEQ ID NO: 1915 - DNA, 1900 bp, Homo sapiens
  misc_feature (1)..(1900): DMR12:128475501
gtgaatatatgaattcacactaatatgctttcagatggtgaattacatggtatgtgaattatatctcaataaaaaaaaatttaggtttaagtttatactgaagaccactttattcaggaaaggacaacaagtagaggaaaaagggaaatcaggcagccaagtcccatctcttttgtccttgaatttcttttcagttctttcaaatatgtatcgcaatatttgctggtcccttcatctgtgcagagtgaacatagcggcaacactggcgtcagggttctgtgtgtaacttcacagaagcctcccagcagtcctgtacgaggtagaccctgggccaccccttttacagatgaggaagctgacgccctgcctgcccaggaccccacagctagcaagtgaccgggttgggattgaccaagggaggtaggtggttcactgtcccccatccgcttccaccagtggctcaggaacctacagaaatgtctgccctaccagtgacttttgctctgactttgtccagacattaaatcaagccatcttctgggccctaggacgtgagcttgcaactgagttcctgctttcctccaggtaggcagcaaagggcaaacttcccttcagagtcagtctctgatcatccctgcattctcctctgagttacctgtgactggcagggcaccaccaaaaaaggctgtccattggattaattcgcttggaatgaaaacagcaatgtctgatgcctgtgtccacaagatagggatgcagcaagctcctgggagtcggaatccttcctggcaacctgaggagacggttgcagcgtgcacatggcagtacagagagaaaggctggggagacatcgtcacatttcaaaacctgtgcaatgcagaataaagcaaggccacagaacgaagcttaatgactccgggaggttgtaatgggagagaaagggtgaagaaaagaacatttctcacgtggcttgcagctgcctccagcctggaagtggagcatttcctgtctacatcataaagtcatctagaaaaaagcctcctgtctgatctgatattgatggggactgggaaatgcatttagtgttagaagaaaaagaaaacacagaatttgctaaaatctctactgcattttaactatttagatcttagatcatggagcctagtgtttcccagcctcagctgcacagtacaagcagtcatttagggagttttgcagaaaatacttgggcctcaccccctggccagtaaatgtttgatctgtggcagttgggcccaagtgacggaacttcagataaatgtattgcacagctagatttgagcagcatttgattttatatttgcctactatattccctaagcaaggaattttattatacttcccacgttctgtaggaaagtctcaattatccacataaatactcataaaccaaatctgtacataaaataaaacctcactttcacttggacttaaaatatatcacaattattttttccagaaaaattagctttctgcttgtggtttgcttaagtttaaagtgacttgacatattagttagctactgctgtgtaacagaccacccccaaaactcagtggcctaaaacaacattcatttatgatttctctctattgtgaaggctgcctgggggagggaactggttggccgatttggagtgggctggtctgggaattctgctaaatcttgctgcgaatcttggctggactcactcacacgtcagttgggtagatgcactttgcactgtaaatatctcaacttcatcctgggccaccaagctagcctgggaatgtcttccttatagcaatagcagagaagaaaagaacaagcagaggccttccccgcatgaggccaaagcttggaagcagaaggatcatttccatt

SEQ ID NO: 1916 - DNA, 200 bp, Homo sapiens
  misc_feature (1)..(200): DMR12:129092101
ttcataatccatttccagccagtcacactgttccgttatagggatatagttaatatttctgactctggtgtgcataatccggcacttatgtgaatttaatgccatttccttcttttctgtttaaatgctgtatgaatttaaatcttatttaaatatcaccaacattcttggttaaatttatgttctaatatttctctctt

SEQ ID NO: 1917 - DNA, 1100 bp, Homo sapiens
  misc_feature (1)..(1100): DMR12:129751101
cctgtattaatccattttcacaatgctataaagacataactgagacctggtaatttacagagaaaagaggtttaattggctcacagttcctcaggctctacaggaatcatgactgggggagcctcaggaaacttacaatcatggtgggaggcaaaggaggagtaagctagtcttaaccatggcagagcaggagagagcgagcgagtgggcacatgacgcactttgaaaccatcagttgtctgtgagaactcactcgctattaagagaacagcaaggggtaaatccaccctgtgatctaatcacctcccaccatgtccctcccctgacatggggggattacaatttgtgatgagatttgggtggggacacacagccaaaccatcagtccccacagcatttcctgtgtcgcccccaccagccagcctccagctccctgcatccaccagagtcccagaaagcactgactcaggaccctgcccttaagttgtttgttaaaacataaagataactttggaaggcatttgctttggggctccccagccaaggtgacagatgttttcattatcactctgtgataaactgcaaagaagtgcatttttttggtgcattaaacatggattgtccaacaaagccatgtctgcataacaaactaggatttgcaacttcgctacaaacaccaggatgactttgtctcctgttaaagtggaatcctaggagagtttaaaggcatttctaaatagcgcttttggaaataaagctgatattagtacaatctcactccttgtccctgcactatcctcccttaatactttctcttccttgagatcttaattaaaactaatctcatcagggactctaattcatacaacattaatcttgtataatgtgtcatcaaacttcaactgttatttgcttaacaaaatcccaattctttaaaatgataatgagagaaatatcaatttgccaacacaccatcccctcatactactgggaagattttttatggatcataaccccagccattcagacagggagataaatctatataacttcaatatttaataaagaaataccaaaaaggtgtgaaaatgttgctatat

SEQ ID NO: 1918 - DNA, 200 bp, Homo sapiens
  misc_feature (1)..(200): DMR12:130167301
tgggcgcagctgggtgagtttaacagtgagcagtgcaaggagcagctgtagagcttccaagcaaaatgctccaaggtcttcctctccctctctctctctcttcctctctctctctctctctctctctctactaagctgaaatctgaccctccctcacatacagacagtgagttttaggagaagcatcaaggccttaagtc

SEQ ID NO: 1919 - DNA, 400 bp, Homo sapiens
  misc_feature (1)..(400): DMR12:130365301
cagctttagcttcgtttgtagaagaagggaacagttaactgaggcattgcaaggcgtaaatgaaaatatacgtaatggacttcacacagtatccagtaagtattcaatacatggtagatagttctgggaaaaaccttcaagttgtacataaaggtaaaatatctgaaaattattcttcacttttagaaaatgcaaagtttggacttcaatgtttgtctaatagttatcattagaaccacaatgtttgctttcaaattgaaatgttgcttttaagcttttatagcaacgtatcacagggcagctgatttagactgtttgatgcaagaacaaatcagaaagtcatgccagcatatttgtgacctgtttttgttactatatttgctaaattgtttctcgtgat

SEQ ID NO: 1920 - DNA, 2600 bp, Homo sapiens
  misc_feature (1)..(2600): DMR12:130657401
cctctacacacactgcaggctcccagccggaagcaggccccgggaggagaaagaaaaagttctaagttcagacgaggtcagatgtggtttggatattctcataactaaactgatagagcttgggggatggaagacagagaaagatccatcgtcgaagcaatgcagcggcatccaccggcacctccgtccagggcacaggggagaagtgacccgcagaagggctgtgcgggggcagtgagggcagaggatggagccccagctgcggggggcagtgagggcggaggatggagccccagctgcggggggcagtgagggcggaggatggagccccagctgcggggggcagtgagggcggaggatggagccccagcgcactgggccccaggtcccgccttccactcaaacattttatctcgtttcagtgtgcgatccccaacctctgatgttacacggaaccagctacccaacgagttgttttttacatttcccttttggtgttctatttatctggccttaaacaggcctggctgagaatatttaaaatcagagaacgcacggctggacacaaggcaaaccgtattccacacgcgcatttgcttaggagcagagttcagcaacgtgacgctgcctcccaagggcttgggttgttcccccatcctctctccacgactccgtcccaccttcccagtacttaaaagacgacggcagtaaccaacaatgaatgccccagctcaggagagcagctttgtgaccggaaggccacggcttccaggagcctgaggagggaaggtcagccctgaggagggaacagcacaagccaggctcgcgtgttgacatgaagggttctctgagcccagcctgagcaaatactaacacacaccgcctgtgctggctactgtctagcagccactggtcccgaaactccacacagtcaggccatctctgaagccgccaacacgcacctaccttctgggcaagaacacgaatctgtcatttgcactcgtgtatttgcaatcggtgcgaacactcacagtctctatgctgcatgtggggaacacgcagccatttcaactatgaaaaaaaagaagacggcagacaacagtttaaaaaaaggagaccaggagcatcatatttcactgagtaaattgacaaaaggtcaaaaagcttgatcttggccactgatgtgcttggtctgaaagctaaactgccacttaaatattcataggcaagcgcggtagctgcagcctccggttgccctgagtccacagaggagcaaggctggggccattttatgagaaaaaacaagctccctcccgagccgggttctgggcaggagaggactctgctcctgcaaccagcccgcacccgctgagccttcgttgctgtgtcctgtatcccagaagaatgtgagtgatggtcttgcacagggaggcgggtggcaatagaccaggcggagatgcaagtgcacaacgtgagaaaaaatgctgaaactctcggctctaaaccatgctcttggcatcctcacctcactcaatctcccttcctccaccatgccaacctcccttcctccaccatgccaacctcccttcctccaccatgccagcctccctccctccaccatgccagcacagggactccccgtaaatcatcttcatccccctttgtggaaagactgaagatctgtatatgacaaggtcaagagtgggctcacccagtgctatccaagagaaacaccgtgtcagccacctgcataactttacactgtctagtggtcaccttaaaaaaagtggaaagtaacagataaaactaattttcatattttatttcactcaatgtatccgaaatattaccatttcaacatggaatgaataattaaaattattaatgtcggccgggtgcggtggcttatgcctgtaatcccagcactctgggaggccaaggcaggtggatcacgaggtcaggagatcgagaccatcctggctaacacggtgaaaccccatctctactaaaaatacaaaaaattagccaggcgtggtggtggcgcctgtagtcccagctactcggaggctgaggcaggagaatggcgtgaacccgggaggcgtatgttgcagtgagcccagatcatgccactgcactccagcctgagcgacagagcgagactctgtctcaaacaaaaaaaaaaaagtggaagtaacagataaaactaattttcatattttatttcactcaatatatccaaaatattaccatttcaacatggaatgaattaataattaaaattattaatgccggccgggcacggtggctcatgcccgtaatcccagcattttgggaggccaaggtgggcagatcatctgaggtcaggagttagataccagcctggccaacatagtgaaacctcatctctactaaaaaatacaaaaattagccaggcatggtggcatgcacctgtaattccagctacttgggaggccaagacaggagaattgcttgaacccatgaggaagaggttgcagtgagctgagatcttgtcactgcactccagcctgggtgacagagcaagactccatctcaaaaaaaaaaaaaaagagttattaata

SEQ ID NO: 1921 - DNA, 200 bp, Homo sapiens
  misc_feature (1)..(200): DMR12:131254201
tcccggccctcttttccccactcccacctgtcagcatcctgcgggctctgtctcattcaatgtgtctgtcctctttcctccacctgaatttcaacccccagatctaaccacattcaccccacctctgggttatttcatcagcctccacctacccactgcctgcacaagagcagaaggaactctataatgaggagttagaa

SEQ ID NO: 1922 - DNA, 200 bp, Homo sapiens
  misc_feature (1)..(200): DMR12:132244001
gtggttaggggcatagggacagacgggggcagtgcaacctcaggggcggcaacgtgcagttctcgacaccggcagagtgaggcctcgggccggccactcggaccacggtgcagcttccaacaacctgtggtgcctccacgggccaagacagcctgcggtgcctccacgggccaagagcacaaggtgggaggagggaagga

SEQ ID NO: 1923 - DNA, 5500 bp, Homo sapiens
  misc_feature (1)..(5500): DMR12:132301401
ggcacgtgggaatggtccatacgagaaccacacaggggtttctgagccagaccaaggtgccagctggacacttcccctccggggcacataaagggtccctgtccatggggctgccccatcgtcggcccctgcccctcccaattccacccggaggtagggatggctgtgcgaacattcaccgccggcacagcaggaggactgcctggtggccgcggaaaaggaacatgccatgtggacacattcaggttgaaccagcccttggaggagggacctggggccccactcgctggccagagagggaggccaagccctccctggcaaatgcagcctcccccatgccctgcacaaccttcatgaccctggacagggcaggtgatttggatgcggctccaggggggcacggaacatttgtgtgccaccttcaagatggaggggtctgcattttgctttttgcctccacataaagttatggccacagatgccttctgtgccgtcagaggtagaattcaattgcagtcgtagcaatgaccttccaaccactaggtaacatccatcagacgcttgtccacagaaacacctgcctgacaaccccgaggggctcacgtgtttatcacttatttattaattacatatttaggattgcttatttcagaaattgaaccactgtgtcaaagatagagaaatttcatgaatcttggtgccaagtcattttccagaaggtttagattagttttgtttcactgccagcaatatatgcttccactactttaattagaaagtgcatcacttctgattggaaaagtcataaatgcttttggtagaaaattctacacacacacacacacacacacacacacacacacacacaggatcacctggggtctcttgctgcagggaaaactagtatcagtattttcacactccatattattctgtaagatcacgtaatgcctcagcgcagttcgatccatgtatctggtgtctgccgcctgcattctgtttttatcactacgtcttgagtatttccccacgtcactaaaaattcttcataaacataactttgatggctgcaaacataaaatgtcaatttgtagccgtgccatttattcacccatccattatcaaaactcacggagcgtctgctaaattccaagagctgcctgggtggggcaggtccaggtggccctggtgaacgcagcacacacctgcctgccccccagagctcatgccccatcatgcccacaggtgaacaggtgccagcccagggcagccgcttccacgcaggtgtgggtcagaggcaggggcaggatccccaggaagaggagtcggagggaagagaaaggccaggagggcaggaaggtgtcctgtgagtggctgcgcatgcaggtcagggctgtggcagcagaaaggggacgggacggggtgggagctttctgtgccgctgggatcttgctttgagccttgtaggaagtgggagcgcagaggagctttgagctgagagggagagaggagggtgggcacagtggtcaggttttctatgcagagggaccactccggtgaccgtctaaggggggcgagggtggaacccaggggcctgtgcagagtctgatgctccgatcagccctggggtgagacggtgtgtggacatggaagacgcggtttcccaccctctgtctgtctctctctcgggaaagcctccctgtgtatttcaggactagccgtccccatgcacactgtggctgtcacccctgtggccttcacccggtagtccccgtcagaccctccaccgccgggatgcagtgactgcccaaggctgggcaggcgccctgagtggattcgtcaccaggagagaggcccccaccccgggcaccttgagcagcacagggccaccagggcatcttcatttaacacgagaggcagctgcccagaatccaccaccaaaaacggaagcagaggagagatgagaagcagcaccctctccggggcacagcctcgcccgggcacaccctcacccgggcacagcctcgcccgggcacaccctcgcccgggcacaccctcgcccggacacaccctcacccgggcacagaatcgcccagacacaccctcgcctgggcacaccctcacccgggcacagcctcacccgggcacaccctcacccagacacagcctcgcccgggcacaccctcgcccgggcacaccctcgcccggacacaccctcacccgggcacagaatcgcccagacacaccctcgcctgggcacaccctcacccgggcacagcctcacccgggcacaccctcaccggggcacaccctcacccgggcacaccctcacccagacacaccctcacccgggcacaccctcaccggggcacaccctcacccgggcacaccctcacccagacacaccctcacccgggcacaccctcaccggggcacaccctcacccggacacaccctcgcccagacacaccctcgcctgggcacagcctcaccggggcacaccctcacccagacacagcctcgcccagacacaccctcgcccgggcacaccctcacctgggcacagcctcaccggggcacaccctcacccagacacagcctcacctgggcacaccctctccggggcacaccctcgcccggacacaccctcacccgggcacaccctcacctgggcacagcctcaccggggcacaccctcacccagacacagcctcacccgggcacaccctctccggggcacaccctcgcccggacacgccctcaccggggcacaccctcacccagacacgccctcacccagacacgccctcacctgggcacatcctcaccggggcacaccctcacccagacacaccctcacccgggcacaccctcgcccgggcacaccctcgcccggacacaccctcacccgggcacagaatcgcccagacacaccctcgcctgggcacaccctcacccgggcacagcctcacccgggcacaccctcaccggggcacaccctcacccagacacgccctcacccgggcacagcctcgcccgggcacaccctcgcccgggcacagcctcgcccgggcacacgctcacccagacacacccttgcccgggcacaccctcgcccggacacaccctcacccgggcacagaatcgcccagacacaccctcaccggggcacaccctcgcccggacacgccctcacccgggcacagcctcacccgggcacagcctcaccggggcacaccctcgcccggacacaccctcacccgggcacagcctcgcccgggcacaccctcgcccagacacaccctcacctgggcacagcctcaccggggcacaccctcacccagacacagcctcgcccgggcacaccctcacccgggcacaccctcgcccagacacaccctcacctgggcacaccctcgcccgggcacaccctcgcccgggcacaccctcacccgggcacagaatcgcccagacacaccctcaccggggcacaccctcgcccggacacgccctcaccggggcacaccctcacccagacacgccctcacccagacacgccctcacccgggcacaccctcacccgggcacaccctcacccgggcacatcctcaccggggcacaccctcacccagacacaccctcacccgggcacagaatcgcccagacacaccctcacctgggcacaccctcacccgggcacagcctcacccagacacgccctcacccgggcacagcctcgcccgggcacaccctcgcctgggcacagcctcgcccgggcacacgctcacccagacacacccttgcccgggcacaccctcgcccggacacaccctcacccgggcacagaatcgcccagacacaccctcaccggggcacaccctcgcccggacacgccctcaccggggcacaccctcacccagacacgccctcacccagacacgccctcacccgggcacaccctcacccgggcacaccctcacccgggcacatcctcaccggggcacaccctcacccgggcacaccctcacccgggcacagaatcgcccagacacagcctgacctgggcacaccctcacccgggcacaccctcaccggggcacaccctcacccgggcacagcctcacccgggcacaccctcacccgggcacaccctcaccggggcacaccctcacccagacacgccctcacccgggcacaacctcacccgggcacaccctcacccgggcacaccctcacccggacacgccctcgcccgggcacagcctcgcctggacacaccctcacctgggtacatcctcgcctgggcacagccttgcctgggtggcctcctggagctcagtttggggaatgtttggtctcagtgggccctgagagggaagccagtgaggccctcgggtggagagcgcggcccgagtgcagatgtgagtgccaggcctggggtttccctactggctcctcacagcactgggtgatggggaccagggagccctgggtggggcttgggtccaaaggagctgagtcagggctggcagcacagcctttaggacagtggctctcacagtggcacctgggccggggggctcacggcggggcccaccctcaggacaggggggctcatggcggggcccagactcaagacagtggctcccgccctcaggacagcagcggccacctcacctgggagcctgtggggaccacacgttcttgagaccctccccaaacctgccgggtcagagcccccgtggggggcctgcaggggacccttacacaggcagcgttggaagcggctgtccgcaccggaaccgcctgcggagtgtgagggcgccggcacctgcccgggcctccccacggagctgacataactgccggggcgtggcctggacgccggacggtctaaaccatccccaggtgactctcaagcgcagagcaatgggagctgctgtccgggatggcgaggagtcagcctggctccagggccctggccaggaggcgacccactcaggggcgccccggagccatgcagagaggcctgttgggggtggttctcctggggtctgggggccgaggtccaggtgggcgggcagagcgggggtctagactgtgggcaacaagttcttaaggcgaagtcagttcggacatagtggcttggaggacacaggtgcgtctccaggcctttctgggtacccccacctgccccggcattgctgacggagtgccatggggcacccactttccccaggacgttctccacgccttcccccctgctcagagccagggacaccgcttggttttggaggcagtgatgtgacttgcgcgaggaaaagcagcttcctttcgagattcagggctgaacacaaggctccctccccgccattcatcatcactgcggtaatggaaaagatggctcacttccgcgcacacccgccgcgtgcccgtggtcattctgcttttacggaatcgtcatttgaagttcctttcccatgacccgagggagcgcact

SEQ ID NO: 1924 - DNA, 400 bp, Homo sapiens
  misc_feature (1)..(400): DMR13:18570801
atattagagaaacaaataactgcatatatgtgtggttaaaacttaatgccttctggctttgtcatttataagaattattacctacacaaggagtactgtgctgaaccctttacatttccttagttttttcacataaaagcaaacacgtctccattttctttcttttttttttttttttttgatgttcacctggtatttacctctaaatttctaaataactgtgcaaaggagggttaacccaatagatgagattgctcaaaccttccacattcccaagaaatatctattttccggactagtccctggctggctcatggaagcttaagcactgggcttctcagagtcatgaaaataaggtcactccactttttactctttggttcttggactcatacagtct

SEQ ID NO: 1925 - DNA, 200 bp, Homo sapiens
  misc_feature (1)..(200): DMR13:19108201
ctttgtggcgttctctgtatttcctgaatctgaacgttggcctgccttgctagattggggaagttctcctggataatatcctgcagagtgttttccaacttggttccattctccccatcactttcaggtacaccaatcagacgtagatttggtcttttcacatagtcccatatttcttggaggctttgctcatttctttt

SEQ ID NO: 1926 - DNA, 900 bp, Homo sapiens
  misc_feature (1)..(900): DMR13:20239501
aggacatgacaaggacaaagtcgggggagggttgtcacccccaggaccatctcctcatgctcaaacctgcccgtgctcctgagttccagaataatcgaatcagtccacagtggctgggtggaagggtgagttgtctaagaaggacttgggtgggagagaaggtagagctccaaagctgagccttgcaggaaggcaactggggagccagccatggtgggaggcaggaggaattaagggggaggaggccaggccagagaggggccagcgtggctgtgtgctgactgctgacaggtggggacaatttccagaaggatggtgtgttaacgggggcactccagagaagaacccagaggatgtgtgtgtgtgtgtatgtgaaaatacacacacacaccacacacacacagagattgattttaaggaattggctgtcgccatgtggggctggtgagtacaaagtctgcagggctggctggaggcccaggtgagagctgaggattcctcctggagtcggaaggcagtgtgaggaggacttcttcctcaggggtcctcagtcttctcgcttatgactgtcccctgattgattgaggcccacccccaaggtggaggggcatctgctttgctcaagtctaccgatttatgttaatctcacctaaaagtaccttcacggccacatctagactgttgcttggccaaatatctgggctccacagactagcccagctgacaaccacaggtgagttcattcttcctcccagcagaggcttcggagtcctgccacactgaaagttctagggccaccgcagcccacagggctgctccttccaggggccgatggttgagcagggcagccagtaaaccagaaggtgcaggcccatagggagggctgccgagagggcgcca

SEQ ID NO: 1927 - DNA, 300 bp, Homo sapiens
  misc_feature (1)..(300): DMR13:20556101
aacaattaaccggccatggtggcacacgcctgtagtcccagctactcgggaggctgagatgggagaattgctttaacccaggaggcagaggttgcagtaagccattgcactccagcctgggtgacagagcgagactctgtctcaaaaaaaaaaaaaaaaaaaaaaaaaaaaaggcaggggaggttcacgatatggagagtttgaatgcaggtaagtagctgcaaaatcatggcaaaactgataggaatagaaactgaagtttgcttatacccaaaaaacagtaaactcaacacaattgtt

SEQ ID NO: 1928 - DNA, 2100 bp, Homo sapiens
  misc_feature (1)..(2100): DMR13:22669301
tcgcccaggctggagtgcagtggcgcgatctcggctcactgcaagctccgcctcccgggttcacgccattctcctgcctcagcctcccgagtagctgggactacaggcgcccaccaccacgcccggctaattttttgtatttttagtagaggcagagtttcaccgtgttagccaggatggtctcaatctcctgaccttgtgatccgcccgcctcggcctcccaaagttctgggattacaggggtgagcggccgcgcccggcctgttcatcttttctttcacctttatcactgtgagtgaccttgtgatgcacagtgtggtcaaggggtgagtttaaacaagtattcatcccattagtgtacaatataatactcagagtcataaatcaagtgctacacacggtcacatcatcaaaattcatcctttttttggcacatttaatttttaaatcacttacacaaaaatttaaaaaattcaaaattgttattatttttgtttctccgatgtgtgactgacaagctttttccctcagtcactctctctacccgccacctctctctttctctctacacacacacacacacacacacacacacacacacatatgtacacacacgtatatatgtactatatatatatagtgtcaaatgaacaaatgaaagaaaatggctcctctaactccatccagctcagtgcttctaaataaggatgttgctttttgactttcgccctaccctcctctgggacgctgggtgccagttggatagcatatccatagctctcacttgagaaagcaggaaaacttaaaaatatttgccatttttcaacattctcccctttcctctccctctgcacatccggggtagatacaccaagtactcatggtactgctattagtactttctaaatgctgcctacacagaaagttgtctccattttgcctgcttgtgtgctcccagagcttagcttagacccaagcttccctatcagagcactagcaaagatctacagtgaggtggcttcaggctgctagcctaccctatttcctgcaacatcttcctcagcccggacttggtactctgtcatattgtctgcgggacacatgccccaacaaaatcacaattttttttttcatttagatactgttattctaaaaagtggcattatgctatggaaaccaaaagtaacaacaatgtattgaaatcagatgacattacagatgtaatgagggacatttgtcccatgtgaaccttcatggccatgtaattacagaagaccagcatgactggcgtgtccgtgtggccacagacagctgcaggaggagtgccatatgggctccaatgcttgccccacatgcgtatcttttacaaaacaagcatttgttatttgatttttctcagatgtgcctttccctgactatctaatatgccaaagaaccaatgcagaagttacttcttttgactacaaatatggctgtagatttactgagagtttgtctaaaaagtgtagaattacaccaaaacaacgttgatctaacccaaggttctcttggagacaaagtaggagaagctgcatatctgcttccttcccacaggagccacagatctgcagagcagcttcaagaattctttgttttgttttgttttgttttgagatggagtctcgctcttttttttagtagagacggggtttcaccgtgttagccaggatggtctcgatctgctgacctcgtgatccacccgcctcggcctcccaaagtgctgggattacaggcatgagccaccgcaccggcctacgaatccttcttagaatgttcatcccatcttctccgacctcttgccttgatcatcttgtggatttccaatactctgtagccaattctctgacctactttcctaacttcttcacactttgccttagcactagttcagaactagtccagggacactgtggattcttcttacgcaggcagagatcagtggaaaaaaatgagagtatgaaatgaaacatcgttggccaagcgcggtggctcacgcctgtattcccagcacttcgggaggccgaggcgggcggatcacaaggtcagaagatcgagagcatt

SEQ ID NO: 1929 - DNA, 2200 bp, Homo sapiens
  misc_feature (1)..(2200): DMR13:23142101
tggccaaggccggagctggctccccctgcttgcgggatgtgtggaggaaaaggcacaggcaggaactggggctgtccatggcactcgcaggccagcgaaagttccgagtgggcacaggctcagcaggtcccgcacgcagagcggcagaccggcgggcagtaagggccttagcacccggcccagcagctgtgaagggtgtgccaggtcccccagcactgccacctgcccgtgctgcccttaaattctcgccggtctcagctgccttcctacgggggaagagctcggaacctgcagcccactatgcctgaccccctgccatgcctgagccccaagccacgggctccctcaaggccagagcctccccattggcaccttcccctgctccgcagtgcctcgtcccatcaactgcccaaggacagaggagtgtgggcatgcagggcgggactggtgggcagttctggtggcaggcagctcctcaggtggctctggtgcagtacccactaggtgaagccacctgggctcctgagtaggtggggatttggagaacttttatgtctagctggaggattataaatgcaccaatcagcactctgtgtctagctcagggattgtaaaggcaccagtcagcaccctgtcaaaacggaccaatcagctctctgtaaaatggaccaatcaactctctgtaaaatggaccaatcagcaggatgtgggtggggccggataagggaataaaagccggctgcactggtggcagtgacaatccagtccacttccatagagtggaagctgtgttcttttgctcttttcaatgtatctttgggttttcgttgtcttcattagctgtaacactcactgcgaaagtctgcagtttcactcctgaaaccagcgagaacccaccgggaggaatgaacaactacagatgtgccaccttaaaagctgtagcactcactgagaaggtttgcagcttcactcctgaagcaagcaagaccacaaatccaccagaaggaaaaaactgggaacacatttgaacatcagaaagaacaaagtcaggatacaccatctttaagaactgtaacgcttatcactagggttggtggcttcatacttgaagtcagttgagaccaagaacccaccaatgcccgacacaagactaccggtgcctgccaccaagcctcgctaatttcttgtatttttggtagagacaggatttcatcgtgttaggatggtctccatctcctgaccgtgtgatctgcctgactcggtctcccaaagtgctgggactacaggtgtgagccactgcacccggccccaatgtctgctttttaaaaatattgacgcatatgtctagagataatatatgatggtgtagttttatagttgtcacacgtttggtatttctcgttatcaagcataggtggtatagtagcagaagtcaaaaatcatactgtcctaaacctgcaaatctgtttaccttctaatatttatttttattttacttctttaattttattttttatttttgagatggagtctcgctctgttacccaagctggaatgcgatctcagctcactgcaagctccacctcccaggttctggattcacaccattctcctgcctcagcctcccgagtagctgggactacaggtcgctgctgccacacctgggtaatttttttttttttttttttttttttagtggagatggggttccactgtgttagccaggatggtctccatctcctgacctcgtgatccacccacctccacctccccaatttcattactaactagttatttttctttctggatgctgtcaagtatttatctttgtaatatctaaaaaaattaaaattgttttctttaattttgctaaaaatggtaaaactttaaatatttgcatctttaagagaaatttcctctttttttcctgctgctccattttctctagcagctctactttctttttctctgtttctgaactcctgtaatttacttcttctgtctttgaaatctatcctctaagcagtttgtgttttctccacaattgccatgtctttcttttacctttatgttataaagaaaattacctccttcagtcttaatgatttttttttcttttttatctaaagtgctaatacctgaacttcccatttactcagtgactttaggtttctcttctggtctgccagatttggtttcc

SEQ ID NO: 1930 - DNA, 100 bp, Homo sapiens
  misc_feature (1)..(100): DMR13:23402301
tgacaatggtttttgtttggaatattgctgttggatttaagaaattccttttctgttaagctatctataacagttaaactacctataattcacaatctat

SEQ ID NO: 1931 - DNA, 300 bp, Homo sapiens
  misc_feature (1)..(300): DMR13:25359101
attaagtcctgtaattaactgagataacttccaggaacgtgaagagaaacaatggggaaaaaaaacgaaagcgaaaaaacagaaacaacagggttcatcctacttcaccccagaaaaatctgttaatgaaggcccaaggtaaagagtctaaactgccagaattgactctataaatttatgtaggactggtacaaaagacatgaagactgttatatgaaaaaatataaaatatcagagcatatcacatacagtaagggcaagtattgttttgttaaactgattttacttgtaagcatgttg

SEQ ID NO: 1932 - DNA, 400 bp, Homo sapiens
  misc_feature (1)..(400): DMR13:26355701
ggccattggggtggagtcaagttagggaaaaacatttctacttttgagctaccagtcctttttatgatctctaaaagaaaaaactgtggcttaaggacatttttttccccgtagagtcagttatgctaagatagctctacattttctttttcttgtaaatttttttttcacttgaaatacatatgtatattaggtaaatacagactggtttttaaaaccaatatttaaatttcatgtaataatataaatatacttaagccacttagattagtattaagtatggtagtgaaaattatgataccgagtttcttttatctctcttatggtaaagctcttcctgctaatgcatcttaagtagattctctttgacataggggtagtatagaacagatcatttcag

SEQ ID NO: 1933 - DNA, 500 bp, Homo sapiens
  misc_feature (1)..(500): DMR13:26818201
cccctatccacttccctttctgcagcaagaaagatgcttaaagatgcaatccaatctagtcctcctgggcttaaagacaggatatccagcgcacctgtcctacactagtacaggggctggattccacctgttgatgttaatgacgctacattgttgacctgccaattgaatagagaagacatagaaatgatttttaaaatatactgtcagctgggtgcagtagctcatgcctgtaattccagcactttgggaggctgaggctggtagattgcttgagcccaggagttcaagaccagcctgggcaacatggtgaaaacccatgtctacaaaaaatacaaaaattagccaggcatagtggcacacatctgtggtcccagctactcaagagcctgaggcgggaggatcacctgagcctgggaggtggaggctgcaatgagccatgatggtaccactccagcctgggcaacagagtgagttttattctctctttctctctctct

SEQ ID NO: 1934 - DNA, 500 bp, Homo sapiens
  misc_feature (1)..(500): DMR13:27437801
atgacaaaaagttaggtctccccaggtatactaatgttctacaggtgaaaaatacaactttaaaacaaacagaagaaaagacagaatggtttgtgatctcaggataggggatggaactcattaagaaaaaaaggcaaaatgaaaaatctaactgggatacggttttttccatcatacacaacagagaaccctataaatcggagaaaaaccatctacgtagaaaaataaaggaatataaacacgcaattcacagaagaaaaaagtgaaatacacattaatttctcaccattaaaatgacaaatgagggaggaggtagagaaactgcatacactgctgctgagcagtttgatccatttaggttcatagaccctagagtatgcaccagggttcatcataaagattgggggccaggtgtgctggctcacgcctataatcccagcactttgggaggctgaagcaggcagatcgttggagctcaggagttcaagacctgagcaaca

SEQ ID NO: 1935 - DNA, 2600 bp, Homo sapiens
  misc_feature (1)..(2600): DMR13:27664501
ccatttttctcagatattttctctgtccttgtaggctcaagagctacctatttgcagcaggaggtattttcttgtttttcttccttttacttccagattcagtgccattttggttttctgagatggtctgacctctgtgagtgaggctatgctaatgcctgactgcttatacttcacctgtacagtactagtccacacaattcctatgtggagtgttgttggcttgattttgaagtattgtttggggttctctgtaaatcaaagttttatagaaatgtggctattctacattcgtttttgtttaataccagccaccctgaataacatgattttgagaatcagcatactcctaaagtagcccatcatatggcagacacctcaaggctaagagaaatatgaacgttctcatttgtatagggtcatctttttgaaaatgaaagatttattaacacctgaaaaagataatacatagtatataagtagatctaagcacattaattagcaatttgattggttgcagcctctcctaggtaaacttgaatcatgaaggtactgaaatatatcctgcacagaaattcaccagggcaggagattgagtaaagtgctcctccacagagcatagcctggcatcctgaaatagaagtgtaagaatttttttaagtaaaagattattgcatatttatggattctttacacaatttttttattctatagtagatcctttagctcctgtatttaatatacagcagaatatactttttagtttccttggaaaggaacagttttcactgtctggtaataaaacgcaagatgcaataaatttaatccaaaataagttacagtaaaatagggcacttactagtttgaaagaaaatattaaatgattctgttagttcacagtgtggtcaatacctgtacatatgaacttcagtaggaaatttagtcccaggaaggaagaaaggtttaaagtgttccagccagtcttgtctcaagaattccaatcgtctttttttttcctccctggtactcagagtttacactaggtggcatgcaaggaaagctaacaaattcagaaactcgattctgtgggagcaggattctttggtactaatcacgatagtgggtccagctttggagttaaccatttgatttgtgatggtttttcttttctcctccccaccccaggatgaagtgtcctcttgctagcaccaataaaagatttctaattaacacaattaaaaacacattgccctctcataaagagcaagaccatgaacaaaaagagggcgataaggaaccagcgaagagccaggcccagaaagaagaaaacccgaagaaacacagaagccatccttacaagcacagcttccgcgctcgaggttccgccagttactccccgccacgaaagcggagcagccaggacaagtacgaaaagcggtccaaccggcggtgaggctggaaccagggccagccagccctgcgggcctccgtgctccttcggggtgcggtgtgcggagaaggcctgagctggcagggcaaacacctgagagtgactttgacattaggtcctttgttgtttttaaagaggctgctggccacaggcaaaaaaaatgacctagcaactcttgaggaaacaagtgcaaaggaggatgtcttggcaagtttaagctacttctgcagtgtagtagacttacatattgttgtttatcttgtttggaagtgtgtttcaaaataaacatgtctagaatttaaagttttcagagattgttaaaactggttccaattttttggtcatttctcagaaaaataaaatacttataaatcctatattttactttttgggggtattacatttaaaatttagaaatcatcagtccagtgaccatatttatgaaaagctgtagccctccaaggtctgggaatttatcgagaagctctttgatagctctgcatttgttttcccttaggtgaacaatgtaggaaatcctcaaagtggctttgaatttaatgctccacttcagttaccagaggttaaaaatgggttttgttgtttcctgtgcattctcaaactcatttattagatagaacaatctttctatatttaatttttttaatatataggtcttaagtggtgctttaaaaagaaccctcacaagttaaaaattaagagttgtttcagtgctagatcttaccagctaaagacttgtgataccactatatagtatagttgttccagaaatcttcattttaaatagaagtgtttacaatgccttttttcccccagtattggttttcaatacctgttttcatatacaattacaaacctttcaaacctgtattccttctttatactcaggaaaatgtcaccaagcaccctcctccccagttcacaaaaggaagaagatgaagattctgtctccctgttccccctccccagttttccaaagtgtctgagcatatgcctggctgtcctcagatcatcaccatgccacatccctgctccctacttcctggcagccaagaaaagccctttctacatgctagaaggaaatacatccaaaaagttagcattggagtgttagaaactagaatagacctct

SEQ ID NO: 1936 - DNA, 800 bp, Homo sapiens
  misc_feature (1)..(800): DMR13:32532301
ggtaagaaagatcccactgttttactcattctctcaaattacttttaaaaacctctattttcttccagtttccttgctggttttgtttttactcttagtcctttatccatctagaagttatttttgtgaatgatttaagataggggctttaaatatttttccagactgacaatcaaatatcctattaccatgtattgaatattttgccctactaatataaaatgtcatttcatcaaatattaaattcttttatatgtaggttatgtttctggattctcttttcttttttcttttttttttttttttttaagacagagtcttgcactgttgcccaggctggagtgcagtggtgtgatctcggctcactgcaacctctgcctcccgggttcaagcgattctcctgcctcagcctcccaagtagctgggactacaggcacatgccaccacgcccagctcatttttgtatttttagtagagatggggtttcacaatgttggccaggatggtctcgatctcttgacctcatgatccacctgcctcagcctcccaaagtgctgggatcacaggggtgagccaccggcacccggcctttttttaaaaaaaaaaaaatagagacagggtctatgttgcccaaactgatctcacacttctggcctcaagtgatgctccccacctcagcctcccaaagtgctgggattacaggtgtaagccaccacacctagcctgtttctgggttctctaattttatctatttgttcttttgctaataattgcaaaattttaactatagtagtttctaa

SEQ ID NO: 1937 - DNA, 300 bp, Homo sapiens
  misc_feature (1)..(300): DMR13:33368101
acacttcttatctcaggggagtaaaccccatgactcatatctgcctccacttcctccttaaagcccccactaactctttgcaatgtgtcccgagctaggtcacatctaaccagcctccctcctcgatcctggcccagtgcctgtaacatagaaaagctctttcagtgaaatggtactcctgagaatcgtagatagatctatgccggctctctttatactcaaatgtcataattaacattcactcactcaacaaatatttgttgggtaccttctatgtaccagacactgtgttgggcacat

SEQ ID NO: 1938 - DNA, 1900 bp, Homo sapiens
  misc_feature (1)..(1900): DMR13:34732501
ttctatttccattgacttttcagcaggagcagcaggctgccctcaccacctggctcacgaacaaacatgagctaactcacgactgttctaccatcacaatcttcagttacacagaatgccaaaaaagccagcaacatcactttgttgcctttctttcttccttccttctttcctttatttctaagcaagcagaaaaagaaaatgtctttatcaaggctggtcagtaaaaaaaccagaaggtacacattgcatttcttattgtgtacatgtgagtctactcacacattggcatatgaatttattgttctgatcaaataagctaattacgatggaaacatcatgcgggtatatgccaatgacctctaaaacatacagccagtttagagtgctgtgaaaaaaagatcctgaagcaactgagatttctgatccctaactgcaagttctgcatcaaagggacatcgaatctggggctgaaaggccaggtgtgcgagcagatggaaaggggatgaggcaagagagatggaagttaacatctgtaaaagtgatttattcacacgcacacatgcatatgcacacacacacaaacgcacatacacaaaatgtcttcttgaaaatcagaataaggagagaagaacaatcatgtatatctttggacatgaatgtctccaacagggatccagtgattctctttaaagaactactccacctgtttgctttgtgtagaatcattaaaatactgactgatacagaagacactgaaaattagacttgttttcataaaactttccaatataagatttacataagcccaactaagtacttattccatgatataataacacaagtacatcctctttcattgactcctacattacatagactcactagtatttgcattttaattagaatagtatctgtaaaattttctccttaccattttaaagagtttatctaacatttccagacaaaaaatgaatccactttttgagagaaagtaaaataaaaaaataaactcattatttgtggaattgaagcagaattaaaacaacgttacatcaattatctgaccaggatactaactttcatttgctacttcgcacatgtagtgtgtctgttttctaaaatgtcaaataaaaaaataatcaagtactgaaagagcctatctcattggagtttgtgaaaaatcatggaatttaagttcgaaggaatgtaattagcttgcttggaatttggctagttcagctgagttaacaccatcgttctttcaaaaatgtgccacgagacccataagcttagggaatacaatagctactcatgacctcaaggacaaattgcttcaagaaagggtctcttcaagtcagatgcaatcccttgtctaatgcacattaccagtcatcagttataggccagtggaaagaatagttttcatctcatttgccaaaaactcctgctgcaataaatcagcaaaaatgtactgagtgcattgtgtgaagaaagcctaatctattgtgcaatggggtttgctcatatggggttgctgaagtaaactcagcattactgcaaatcctgcttaaaatcccttactctaagctacacgtgcagaaactctgtaacccttaatatttcacccaatcagaatttctaaactgttcctttctttccaatcattttgtcctacaaattaatgctttttgttaacctatatattacagcatttaaaaactattaaattttctgtagttaaccttggctggattattaaaagcattcctgtgactctgaatgctgtctttgggcctcaagcttggatctttttatgcacttgtaagtttaaggctgaagtgagtacagggctcaactctgcatttgaaaagcctgtctatgactctataaccaggag

SEQ ID NO: 1939 - DNA, 1500 bp, Homo sapiens
  misc_feature (1)..(1500): DMR13:35441401
gtagagcaaaaccaccattcatttttggcataatgtaattaaaatacaatataaatgctaacttgcatgacctatcaaagcctatatgtttgggatatgccatatcccaaatgaaggccatgttgtcattaatgccaccttaattctttgacttcttgctggttccttcccctaccttcatgacccaggccaccttcacaaaaattgctgctccatcagtgatcaattagggaattgtcaggtttataaatttactaaatgtgccatggggataccaaaatcactaaatgattggattgagatcaaaaactgagaatattgtcttagtgcatatgctatctgcaagatggaaaaataaacttgtctcctatttgaaaatacatggaatggaaaaaggttaaaactctagtaaacaaggaatgctagatgtgaaaaaaaaaaaaaaaagaagacactgaggtaatgtcacttactgtgcaagaaagtctccccaccctgtcagcccactctcaagttgtccagttaatcttttttttcattctaatagttgccaaactttctaattcacattctgctgctcactagccatctacccgtattggtacatgatgcaggttcctttcctttgtgcctccctccctgcctccctcctttccttgctttctttcagaaaaacatatgctcattataggaaataccaacaaaagtgccaaaaaaatttgaagaagtcatccacataaagataactgtctttatcattttcatgtatttatttcatgttagtctttttctgtgtgtattttatcatagggaccaaacgctatgcaatgtactcatatagtcacaaagatgaatagtgcatcatctctgctctttatgatatttagagagttccaaaaagacgcaagttttctatatgttttattacgtttttttacaagtaaaatgtgccctgcgatttttagtataatgaaatctcattttaaataattaaaaatcttaacttcatggctaatcaaaatcctgtcgagtaatatcccgtctaaaatgtggagagagtctgcgtttaccgtcacgtatattcttaaaatatggtttatcaaattttctttagaaagcatagaaggcagttttctacgttgactccattaagaagattattaagttaacatttcatacttatatagtgcttcacttaaattcaataatattttcttgcacttttttaattgcatttctctgtttaaaaatactgtttatgaatttcccgtttgttggtctgctctaaaaaatattgcttacctatgaatattttgaattaggaataaatgaaattccgtttttgctgtcagaaccaaattgtaaaaatgaattgcatgactttgaaaatcagtatactctattagcaggcctgtcaatataaaaagtgcattccatttccacctcttgctctaataaccttttctctgttactctgaggcagttcacataatcagagta

SEQ ID NO: 1940 - DNA, 1400 bp, Homo sapiens
  misc_feature (1)..(1400): DMR13:35661401
aaagaagttagaatgaatgaataaataatttcaccgtatctgtcttccattcttcactgaatactctatgagtacataaggaaatgaaaccacatcatgggtgaatttgacattttccaacccacagaatgtttttacttgcattatcttgggaccttgggaaatgcgggtccaagtgtatttgatacttggaacagacctccacagcacctgcctgtggctgaggagttggggtcttgataagggactcctgaccgataccgctcttctcagctattccagcaaatttctaacataatatgttgaaataaatcttgaaatcatagtagtaatgaaactaccataccctttgactaaatcccttattctgggattttaactttcaaaactccatcatattttatctaagtataaacatgaataaaaatatcttctgccatgattctgcagtgacttccccagggtcagaaataaaatctgaatcagattttatcaggaggttcatcctctcactgtgcagcggaggtcttagaaactccactggctttgtttagttctaaatcagaaagaccacagcttcccctgcatatcagtgtcccacaaatgaggtttaaaataagaaccatgagttctttactttggccatttctctaaaagccagagaccatctcactaaaaaacctctcctgtctatgtgaataagcagcatctaatactagtatatttttttatcatccattttgagaatattgaaatgacctttgataaaaggaggatggaatttgtttattttaagccttttaatattcggagtttccaaatgcatgtctataaggaatctaaaaattggacgtgtttgttcttcatcagttctagtcattccagcacacggtgagtgcttctgtggaggcagtggtgggcctgagggcaacggcggtggccctcagaggggcggtccacctgcacctccctctgcactgggccctttaaccctgggctacatccatcaactgtgatgtgacagtgacagaatattcctaggattttgaatgattgttggggtgtgtgacatctgtccctagcaacgaaatgaaatataggaaacaagctttcccgccgctgcaggtttcccaactcagaaagcctggaatggcattttatttgcctttcacttaaagaaggaaacagtgctttcaggggccctaaaaaataccccctaatagttaagttccacagtttattcagatgatctggggaaatcgtaatgaaaaaaataaaatattttaaactctctaaatcagacatgagcctttgaaaaactcatttcctagcagaaaatgtataacatgcataaggaatatttttatacattttttttctcaattccctgcaataggatc

SEQ ID NO: 1941 - DNA, 600 bp, Homo sapiens
  misc_feature (1)..(600): DMR13:36814801
attctttcttgtaaggaggtaagaattgaggtcactgcagaccggtacggattcattgctcctaacaaaatgtctagaaaaggcaaatctatggagacaaagattagtggattcctggggctggaagtaggagcagggattgactgagaatggataataagggtcttttgtggagagatggaaatgttctaaaacctttttgtaaaaatgattgcaactctacaaatttactaaaaatctttaaattgtatacttacaataagtggactttatggtgtgtaaatttgtcttagttcatcttctgtcactgtaatagaataccacacactgggtaatttacaaagaacagaagtttatgtggctcacagttcaagtggctgaaaagtccaagagcacagctctggcatctgatcagggtaataccaaagttgaagggcagagggcagaagcaagcatagacagagtatatgacactgaatttatctgtttatcaggagcccactcctgtgataactaagccataacggcattaatccattcatgagggctaaccacctcttaaaggccccacttactaatactgttaacaatggcaattgt

SEQ ID NO: 1942 - DNA, 600 bp, Homo sapiens
  misc_feature (1)..(600): DMR13:37251301
accactcctcctccaaaggaacgcagttcctcaccagcaacagaacaaagctggatggagaatgactttgacgagctgagagaagaaggcttcagacgatcaaattactctgagctacgggaggacattcaaaccaaaggcaaagaagttgaaaactttgaaaaaaatttagaagaatgtataactagaataaccaatacagagaagtgcttaaaggagctgttggagctgaaaaccaaggctggagaactacgtgaagaatgcagaagcctcaggagccgatgcgatcaactggaagaaagggtatcagcaatggaagatgaaatgaatgaaatgaagcgagaagggaagtttagagaaaaaagaataaaaagaaatcagcaaagcctccaagaaatatgggactatgtgaaaagaccaaatctacgtctgattggtgtacctgaaagtgacggggagaatggaaccaagttggaaaacactctgcaggatattatccaggagaacttccccaatctagcaaggcaggtcaacgttcagattcaggaaatacagagaacaccacaaagatacccctcgagaagagcaactccaagacac

SEQ ID NO: 1943 - DNA, 700 bp, Homo sapiens
  misc_feature (1)..(700): DMR13:37915401
tcaaaattttgactactatttttctgattgtagatctctcatatttatcacacttgtagtttatggtgttctggatgcttactctttttttttttataaatacaggagtgtttcagtcattatttctcgaaatatttttcctacttctttctttcttactattatgtgtatgttggtgttccgtagttatctgagactgtgttcctttttcatcattcatttttctctctgtccttcagcttgcaaaatctctgtgtgcctaccttcaagttgttaattctttcttctgttagttcacatctactgttgatctcaatctagtagtaatttttaaatttattatattttttaacttcagaattttcatttggttctttttgatcatgtttattcctttattgatattctctatttgatgtggcattgtcatcatcatttctttttattctttaattatgctttcctttaggtctgtaaacatatttatattggcaatttttatgtccttttctgttaaatctgatatctggtcatgttcacaggcaatttctgttgcctgatttttaatattttttcttcttctggcatacaggttatattttcattttgctttatgcctcataattttctaagacttcttagacaatatatttgtagcaactatggttacttctccctctcttacaggaattgttactgt

SEQ ID NO: 1944 - DNA, 2400 bp, Homo sapiens
  misc_feature (1)..(2400): DMR13:38852701
catcttttttttttttttttttgagacagagtctcacgctgttggccaggctagcatgcagtggcgtaatcacagctcactgcagtctccgtgtcttaggttcaagcgatcctcccacctcagcctcccaagaagctaggactacaggcatgcaccaccatgcccagctaattttttgtatttttggtagagatggggttttaccatgttggccaggctggcctcaaactcctagtctcaagtgatctgcccaccttgtcctcccaaagtgcttggattaaaggcatgaaccaccaaactcagcctgccatttacttttatcagtaattaaaacaagtcagttctggccgggtgcgttggctcacacctgtaatcccagcactttgggaggccaaggcgggtggatcacctgaggtcaggagttcaagaccagcctgaccaacatggcaaaaccccgtctctactaaaaatataaaaattagccaggcgtggtggcacacgcctgtaatcccagctacttgggagcctgaggcaggagaatggcttgaacccggaaagcagaggccgagatccgccattacactccagcctgagagacaagcgcaaaactccgtctgaaaaaaaaaaaaaaaaaaacaaatcagttcttctctctcacttgctctctctctgaattatttgcttacaaaataaaagtaactttatgtccaatattacatttatgaattatttggagtctaattattcactgtgttttctcctttcctacctctcactatcaagagtcattagttcttgatgatcttagcacgtcaggcattcatctttatctaatttacaaacaaagctgagaaaacaactgataggtatcactgaatcagtaataaagttagtgaggcaacataaaaaatggcgtcttctacaaaggagcttgtatattctttccatataatggttataatttgatgaactactctagagcttcaaagttatccccagattattctctatgtaaaacaaaatatatatttgaaataaatcacatgtaatcccagagaagggaaaacaaaactgattagctactgaattataaaatattaaatgtctttctataatgagcagattttacatgaaagaagtgtcttttaaatattgataacatgacttttaacaaaaaatgtttttcttggaagtaaaatgattccttttgctaaacggaaacaaaattatagctatgtagtaaactgaaaaataaagtcagaaaaaagttaaaacattaaataaacctgttggtctcttttatccaataaatgtcaacatgtgttttataatgtttatattaaaaatttaaggaatagttttctgaaacattttctaatttctccttttcaggttcaaactgaagtgagttctttgcaaaaaaaaaaaccagaaaaaattaaatatagaaaaaaagttgaaattttttcatgctaaaatagtctaaagtgacagaaaaagataaatgtgaatgagaaaacttgaccaccgtccagcaagtatactatcagaaaacaataacaaatatttaaaataaatatttaattttttaaattctaagaaatttggtttgtataactcaaggcatcacaaaaccttgaatgcttacatgtctaagataagcaatgaaaacgagtaaaccaaggaaaatatgatagaaaatggaatgattatagtgtcattaagccagcaagcccattccttgccaagaaaaggctgtattatcacagcctagtgttcgtagtcttctgccatgcaggaaggtgccaaaaaactcaaaaatctctattttcttatgaaattcccagatatttaagtgttagaaacccagtttttaatgtcacatcatacaggtcaaatcaaacaaatgattagctattttcttctctggaacaagaactgtaagttctctcagggtataagaaatctgagactgatgggctcattatgatatgtgaaggctgataggaatagttgctgtatctagagacagagaactaattttaaaaagaaaaagaaaaaaatctttaaagataaagagaagaaaattgctcctcgtacctgataatttaaaaattgaagcagaaaaaggaaaatgcactggcaattcattttcttcttccagactctaaaggatttgtaatttagaattataataattgaactgcagctacatcagaaactggcatctgttgactcttctaattgggataattatgctttataggctttatattttctcctttgaaacggtatcttaaaaggtatagtaaaaccaacaaaatagtttatccatggtttacagtatgatcagctgcttaattacgatttcaataaaatctgataattgtcatgtttttt

SEQ ID NO: 1945 - DNA, 200 bp, Homo sapiens
  misc_feature (1)..(200): DMR13:39369501
agtggccaaatatatacagaaacatgatggcagctgctgtttctgtgatcaaaaattcatagtaggtttccttccttccttccttccttccttccttcctccctctctccctcccttccttccccctttcctttcctctcattctccctcctaattttttaaccattcaatagatggcagatatatggcatgccagtaag

SEQ ID NO: 1946 - DNA, 900 bp, Homo sapiens
  misc_feature (1)..(900): DMR13:41342601
aaacaaacaactaacatagtattcacaacatctgtagcagcttaatgagaagattttatatgtaccatagtctgctggtggtctgagtcataatgccaacaaattatttctgtaacgcccatagataagttgtccagtgggacagtgagtgagatgtttgaccagccatttcatatggtacacaactaatgtgtgttgtgtattaccatttcacattgatgatatttataaggaatcttatctcctcacttttctgttggcatttgtgtaagtttgtagcactcttccatcagtttccgtgttctcaaatagtaaaagtgctgagtaacttggcacaaaagtttagaagtaatttttcatcaaaaaagtgctataattacaatatagaaaatttggaaaacagaggaaagatcttaaaaaatgggagggaagcccaaacaaaatccaattataaactgccacatgactatacaatttaagagcatttacacatttatttatttattttataaataagtgaaatagcatcttgatctgtctctcaggctggagagcaatgaatggcccaatcgtagctcactgtagccttgacttcctgggttcaagtgatccttccgtctcagcctcttgagtagacgcgtgccacgatgcctagttaattttttaatttgtagagatggggtcttgctgtattgttcacgctgatctcaaacttctgggctcaagtgattctcctgccttagaatcccagtgcactgcgattacaggtgtgagccaccacgcctagctctaagagcattttaaatgtaattcctttcacagtttttttttactgtgaatttaattgtgatgtatctatgcagctgtagtcattttgaccataaattttgttctttgttt

SEQ ID NO: 1947 - DNA, 300 bp, Homo sapiens
  misc_feature (1)..(300): DMR13:42704501
tcacaacatttcattccagttcatctttgttgatgcaatatttagctctcagtaaggtctaatattgtttgtagtgatggtaatatcttgctactccttcatttggataagttatagatatgttaaataaaatggatactacttcctgtgtcttggcaagctctattcttacattattacacccaactttttgtactcttagcttcttctccaaatcaatccttctccagagaaaactttttttttctttcaaatcagtgatgatggtttttttttttgttgttgttgttgttgttgttt

SEQ ID NO: 1948 - DNA, 1200 bp, Homo sapiens
  misc_feature (1)..(1200): DMR13:47810001
cagtagctgggaacatggagaatacagagaacgttagccaaaattaagaggaattatatcaagattggggtttggaaacttgaaacggtatttattccataaatatatgaggagctgcatattaccccaggcattgggggatttttccttaaacaaaaaataccaaataacacataagaacagttattattacttttaacatccccctagtagagactcttgtggataaattccagcttggttaggaaaggaaagatggatgtgcaagtataagatgcagccacgcattataaatcatttctgaccaaaagggctgtctaaagtgaaactggccactacatctgatcacaaattacttccaaagacacatagaataattggagattaagataagaaagatcgcctgtaggagagagtataggctctgagttgtttctcttaaaagttttgatacggatttttctgaataggtctccatcctgaagagcaaaccatcaatataagcactcattacttcaacatttgtgttcattgttaaacatgtttctccagcaaagataggctaaaaatgcaaggaagataaaattcaataagtttattttgcaatccttctcaaagacgctgaaataaatattcaaaaaagtttagtgatagtgattatccctaggaatagggatagtacatttcatttttcacacagatcccagcttcatccaaggacaatcaaaaagtcactaaatgacgagctctgtaaaaatggcaaagacggccaacaaattaagtaagcccagagacacagcaggagggaagccatgaatccaagacacaaaaggaaatttgttctttgaactttatttcttctttcctaaaattaatggcctaaaactgtagcaatcatttgtaaaaatataagtcacatattcacttacacaatttgcccattttactttctacatttactctcaagtaagctgacagctggagagaaaaaggtgcaatcagccaagaaagtggctttagaatgaagctaataggcagttattatgttggttaaagctggtctcatagccagggttctttagaaaaacagaaccaataggatagattccacataaatagagatagagaaaagatgtttcatgggaattggctcacgtgattatagaggccgagaagtcctataacctgccacctgcaacc

SEQ ID NO: 1949 - DNA, 1200 bp, Homo sapiens
  misc_feature (1)..(1200): DMR13:49175801
gcttttgcacattcagtatattggctgtgggtttgtcataaacagctcttattattttgagatacattccatcagtacctagtttattgagagtttttggcatgaaggggtattgaattttatcaaaggccttttctgcatctatcgagataatcatgtggtttttgtcattggttctgtttatgtgatggattacgtttattgatttgcatatgctgaaccagccttgcattcctagggatgaagccaacttgatcatggtttttcgatgtgctgctggattcaatttgccagtattttattgaggatttttgcatcaatgttcatcaggcatattggcctgaaattttcattttttgttgtgactctgccaggttttggtatcaggatgatgctggcctcataaaatgagttagggaggagtccgtctttttctattgtttgtaatagtttcagaaggaatggtaccagctcctctttgtacctctggtagaatttagatgtgaatccatctggtcctgggctttttttggttggtaggctatgctggaaaccattattctcagcaaactaacacaggaacagagaaccaaacactgcatgttctcactcacaagtgggaactgaacaatgagaacacctggacacagggaggggaacatcacacagcagtgcctgttggagggtggggggttaagggagggatagcattaggagaaatacctaatgtagatgatgggttgatgggtgcagcaaaccaccatggcacatgtatacctatgtaacaaacctgcatgttctgcacatgtatctcagaacttaaagtataattttttaaaaaatcagaaaaaaaaacattttagtgtggcattaatcctaatacaataaatattgccactcctaatacagtaagtattgccacagtagttagctcatttcccagtcctttgaagccttggcttgttactgtttgggagaggttaggtatgatggagaactcagtctttttttttcttttgcaacagggtcttgctctgtagcccaggctggagtgcagtggcacaatctcagttcacttcagccttgaactcctgggctcaggcaatcctttcacctcagcctttcaagtagctgggactacaggcacatgccaccatgcctggctaattttattttttgtagtgacagagtttcgctatg

SEQ ID NO: 1950 - DNA, 1100 bp, Homo sapiens
  misc_feature (1)..(1100): DMR13:52418301
gcacagtggctcacacctgtaatcctagcactttgggaggctgaggcaggtgaattacaaggtcagtaattcgagaccggcctggccaacatggtgaaaccccgtctctactaaaaatataaaaattagccgggcgcggtggcgggtgcctgtaatcccagctactcgagaggctaaggcaggtgaattgcttgaacccaggaggcggagtttgcagttagccgagatcgcaccatgcattctagcctgggcgatagtgcgagactccatctcaaaaaaaaaaaaaaaaaaaaaaaaagtaaaaaagtaaaaagaaacatgaaattaattttaatgcatatattttaagattgaacatagaaccaattcaacatataatcaatacaaaaaattattaatgagatatttaacatttccttattttgtacgaagtcttctgaatctggtgcatttttatacttgcagcatatcttgatttggattaactacatttcaagtccccagtcagcacatgatgtggctatccttgtggacagtgcagccttaacaaatcagcatagtgtggtgatgacaagcacagctttcagtcccacaggatggctccagagccagtccagcccagatccaaatacctgtcaaaccactgtctctggctgtggccttgctcaagttatttcatctttctaagtttcaatttcctattcttcaaattatcccctacactaaaagtagccatgtcactgagttattgggaggataaatgaggtaacacatgcagagtgtccagtggatggtaagtactgactaatggcagctatgatcagcattcagataaaaacacagagcaggggcttaattcatgggactgggtgagccatttgcatggaggtgactgctggggcacaaagaatacctagacagaaccttggaggctaaggacatctggatgtgaaggaggaagaacagctgaagaatagccactgctgatacccagccaaaggggcagggcagctttccctctgcattatctacaaggcaacttgttccaaccgagttgattcaaaagagttaactattgcagaggaagggcttcctgaaca

SEQ ID NO: 1951 - DNA, 1200 bp, Homo sapiens
  misc_feature (1)..(1200): DMR13:53969801
ttgacaaacatctaccagcaccaagaacacccaggaaaacatgaaatcagtcaaaataaggaactggtgaccaatcctggagtgacagagatatgtggcctttcagacaggaaattcaaaatagctatcttaaggaaactgaatgaattgcaaggtaacatggaaaaggaatttgaaattctaccagagaaattcaacaaagaaatataaataataactggtcactaccattcaacaagtctccaggaagtttcaaactttccattttctttgtctttttatgagccctcaaaactgttccaacctctgcctgttacccagtttcaaagtcacttccacattttcaggtatttttacagcaatgcctcacttttctggtaccaattttctgtattagcccattcttatattgccacaaagaactacctgagactgggtattttataaagagatttaattagcacaggttctgcaggctgtataggaagcatgactaaggagggctcagaaaacttacaatcatggcagaaggcaaaggggaagcaagaacatcttacatggtaggagcaggaggaagagagaatgaagggggaagtgctatacacttttaaacaaccagatcttgtgagaactctatcatgacaaagcggtagaaggatggtactaaacattagtatccaactccatcattcaatcacttcctaccaggccccacctcaacacttggtatcacattcaccacgagattttcatttggacacagagtcaaaccttatcacccacatgcaccacttttttcaacatagtactggaagtcctagctagagaaattacaccagagaaagaaataaagagcatccaaattggaagaagtcaacttattcatgtacacagacaatataatcttctatttaaaaaatcctgaaggctctaccaaaaaaaattttatagaactaatgaacaaattcagtaaagtttcaagacacacagtcaacttataaaactcaatagcatttctgtagaaagcagtgaatactctgaaaaggaaaacaagaaagcaatctcatatacaacagctgcaaataaaataaaatacttaggaataaacttaaacaaaggagtaaaagatatctacaatgaaaaccataacacattaataaaagaaactgaagaggattcaagaaaatgaatattccatgt

SEQ ID NO: 1952 - DNA, 300 bp, Homo sapiens
  misc_feature (1)..(300): DMR13:54163501
cagtgatgagtttttaaaataaaacgcaagtttgcattataatttttttttttgagacggagtctcgctctgtcacccagcctagagtgcaatggcgcaatctcgtttcactgcgacctccgcctcctgggtttaagtgattctcctgcctcagcctcccaagtagctgggattacagatgcctgccccaacacctggctaattttttgtatttttagtagagacggggtttcaccatgttggccaggctggtcttgaacacctgacctcccaaagtgctaggattacaggcatgaacca

SEQ ID NO: 1953 - DNA, 1600 bp, Homo sapiens
  misc_feature (1)..(1600): DMR13:54736501
tgggttcttggtctcactgacttcaagaatgaagccgcgttccctcgcagtgagtgttacagctcttaaggtggcgcgtctggagtctgtcccttctgatgttcagatgtgttcggagttttttccttctggtgggttcgtggtctcgctggctcaggagtgaagctgcagacttccgcggtgagtgttacagctcttaaggtagcgcgtctggagttgttcattcctcccggtgggctcgtggtcttgctgggctcaggagtgaagctgcagatcttcgcggtgagtgttacagctcataaacgcagcgtggacccaaagagtgagcagtagcaagatttattacaaagagcgaaagaacaaagtttccacagtgtggaaggggacccgagggggttgccaatgctggctcgggcagcctgcttttattctcttatctggccccacccttttgtcagggcgctgattggtgcctttacaatccctgagctagatacaaaggttctccacgtccccatcagattagttagatacagagtttccacacacaggttctccaaggccccaccagagcagctagatacagggtgtcgattggtgcattcacaaaccttgagctaaacacagggtgctgattggtgtgtttacaattcctgagctagatataaagactctccacgtccccaccagactcaggagcccagctggcttcacctagtggatcccgcactggggctgcaggtggagctgcctgccagtcctgcgccgtgcgctcacattcctcagcccttgggtggtcgatgggactgggctccctggagcagggggtggcgctcgtcggggaggctccggccacacaggagcccatggagtgggtgggaggctcaggcatggcgggctgcaggtctcgaggccggccctgtgggaaggcagccaaggcccggcgagaaatcaagcacagtgccggtgggccagcactgctgggggactcagtacaccctccgcagccactggcccgggtgctaagtcccccattgcccggggccagcagggctggctggctgctccgagtgcagggcacaccaagcccacgcccacccggaactccagctggcccacaagtgctgcacacagccccggttcctgctcgtgtctctccctccacacctccctgcaagctgaaggagtgggctccggccttggccagcccagaaaggggctcccacagtgcagtgggggactgaagggctcctcaaatgccaccaaagtgggagcccaggcaggggaggtgccgagagcaagcgagggttctgaggactgccagcacgctgtcacctctcaagagcacagtcacttggacctggagacagagagagttatgttgagaaatgcaatcagactacaataactctaaatggagggaaccaaggtaatatatacgccaacttaactcttttcccttctctagaaattccgctggtattgacctttgtataaaaccatgaggaagcctgaagataaataaatccttgatattgttcatttgggttggctttgaagggcacagagcaaagggtgtctcggagggaacagtgaaaat

SEQ ID NO: 1954 - DNA, 200 bp, Homo sapiens
  misc_feature (1)..(200): DMR13:54902201
aagccagaggagctgatttgtagtgagatcaaatttttacttaaaaaggaagaaatgaataaaaactcaaagttaaactttggagaagagagggatactagtgttaacagctaaaattggagaggagagaaatactagtgttaacagtgagagattcccaaataaaactttttacataagtgagatgtgaattcttttga

SEQ ID NO: 1955 - DNA, 200 bp, Homo sapiens
  misc_feature (1)..(200): DMR13:57600401
gagaagattttggttcaaattatggctctgcaccaacggtgttttttatttgtagctgcttcaacagttgcgattgattgtttttatggctagtcctgattgcaccataattgggacattgggtttgttttgtttttgttttttgtctctgtttgaatgagttactacagaatgaagaaataggtaagcaaagtgtttga

SEQ ID NO: 1956 - DNA, 300 bp, Homo sapiens
  misc_feature (1)..(300): DMR13:57932701
tcattctccaacttttctcattgtaaatgatcattctctgttaataataagtcttcttgcttaatcaaagacaaaccggaatttacacctgagaaagctgttatctattctttaaataacttttcttctccaaattggaaagataggaattaatcaatctctatgcttcatacattaagttatagttttaagaaaaataaaaattccctaagtgggaatgcttgatttctagggcttccataagactaataaaaacccaacatgatgatctttcacctggctttacgaacttatctttat

SEQ ID NO: 1957 - DNA, 3200 bp, Homo sapiens
  misc_feature (1)..(3200): DMR13:59257601
cccaaggcagctacgtgggctgtatcactcattaccctgatgggctaagagcactaacagacgtgaaacttcttgtccaactaacagctatattttcattgctctagaaaaaaaaaaatggaacattcaacattatacctagggaacaaaaatgaaaaatacctaaaaagataagaagaataatgacaagtttgtgattagtattccccatataaattactaatagcataataaacaaccctaaatgcctcagtgaatctgatgtgtttctgaatttagtgtggtgtttctgctcaaatcaaaagatgtttctataactattattttacatgagttcacatcctatgggtctttctttgaacctggaatttaagcaaacctcaaatctaattataagccgttagggttcttcttcctccaaaaatctgaggatagactgaaatccttttcatatttgcatgaaattgatatggtaagtatagttccctattaagagacttctcaagcaaagataaatgtaagcacatttcaaaatgttccaagtatcatccagtctttgccttttactacatcaaccatgagccaagaaaaaaaaaaataggaaaaaagtagtttgtgccttgagcaaacagagatgaataacagcgaaaatccaaacataccaacctgatagtctcttttaaggaaataaaagtaacacagacttctgagaaaatataaatgccatagggtgctaaaaatatcagttatataacacgaagggagaagcggcaagggagttgttcataaagaaaaatcttccccaaaccccacataacaagccaactcacacaatactcaagagaactttattcttttgctgctccttccctggatggccaaaagtacaaatccagtaaatgtatgttgataggtttgagtctgggagaaacaataccctaacattacaagtcttggatatagcctggcaaatatatggccaaaccagaaaattctccattcattacaaaagaactgcacaaccaacatggtgagtacattaaattacactgagtagtatttactggccctacaccttttgaaaaaattgccttacatttttaaaatgacaaattgtttaagtagttttagagaggttagaaattagacacatacctaccttgatctagcaccctaccttagaagaacaacagctgccaaagatatcaggttctcaatcctggaacctgtaaatgtcacctaatgtggaaaaagagtctttgcagatgtgattaagttaatggtcttgacatgggaaaatgatcctggattatatgaatgggccctaaatgcaatcacaagtgtgcttgtaggagagacacagagggacatttgatatggacaaagaggagaagcgatatgaccatgaaagcagggattgcactgatgtggccacaagccacggaagccttagggttaccagaagctcaaagaggcaaaggagtcttccctagaacctgcatagagagaggtgtccttgcccacaccttgattttggcccagtgatactgattttgggcttctggcctccagaactaccatagaataactttttcaagtttgtagtaacttgttggagcagccacaggaagctaatacagatgccttgggtgtagtagagaatggggaaatttctcatcattcactctgcactcaccagttctacacaatgtgctcggggccttgggtgtgtaacctcataaaagaggcagagctttaactgctttaactgaagcctgttgagtacaggcagtctcctgcgtatcctcacaccagaggagattcaaacttctgtggaatcagaacaggcaagcccactcagtagcagttaggcagagggtaagtgactacatccctttcgatgcaaattactgcagccagttccaactggaaacattgtggtagcacctcagtttgtacgtctcactggtagggagaactcagaggccagtgcggagtgataggaagggcggctcctggagtagggtactcttttctcggtccagcattcatcaacaaagtgactttgagcaagttaccaacctacttcacaacagtgtcctagggcagctttgcaattaatttgtaaatgccctttggcccacagaaaatccattcagcctgtgagatttgtatctcccagagctactgatttgcataccatgcagctatgccaaggaggcaagcatctgcctgcagtaaatgcaaaggcagagttctcttctatacacgcattccctggaaaatccaaattacaaagaaaggaagagggagactattacatttgcttcagtgccattgactgaatcctatttgacccattctgattatgtttagcaaacaggtatactggcgagcatttatttcctcggacctgagagactatgggcaaaatgtgttcagatgcttttggatcctcaggaaaagggcactgtataaatccaggggactgttatgtgagagagacggagcctttatctcccagtcttaataaagaactaagcataaggcctatctgacttctagttcagacaccaaattgacccctctgggagttggggaagtctcaatctccttcctgccttatatagcagtggtaataaaggagcgtgagctgaggattaactaaagttcacatactgccttgaagagaaaagtcttgatttaagtgctgagaatttatattagtgggaggggaaaagactagagaatggcaaaaggaatggaaagttacacaaagttataatgaaaaatataagttgaagcaggtctaaggtaaagatgaaagatcagacacaaagtagggggtaggaaatgtgttttgtttttttttttaagaaaaaaaaaacaggctttttctccagctatgttggctccatcagggaatgctcctgtgggtcctaaagggaagcatatccattaaacaggaaaagaatcagggttctaagtggagaaaaaaaaaaaagcagcaaaaaataccagggaacaagagaaagaaaacggttaaaaggcagtaaggggcatgatgaaacaataaagaatgaaactcttaagaacttgaacaggatctctaagagtccattagcccccattcattaaaatagcaaggattgcttccctgacttcatgaaatcagagttagcccagcctgtcaccttcct

SEQ ID NO: 1958 - DNA, 3400 bp, Homo sapiens
  misc_feature (1)..(3400): DMR13:60136801
gtggtggcgggtgcctgcagtcccagctactcgggaggctgagacaggagaatggcgtgaacccgggaggcggagcttgcagtgagccgagattgtgccactgcactccagcctgggcgacagagcgagactccgtctcaaaaaaaaaaaaaataataataaataaccgttctgtccacaagactactggttattggttaaggtgtgatattaaagaatatgagggctcttttcctaagctaaaaactcatccttcttcctctggtcctatgtttctcaaatactaattctattttctccctaaaaagtaaggagaaccacatacagatgggtaacaatgttttctgttaatgacagttcctaggatgaatggtcaagagggtcactctggaattgaaagagaaaaaaagcctttatagatttttcttcaaaagaacataggagtcggggggaaaaaagtagaaacacagaacatcggtctctatattcccatttaagcaatgcatcaaaacttttattgaagatagtacatgctgtcaaaaaatggatttagagctttcagagaactgtgctaaatgctgtgaatatcaagaggcatgtgaaatagtttccccactaacttagtttacaagtaacaaagacagataaattgtagtacacaaagcaatatacaaacccaggaggtccacacacagtgaaaaagatgccaagctgtagcccaagacttttcgcaaattttatgttttctttcattggttagcatatctgaactagcaggccaatggagcaaaggatctgtccattgatatcattaggaacatgacagccaccatcagattcaagccagtaggcttgcatcaatttattattatcagaaccaaatatgtggtagcatttttaaataatctttggctgacacagtttaattccattaaaattgacttttttttttttttttttttagacacagtcttgctcggtcacccaggctggagtgcagcagtgcacttgatctcaggttcaagtgatgctcctgcctcagcctctcgagtagctgggaccacaggcgtgcaccaccatgcccggctaatttttgtatttttagtggagacagggtttcgccatgttggccagactagtctcgaaatcctgacctcaggtgatcctcccacctcggcctcccaaagtgctgggattaaaggagtgagccaccacgcctggccaaaaatttacgtcatttaagtgggttatgagggattaccaacatgaggaaaacttgtaagattaaagactcagacacaattttcataagctagatcctccggaccagctggtttttccaggtttttgtttgtttggcgtgcacaagaatcacaccaagactttctctgaaaagctagattagagggcctcagtctaccaatattcttattcagtaagtctaaggtgggacctgggaacccacatgtttaagaagtcatgcctgtaatgatgtggcagcatgcccaggaccacgtgagaaaccctactccatactccaccactatcagccattaaacattccctcagcctgcacacatatgaatttctcatcatgtagctcactttaaaaactggacatacctgaaacaagccacatgaagggtatagataagaagtacaagagtatttcaaagaagtgaaaacagagagctgataaagttgggacaggccttactgccatgaagtgaaaggtaccaattagcactgttttaagataattcaacaatctctggtatgtatgatgaattaccaattgcatcatttatttaaatgcttagtctaaggtacaaatcattcagtctcataaacataaacttagtacctaagtattaaagattgttcattgtatcagactatgacatgataccatttgcttgacaaaatgaataaatcacaggttactaacaggaaggaaggagaaggagaaggagaaggagaagaaggggaagagggaagagggaagagggaagagggaagaggggaggggaggggaggatatcttaaagaaaaaaggaaaggattagtcttctcttaatcatcttctcttaatcataatctatggctgataataggttgagatgttgctcacatttttgttttgaagtccagattattcctttccaacaataatgtatgaatatgtacttcaatctgataacatttctagcccacacacctgtgtttatcttaacgtcaacaccaattataaagactatgaaaatttaaagtaatattcctaccagccatgactctcgacacacctacagagtctatggatcatctccctggcaactacacaacacacatagatgtgaaaatattattcttcaagggctccagatttaacatctaagaaaggtccaaaaataatactgaagctttcatagcactgaggacaagagtagagctggctctttgatactacaaagaaaaacttttaagttgacatgttttttcagtccaaggtggaaaaaagtgaaaggggagatgttaggaacaggtgagaattaggaaaagctctccagcctcttttaatctgctcatttattcaaaactgcaattctgccaacctcagaaagacaaacataccatgtattactcactatccaaagcttctctactgtcatgcactcaagtatccagacctccctgcccctcaattcctccatcgtgaaaggagagccaacgagagatcagcgttaaggagaaggcatcattcaagtgtccacagcagtgaaaagatgcatttctctgagaacacaaggtttaaggaggcaacatacctgctaggaaagaactgcctctgtagaaaaaaacaattatcatattgtggcttgggactctgacctagattgcaccccacagaggctaacctaacaagtcatttttcattctaacataactccaatattctttttccttgaatgaactcattcaatgttggggtaaaataaaaggaaaaatataatggctaatttagtaacacagcttttgtacatattttaagatgcctcttcgtctatttcagttcttttcacctatactaccagatgaaaaactcttttgcaacatgtccagggaaaagcaaatcgaatctctgaaccactttacaagtaggttcagttctaggttatgggaatccaagacctttttcattgtctggagaaggctgaaaagcatttacagtatttgctatacagagaattagagatcccagaactcccagagtcaccttgaagcttatcgcaactactaaattacttctgagagtggcttagcatcctagacatcttgtccacaacacaaatttagattggatgttcctgagactgacagagcatcacccattctttcacat

SEQ ID NO: 1959 - DNA, 200 bp, Homo sapiens
  misc_feature (1)..(200): DMR13:61720901
atataattacacatcttataatgcactttgccgtcttagtccaatttttgtgaccacctgtgagccccctcagctttaagcctaaaataaagaaatttaagcagttataatacttgtttcatttttctcttaccactcatgcttgaaagaaaaactggctgtttttgtttgtttgtttgtttgtttttgagacaagtttc

SEQ ID NO: 1960 - DNA, 300 bp, Homo sapiens
  misc_feature (1)..(300): DMR13:63935201
gctctgggaattgtttaatattacaaatttgtgatcactgttctttcatgttttattttactttaagttctgggatgcaggtgcagaatgagcaggttttttacataggtatatgtgtgccatctccatggcacctattgacccatcctcttaagttccctcccctcgtccgcccacacccaaacaggccctggtgtgtgttgttctcctccctgtgtccaagtgttctcattgttcaactccctcgtatcagtgagaacatgtggtgtttgattttctgttcttgtattagtttgctaa

SEQ ID NO: 1961 - DNA, 1200 bp, Homo sapiens
  misc_feature (1)..(1200): DMR13:65973301
taaaaaatacaattgttgaatcgaagaacatgtttgttggaataaagtgtggaaaggatgtatctgaaggataaatgtgtgtattaggaggtaaatggaaatgaagccatgtaaacagcatgtttgttgcatcagcactataatatgttctaatataatggggaaagtgtagagaaatgtgtatctcagacttcatatttctttttttaattgtacattattaagggatacagagtgaaatttcattatctctatacaatgtatgatgatcaaatcagggtaattaacatatccatcacatcaaacatttctcatttctttgtgttgtgaacatttgaaatattctcttttagctttttgaaaatatacaataaattatagttaaccatattcaccctacagtgctgcagatcaccagaactcattcctcttgtattccctacactcattactctactgcttaccatcttcccctcccctacaattcccagcctttaagagccacaactctactctccacttccatgggctcaagttttttgtgtttttgtgtgtgtgtgtgtgtgtgtgtgtgtgtttaatattagctctcatatatgagtgagacattcagtatttattttttgtgcctgaactattttgcttaatatgatgtcatccagtttcacctatgttattgcaaatgacagaatttcattctttttaatgactgaatagtattccattgtgtttgcataccacaacttctagccattcacctgttgatggacgtttaggttaatgccatatcttaactattgtgaacagtgctccaataaactttggataaatatccagtagtgggattgctggatcatgtggtagttctatttttagtttattcagaaacctccacactatttttcataatggctgtactaaaaaacattcccaccaacagtatataagggctccatttttttcacatccttttcagcatctgtttttgtcttttttatgatagccattctaattggggtgacataatattttataatggttttaatttgcatttccctgatgattagtgctgttgagaattttttgtatatttattggccagttatatgtcttattttgaggaatctttattcagatctttttcctattttaacggtattattattatttgctcttgagttgttattagtcccttgttgg

SEQ ID NO: 1962 - DNA, 200 bp, Homo sapiens
  misc_feature (1)..(200): DMR13:67248001
atgctagtttccctttcctcatttctttaacttttccatggcaaggaaccctcaactaaggcatcccttcatccagaaagccttcaatcttccccaagaaccattctctttttccccaccagtttctttggtcacacatatcctctcatcattctgtcttcttctatctcactgaatggcctctatacatatttatcaat

SEQ ID NO: 1963 - DNA, 200 bp, Homo sapiens
  misc_feature (1)..(200): DMR13:68307101
taaatatttaaagaagtgatctaagtcccaatatcaggagacgaaaggcagaggatcatgtagggactcatggttagtgggagagactggctagaataaaggaatgtataacagatttttaaaaataataattcacttgaaattttattgatatttttctcatcagataatactgtatcaatttgcaatttctggcacga

SEQ ID NO: 1964 - DNA, 200 bp, Homo sapiens
  misc_feature (1)..(200): DMR13:68772601
tatctattggttgttgttaaatgtatttaaaacatttacaataattaatattagcaaatgaaaataatgttactaagcaaaacacaataaaccatcattctgagcaaactgtcgcgaggacagaaaaccaaacatcgcatgttctcactcataggtgggaattgaataatgagaacacttggacacaggatggggaacat

SEQ ID NO: 1965 - DNA, 500 bp, Homo sapiens
  misc_feature (1)..(500): DMR13:69149501
ggaggcagaggcgggtggatcaccgaggtcagaagttcaagaccagccaggtcaacatggtaaaaccctgtctctactaaatatacaaaaattagctgggtgtggtggtggttgcctgtaatcccagctactctggaggctgaggcaggagaatctcttgaaccagggaggcggcggttgcagtgagccgagatcgtgctattgtgctccagcctggacaacaagagtgaaactttgtctcaaaaaaaaaaaaaaaaattctaaagataacgtaaacgagcacacattttccatgcaattagccacttttacagaccaaactcttatagaactgtatgcagtaggttaccatgtttcttatccattgacaagtcttagctttcagcaatgtcctcattttattgacactaaccaggaaagacacacaccatcagtctagttgtacacttatcagtaaatatttcatagttctgatgctgatctttttttttctatttctg

SEQ ID NO: 1966 - DNA, 1600 bp, Homo sapiens
  misc_feature (1)..(1600): DMR13:69901201
catattttaattcttaattgtgaaaacagaaaaaaaatgaaaaagaacccacatcacaagaaaatgtcctaccattatcaagaatataaatgtaactaatatttattttactgtgcaggcactttaacctaagtcacctttacacttaactttgtttgttgtgatagtactaaggactagagtaggtaaattaatttccaagaatgagttgagggataaattaaatgtaacaatgaaggaagagttgcagacaatttgaaagaagtgtctatgatatgcttgggtgacaatgatgactctggtcagggatagacagatgacatatttttggcaaaagaaaacaaaaaatacagcagaatgggtttagggacaagagtattttcagtcaagtgatgtgtttacaatcttactgtaacattttaaagggtaaatagtgatcaaatttttgaatgttgacctaaattttgaaacaaatttgcaatgtggttgcaaaataaattgatgatatctgttgcagtaatggaaaagtttaggagatagttaacatattgtggagcacaatgagtttttcattttctttctttttctttttttctttttttttttttttttctgagacggagtctcgctcttgttgcccaggctggagtgcaatggcgccatcttggctcaatgcaacctctgcctcacgggttcaagcgattctcctgcctcagccttccgagcagctggggttacaagcatgtaccaccttgctcagctaatttttttgtattgttagcagagacagggtttctccatcttggtcaggctggtcttgaactcccaacctcaggtgatctgcccacctcagcctcccagagtgctgggattacaggcgtgagccaccacgcccagcccacaatgagtttttttataagacttgtcacttttgaaatgataaggcacaatatattggaaatatttgacaggaagccagaaatgtaagttcctgaaaggtattgaaaagatatgatctggagattttttaactaatgaagttttaaatttctttcatgtttgttcaacatgggctggtcttagaacaggaagaaaaggagattctcatgaggtagagaaggcaacgacaggaacattttaagtagaggttaattaacaaaatatagaaagctcatggacaatgagaactgagaaaaaggacatagatttatcatggtatacttgaagagtattttcagtcaagtgatgtgtattgtaacattttaaagggtaaatagtgaagaattaaaataattttggagaactacagtactgaaagagagaattctggattaagaaaatgtggcatatatacaccacggaataccatgcaactacaaaaaatgatgagttcatgtcctttgtagggacatggatgaagctggaaaccatcattctcagcaaactatcgcaaggacaaaaaccaaacaccacatgttctcactcataggtgggaattaaacaatgagaacacacagacagaggaaggggaacatcacatatcggggtctgttgtagggttgggggaggggggagggatagcattaggagatacacctaa

SEQ ID NO: 1967 - DNA, 700 bp, Homo sapiens
  misc_feature (1)..(700): DMR13:71508601
ggactacaggcatacaccaacttgggtaacttttttttttagtttttgtagagacaaggtctcactatgttgcccaagctgatctcgaactcctgggctcacgccatcctcctgcctcagcctcccaatagtgttggaattacaggcaggagccactgcacctggccaaattaatattgttaactaattacatggctgtagtttgagtttatctacatgtcctcaccctaagcatattaaaaataatataaaaaacttagtttccccaaatgcatttcactattatcatctctattcctcgcagtgataccaccatctttgaaattattctaagaatagctttgatttgatgtatttaacttttcttctcacatatacactcaccaaattatcccttcaaaatattcttaacatttctgtgtttctcttcaactgtcaccctacaccagggtgtataaatgtactattagtatatttaaccttaacaggtgcattgcttttgactgatctttctactaccacacctcactccactcattaataaaatatatgatttaattgcctgctctctattcattataaactgaattctcaaactttcagcatgattttgaaagaaatccagaatctgatacaacctctgtctctactaatcttatcaactgagtccaataatgaaatgtgctaggtacagtgaaac

SEQ ID NO: 1968 - DNA, 800 bp, Homo sapiens
  misc_feature (1)..(800): DMR13:71644901
tctgtttcttttctgtatttgccaagaatagtaaaggagacttctgagaagagaccatctaacctgaatcatgaatggaaaaaaaaaatcaagttttattcatagaatattaaggatacaaacacggtgtttcgaaaaatgtggttaagcctagataccagaatccaaagcaagttggaataattggttttcattaaattagtagagggttttagaatcaacgagcaggtttgattttacgcaagaaaccataaagtgctactccaagtttaggaggggaagcattgtcggaagagcaattgataaacatgattctcccccctctttatttactgcataattttgacataggcatataactggggagcttaagaagaaaaaggtgaagaaaaatgcagaaatatcaactactttctagaacgaaacactgtagtttagaatgtacataagtgaatgacaagttgcatgtatgtgcgtaaacgatttagtaatagcaagagtggtcatggtttataatttcaatcatctcatttactcttctttaagagaaaaagcctgaggtacatttagaaggtgatctcaaggtcagagaagcatgggagagtaacaaaagcaggtatctcaagtctaattctttgttccattaatcagatttttatgggcttgggaaagttgtgctacagtacacagggaggataagaataaggaaagatcaagggaattcaaaggatttattaaaagtgcagacagtaactccgactagtgtttttgctagacagacacaattaattaattgtaac

SEQ ID NO: 1969 - DNA, 2800 bp, Homo sapiens
  misc_feature (1)..(2800): DMR13:72268801
gagtttcttaatcctgagttctagtttgattgcactgcggtctgagagacagtttgttataatttctgttcttttacatgtgctgaggagtgctttactttcaactatgtggtcaattttggaataggtgcagtgtggtgctgaaaagaatgtatattctgttgatttggggtggagagttctgtagatgtctattaggtctacttggtgcagagctgagttcaattcctggatatccttgttaactttctgtctcgttgatctgtctaatgttgacagtggggtgttaaagtctcccattattattgtgtgggagtctaagtctctttgtaggtcactaaggacttgctttatgaatctgggtgctcctttattgggtgcatatatatttaggatagttagctcttcttgttgaattgatccctttaccattatgtaatggccttctttgtctcttttgatctttgttggtttaaagtctgttttatctgagactaggattgcaacccctgcctttttttgttttccattttcttggtagatcttcctccatccctttattttgagcctatatgtgtctctgaatatgagatgggttttctgaatacagcacactgatgggtcttgactcgttatccaatttgccagtctgtgtcttttaattggagcatttagcccatttacatttaaggttaatattgttatgtgtgaatttgatcctgtcattatgatgttagctggttattttgctcgttagttgatgcagtttcttcctagccttgatggtctttacaatttggcatgtttttgcagtggctggtatcggttgttcctttccatgtttagtgcttccttcaggagctcttttagggcaggcctggtagtgacaaaatctctcagcatttgcttgtctgtaaagtattttatttctccttcacttatgaagcttagtttggctggatatgaaattctgggttgaaaattcttttctttaagaatgttgaatacgggcccccactctcttctggcttgtagagtttctgccgagagatccgctgttagtctgatgggcttccctttgtgggtaactcgacctttctctctggctgcccttagcattttttccttcatttcatctttggcgaatctgacaattatgtgtcttggagttgctcttctcgaggagtatctttgtggcattctctgtatttcctgaatgtgaatgttggcctgccttgctagattggggaagttctcctggataatatcctgcagagtgttttccaacttggttccattctccctgtccctttcaggtacaccaatcagacgtagatttggtcttttcacatagtcccatatttcttggaggctttgttcgtttcttttttctctaaacttctcttctcgtttcatttcattcatttcatcttccatcgctgataccctttcttccagttgatcgcatcggctactgaggcttatgcattcatcgcgtagttcttgtgccatggttttcagctccatcaggtcctttaaggacttctctgcattggttattctagttagccattcatctaattttttttcaaggtttttaacttctttgtcattggtttgaacttcctcctttagctcggagtagtttgatcttctgaagccttcttctctcaactcgtcaaagtcactctccaaccagcgttgtttcattgctggtgaagagctgcgttcctttggaggaggagaggtgctctgatttttagagtttccggtttttctgctctgttttttccccatctttgtggttttatctacctttggtctttgatgatggtgacgtacagatgggtttttggtgtggatgtcctttctgtttgttagttttccttctaacagtcaggaccctcagctgcaggtctgttggagtttgctggaggtccactccagaccctgtttgcctgggtatcagcagcagtggctgcagaacagcagatattggtgaaccacaaatgctgctgcctgatagttcctctgaaagttttgtctcagaggagtacccagccgtgtgaggtgtcagtctgcccctactggggggtgcctcccagctaggctactcgggggtcagggacccacttgaggaggcagtctgcccattctcagatctcaagctgcgtgctgggagaaccactactctcttcaaagctgtcagacagggacatttaagtctgcagaggttactgctgccttttgtttgtctgtgccctgcccccagaggtggagcctacagaggcaggcaggcctccttgagctgcggtgggctccacccagttcgagattccaggccactttgtttacctactcaatcctctgcaatggtgggcgcccctcccccagcttcgctgccgccttgcagtttgatctcagactgctgtgctagcaatgagtgaggctctatgggcgtagtaccctctgagccaggtgtgggatataatttcctggtgtgctgtttgttaagcccattggaaaagcgcagtactagggtgggagtgacctgatattccaggtgccatctgtcacccctgtctttgactaggaaagggaaatccctgaccccttgcgcttcccgggtaaggcaatgcctcgccctgcttcagctcacgcacagtgtgctgcacccactgtcctgcacccactgtccagcactccccagtgggatgaacctggtatctctgttggaaatgcagaaatcacctgtcttctgggttgctcacgctgcgagctatagactggagctgttcct

SEQ ID NO: 1970 - DNA, 900 bp, Homo sapiens
  misc_feature (1)..(900): DMR13:73660201
cagcatactttcttgcataagagtgtgttttattcatcagtttgtccctagcacttaactcagtgcctggcatagagtactcaatagatatttgttaagagaaaaagtaactgtcttcaacaacagtattcccacaaatgtgcagtctccatacagctgattcgaagaacctcaatccctctgaaaagtctgggcctaattacattaaatatagaagtgatcctatgatctcaaatgtatagcctttcaagatcaaatacaaaaagaatagactttagaacacctgggtggatagaaggaaggattgatttattcctcaaaagctttcaaaagaaggaaaagagggtaggagggagaaagggagggaagatggattcctttcagctttgagcacttcctctgaactggtaaagccaccttcgccccttcaagatcatcatgctcctccaccctaccccgcaacgctgcaaagctgcctcttctgctagggccactctcccaggcaattctaatgccacactttccatttagagtcacaacccctagtgaggtgccacagagaattgtggaagacatacaattaaaggggagaacaaagaattcagggagagatagggaattgtgggaaagaatggagccttgttggagaaagcagagaattctgggaagagcaaagagaactgtgggagaccatagaggttcactggattatggaggattgtgagagggcacagaaattgtgggaggacatggaggactgcaagagcagggagggttgtggaagggcagagaaggctgtgggagagcactgaggatggtgggagaaaactggattatggaagagaacgagattgtgggagagcacaggattgtgggaggaaacagaattgtgggtgagaa

SEQ ID NO: 1971 - DNA, 2800 bp, Homo sapiens
  misc_feature (1)..(2800): DMR13:76117201
ataacccacagaacaggagaaaatgtttgccaactatcaattcatcaaggaattaataaccagaatatatgagaaacacaactcaatggcaaaaaaaatgtaattagattcaaaaatgagcaaaatatctgaatacagcttgcttttccaagatggcagaagttttttagcgtctctcagacacttggaaatggcaagatagtacataaagatcaactctctgatctttaattcaatagggaaaacaggaactcactaaaattgtgaaggaaacctcagatccctgggaagagaatgcaggcaaaccgtccccgtgacagcatcgaactggtgtgagtgaaggccccatatgtgagagaggcagagagcctccctctgtgaccgactcacctttccactggggatctgagcaacccaggctgaggaagagcactttgtctcttaaactctggagctaacttagggagaggcttggagagactatgagagaaagaccccgggaaaagctgcagaattttcccaaacccaagaataagtgcaggatgccattttgattgcaggcacatacaaagtcagccattctttggtcacccagcagtgtgatcatacaggcattttagtcttggggcagagcttagagggcctaatctgaagtgtggtagaggcctccacaaccagaactgtggaaaataccttagcagtaggcaaaagaattgtgctctcccccagccagacctggtgtagaaggagagctgctacagcttcagtttttcctagacgatgagacttgctgtaaggtccagattggtcacctggaactggtctgcttgtgtccctgctgggtgccctagcctgaacccctgagattatggtacagtggggccctctctgctccatccccaggcagaaatttaggcatctggaacacgggcttgtctgaaccagcaggtgagttgccctatcctccctggcatagattgtagtgccatgaagcccttttcacttcatgcctaggcagatctccaggcatttgcagcacctgctcacactgactggcagcctgagttgtcccacccttcctgtgcagagatcttgtgcagtcgggccctctccgctctgtccccaagcagatctccatgcatctggagcagccactcacctggatcagcagcttgaattttccaacccttcctacatatagatgatggtgcattgcggctctctctgctgtaagcccaggcagagctctaggaattgggagcacccactctcctgaattaagaatttaggctgccccctattcccatgcagagaacttgagaaagatctttcagctccatgcctaggcatacctctgggtgattggaggttacccactggattctaccttggtgctggtgcttatgcctgccactgggggatctgtaggtgaaccttcctggtctgaccctgcccatcttgccacacatccccccaagagaggtgggagctcagaccactgggaactccacaaatcagaccattaatgaggcaactgggagtatctcccgttaaacaaagataaagtatatacctagctgtgttggccacagctggcttttacccataagcacaatatactggcttgtaagtcaaactgcacagcctaatataaagcttgttgacagaagtgcacagggctatagaagcaaagccaaaagaccctacccagcattctctacagccacacacctgaggaaaggaggagggaaagaaggaaaaaaactcaatattatagggaaataaagaaaaagaaaaaatcctacccacatataaattattataaaaattacaagtgccaacatctccagataagaagagaccagcacaaggattctggcaccatgaaaaatctgagtgtagtgacatcaccaaaagatcacactcactccccagcaatggggcttaaccaaaatggaaactcagatgtgacagaaaaagacttcaaaatatagattgcaaggaagctcaatgagatccaagaaaagattgaaaataaacacaaagaaatttctaaagcaatcctggaaatgcaggaagagatgaatatcttaaaaagtaatctgagcttatggaattgaaaaactgacttaaataatttcaaaatacaatggaaagctttatcaatggactggatcaagtagaagaatttcagagcttaacgactgttctttcaaactaagtcagtcaaaagtaaagaaaaaataatttaaaaaaatgagcaaagtctgtaataaatatgggattatctaaagtgaccaaacctgtgatgagagagagggagaaaaagaaaacaacccagaaaacatgaggggataattcaagaaaattttctctaatctctctacagaggtagccatccagatacaggaattccagacatcaccagtgaaatactatattaaaaaaacccaccaaggcatagtcagcagaccatccaaggtcaatgccaaagaaaaaaaatctcaaaggcatctagagaaaaaggtcagatcaggtacaaagggaaccccttaggctaacagtggacttctcagcagaaaccttaaaagctaggaaagactgagggtccgctttcagtgttcttaaagaaaagaaattccaaccaagaatttcttatcccatcaaaccaagtttcataagcaaaggagaaataaaatattttccagataaaaaatgctaagggaattcactaccactagacaaaccttacaatagaacattgagggagttctaaacatggaaatgaaagaatgctacc

SEQ ID NO: 1972 - DNA, 300 bp, Homo sapiens
  misc_feature (1)..(300): DMR13:79396401
ccaaaggtataattaaaaaggggaaaggaagcatcacaataaatcctagttattaaacgaatagtaaggttacaatgcaatgtcaataaatttggcaacttcagaaaaatctttgaatatcataaattgtcaagagtgacacaagaagaaacagaaatacctacacagccctatacctattaaagacattgattttataaccaaaaaatcctcacaacaaaaatttcagtcccagatggcttcactggtgaaggatcccaaaaattttaaggaaaaaaaaatagaaccctaaataaattt

SEQ ID NO: 1973 - DNA, 900 bp, Homo sapiens
  misc_feature (1)..(900): DMR13:80033901
tccaaagttctctgttagaggtgcatgacattctctaaaactattaacagactaatttttggccatagcttgttctttttccccttatttccttcctaatataatacttacattctatctagaattccaagagactttcattcctctgtttggtaaatgaaaaataaaagttacacttgcagaacttcctcctctgcccttctaatgttgtaagtgtcttgggtgatcagcatgagaggtacgaaacctagtgttattctagctgtcttcagtcaccagtaatcccatgttcctggactatgaagcaagttagaggtcttgtcagaggactgtgcgtgtgtgtgtgtgtatcagcaaaaatgaaaagtagaaaatattaaaaaatacaaaaaaattaacttcaaaaatcttaactaagttgttctcaatgtgtggtcctcaaacaaactgcatttctgacttcttagacatgcacaatctcaggccctccatagacctactgagttgaaacctgtgttttagcaaactctctgggtaattttgataaacattacaatttgagaaccacggcttgagaagaagccctccaaaaacttcaaagtagtatgcaaactaattgcgtacaagtacatttcgaacaaggttgaggctagccagggtgctttttggagatgactattcttatggctcgatgtctagcttatttttctcttttacctcctaagtgttaacatctctgcttccagtcctcttgtgaatctgttttgcccttttcttctcttctaaaggaagccttttatggttagattcagttggccgtgatgttgggatatgccaaagcaacagaaatccacacatttccttttccagatgacgagcttaggatggtcttgtggactc

SEQ ID NO: 1974 - DNA, 300 bp, Homo sapiens
  misc_feature (1)..(300): DMR13:81261301
ctaagacgtaagcttagctttctttttatttccaatggatttaatattacaagtatatataaggatatagaatcaattgggtatacttatggtaaacaaacaaaagatcaaaaacaacagcaacaacaacaaataatatttccctaattaacatggtacacagaaaattgtttccagatagacttacatctttttttttttttttgagacagagtttcactcttgttgcccagattggagtgccatggcataatctcggctcactgcaacctctccctcccaggtttaagcgattctcct

SEQ ID NO: 1975 - DNA, 1900 bp, Homo sapiens
  misc_feature (1)..(1900): DMR13:81274401
aaaagaaacttgtagaccaaaggagcagaatagagagcccagaaatgcatccatacgtttactgtcaactgatctttgataaaggtgctaagacacccgatggaaaaggatagcctgtttaataagaggtgttggaaaaactgaatatctaaatgtgaaaaaataaaagtgaaacattatcatgcatcgtattcaaaagccaatttaaaatttattaaggcttaaatataacacacgaaaatgtaaaactactagaaaaaacattgggaataaccttgttgacattggtcttggcaacagatttttggttgtaacaccaaaagtacaggcaacaaaagcaaaaatagacaagtggattgcatcaaactacaaagtctttaacacagcaaaagaaacaatcaacctgtaaaaatgaagcctactgaattagagaaaatatttgcaaaccaaatatctgataaggggtgaatattcaagatacataaggaactcatacaactcaatagcaaagaataagtaaatgaaaccaaaaaaaaaaaaaaaaaaggaacaacaacagactcaatgacccaactgagaattgggcaaaggacctgaataaacatttcccaaaagaagacatacaaatggctcaaaagtacatgaaaagatgctcaacgtcaccaatcatcatggaaacgcaaatcaaaatcacaataacgtatcacctctcaccctaaaatggctattataacaaagataaataaagataataagtggtggtgaggatgtggagaaaagggaactcctgtgcgctgttggtaggaatgtaaattggtgcagccattatgaaaaacagtgtagagattcctcaacaattaaaacatctgttgcaggaagtcagggaacccaaatggagggaccggctgaagccatggcagaagaacataaattgtgaagatttcatggacatttattagttccccaagttaatacttttataatttcttatgcctgtctttactgcaatctctgaatataaattgtgaagatttcatagacatttatcacttccccaatcaatactcttataatttactatgcctctctttactttaatctcttaatcccgtcatcttcataagctgaggatgtatgtcgcctcaggaccctgtgatgattgcattacctgcacaaattgtttgtaaagtatgtgtgtttgaacaatatgaaatctgagcacctcaaaaagaacaggataacagcaattttcagggaacaggggagataaccgtaaagtctgactgcctgtgaggccggacagaacagagtcatatttctcttctttcagaaagcaaataggagaaatatcgctgaattcttttctcagcaaggaataaccctgagaaaaggaacgcattcccagggggaggtctctaaaatggccgctctgaaagtgtctgtcttatgcagttgtagataagagatgaaatacaccctggtctcctgcaggcttgctaggattaggaaattccagcctggtcaattctagtcagactggttgtctgcttgcaaaccctgtttcctgttaagatgtttatcaatgacaatgtgtgccctgcaggacatggaccttcatcagtaattctagtttcaccctggccttgtgatctcactctgcctctctgcccttgtgatattttattgcctttgaaacatgtgatctctgtgacccactccctattcgtacacccctctccttttgaaacccctaatcaaaactggctggttttgcggctcaaagggcatcaccgaacctgctgacatgtgatgtctcccctggacatccaactttaaaatttctctaatgaattaaaatttttctagttagattatctttttaattatagaaatgtaatta

SEQ ID NO: 1976 - DNA, 300 bp, Homo sapiens
  misc_feature (1)..(300): DMR13:84848501
ggtgaagatgaactggagaaaatgtgattaacactaaaatacaagtcttaacagatatttttagaaaatttcacccagtaatgatagaatataaagtatctgctatacatgaaacatcttcagaatacacaagacgccaaatcatgaagtaagcttcagtgtatctgaaaagatttaaatcctaaaaagtattttcttcaatcacaatggaatattataattcaataacagaatgaaacttgagaaatttacaaataagtggaaattaaaataaaacactcctaaatagctaatgagtca

SEQ ID NO: 1977 - DNA, 300 bp, Homo sapiens
  misc_feature (1)..(300): DMR13:90277301
ctttcatgttgggtgattatgtcaccttagtacagtaccctctacaaccttatacctacgatctactatcctcgacattaggaaaatgatctattcctttcctaattgaatattttccttgtgagatatttcctgttagctatttcctaatagcccacccattattttgtaaagcaacctggtgataaaccaagagccacaaaaacctggcctacatatatatttttaaatgttgtttaaattatataatttacttaatattcataaacatatgcttttgaaatctcctaaacagatgga

SEQ ID NO: 1978 - DNA, 200 bp, Homo sapiens
  misc_feature (1)..(200): DMR13:92230401
atatctgtgtaacgtactattaacaaatacaaatttaaataatcaacactgaaataatttcaggataatttttataaaatcttctctttttgctatcaccaaatctacttcttgacaaattttaatactgagatttctgcaatctgtgataatcttttccttattttctctcaaaatttcaaaatcagaagtaacttaga

SEQ ID NO: 1979 - DNA, 700 bp, Homo sapiens
  misc_feature (1)..(700): DMR13:93206501
caaaacaactataataatgagaaacaggactagctggatttcctaggccgactaagaatccctaagcctagctgggaaggtgaccacatccacctttatacacagggcttgcaacttagctcacacccgaccaatcaggtagtaaagagagctcactaaagtgctaattaggcaaaaacaagaggtaaaggaatagccaatcatctatcgcctgagagcacagcgggagggacaatgatcggactataaacccaggcattccagccagcaactgctaccctctttgggtcccctccctttgtatgggagctctgttttcactctattaaatcttgcaactgcactctcttctggtccgtgtttgttacggctggagctgagcttttgctggccgtccaccactgctgtttgccgcagtcgcagacccactgctgacttccatccctccggatccggcagggtgtccattgtgctcctgatccagcgaggcgcccattgccgctcccgatcgggctaaaggcttgccgttgtgcctgcacggctaagtgcccgggttcatcctaatcgagctgaacactagttactgggttccacggttctcttctgtgacccacggcttctaatagagctataacactcactgcatggcacaagattccattcctgggaatccgtgaggccaagaaccccaggtcagagg

SEQ ID NO: 1980 - DNA, 300 bp, Homo sapiens
  misc_feature (1)..(300): DMR13:94493601
aaatgacatggacagaataaaatgtatattgctaagtctgaaagggctacatacgatatgattccaactacacaatatcctgggaacatcaaaactgtggagactgtaaaaagatcagtggttgccagaggcttgtagggagggaggaaaagatgaataagtggaatgcagcgggtttttagggcagtgaaactattctgtgtgatactgtaacagtgaatgcatgtcattatacatttgtcaaatcccacagggtgcacaacacaaagagtgaaccctcatgtaaactatgggcccaag

SEQ ID NO: 1981 - DNA, 4100 bp, Homo sapiens
  misc_feature (1)..(4100): DMR13:94546801
gcactaagaggcaaaatggcagcatttaactggtacatgaccttctaggaacattcagctggtaaaggaagaatgcctcaagtgagcatgggtacaacgccagtaaacacactgtgcatgcttccctcccaagcactagcaggccactgtgcatgcgacagcccaccccaagggaagaactagggaagaagggatgcaagaccccagaaatgccagtgtataaaaccctaagtcagaggtcaaacagggctcttgatctctcaatttgcccgcttagccctcttccaagtgtactttacttcctttcattcctgcttctaaactttttttttttaagagacagtctcactctgttgcccaggctggagcgcagtggcataatctcagctcactgcaacttccacctcccctgttcaacggattctcctgcctcagcctcccgagtagctgggattacaggcttgtaccaccacgcccagctcatttttgtatttttagtagagatggggtttcaccatgttggccaggctggtctcaaacttctgacctcaagtgatccgcccacctcggcctgccaaagtgctgggattacaggcatgagccaccgtgcctgaccctgctctaaactttttaaaaactttcactcccgctgtaaaacttgtgttcatctctcactctgccttatgcccttcagtcgaattctttcttctgaggaggcaagaattgaggttgctgcagacccgcatagattcaccatcactaacattaccttgggcagagtgctcagacctcaggttgtctgaaatgaaagtcactatcaccccagaacctgcatcctttccctactctttagaaatgtgatagctggtggcactcctgttaaatctttccatacctaagaaatcttggctgggcacactagctcatgcctgtaatcccagcactttgggaggccaaggcgggtggattacttgaggtcagaagttcaagaccagcctggccaacatagcaaaaacccatctctacaaaaaatgcagaaattagccgggcatggtggcgggtgcctgtaatcccagcaactcgagaggctgaggcaggacactcccttgaacctgggacaccactgcactccagcctgggcgtcagagtgaaactccgtctcaaaaaaaaaaaaaaaaaaaaaaatatatatatatatatatatcttctctgggtgaggacccactgctccatagagccttttctggtgagccagacaaaaacttttatttccctcatacaagtacctgtatgtttatgcacacctgtcttgactacacatctcaacagcttttcacttacagtaacatttaggaggtagcaatgttagctgtctaacagacatagcttatgcttaattcttgcaaccctggaaaggctgttatgtataaaatggggataataatatgtacttcataaggttgttatgaagagcaaataatgctggctcgtagtgggaggttaggaattaatgtccaattagagaatgaatgaataagagagaacacacagtagttcataaatatgagtttcccttccccctcaaaacagcagaaccagaaaacaagcaagacctaagcatacatctcacaatggtccttcatctgctgtccagcaacccgccacctcactaaactgactattctattttcctacgacacaaatagatagatatttcttatttttaaaatttagatctacatccctgcaacttctccccttgggtcctggctcagttcccaccagccatacaagataacatcaggtgcctgggcctccattttctttctaggacacccagtttggccttggggtgggctcccacaggtagctgggaagctgatgcccctgagtacccacgtccacccacacgtgaaaacaaaaaaaaatctcagaaagtaatttcgagcacgggtcaaagttctatttcacacttgcaggggcaagacagcaaaaggaaaaagctggttcacagcaactgtcttaggaaagcaaggcctcttttagaaacagaaaggaacgtctagacccgtggcttgtttaaacacccgctgctaggccccactgccagagctgcctatccagggccgagaatgtgcatttctaagtagttctcaggcggtgctgatgctgcggatctggggactgtactttgagaaccaccggtgcagaccctggccaacgttctttagtctgatgcgtcggggagctgtaaagctgccatccttcaccggtgggcaagtaacctggtggcgccaccccagggccagacccagggccggcctcggtgcgcctctagccagaaataaccagcactgggttccgctcaccggcaacgccaggtgggggccatctgaccactcaacagttttgctttttcttcaaattcggatacttagaaggaatgcgatgaaattgggatgaaggtgttttgctggccccgtggacagaccagacctcctcccatcggagcctcgggtctcacaccagccccccaggcggcgcgcggccccgtctcgccaccgcggcccgggtcgttcgcgtcttccggcgccgagggtgcctctgggtcccagcaccaggctccgtggcgcgcacgcgcggcagcttcttctagccccgccaggagacggcccagaagggctatgcggcgcggcctcgctcctgggggtggttaggaacgactgtttcatttcctccttcacccttcaaatctcagtttttgcttgggcttgaaggaatgggccagggtatcgtggacggagagtcttacaaaatttgagtttttgaggtcagaatttaaaagtagctgccgaaacccgggatcgaaccagggacctttagatcttcagtctaacgctctcccaactgagctatttcggcacgttctgggttgtctcctgagtaaactatcactgagcgctttgcgtccaactggcttgcttgtcttttcctggtgatcatgtacagcatttcttccttgtcctgttaaacggtgtcgtcggaattcttccacctccctccttctacgctgccactgggcgctgcacacgcgccttactttcttagattgctctcggcgcgcgcagcccgcacggtccaggagctgggtccaggcccccgatggcggctcctcgggatgctggttccgtcctcccagggccggtccccgcgagatccgaagcagcggggtcgcctcggggagctcctgcccaggcctggtagccccttcccttcgatctgcccctgcctgtgactatccacattcgtcaccttgctccccgaaaagttccaggccccaggtgaggagccgtgtaggcccaatacgattggatgaaggagtgtacggggcaggaatcgtcagactggcctctggagaggagtttgcagcctctccgtgctccgggcccgggaaatgtccaccttaatcatcacctctttgcatggagcctgactggcaaataaatgctgggtgagctcactaacgatgattattcagtcaatgctatttcccacacgagtcaacaaatgtttccgaagcacccactacgtgccaggctcattctttacttcccaaacgtcttactttttccattttttaatttttgtcgccaattaaattgtaatctgtcaaggcagggatcttacccggctctttagagctttgcatttaagtggaaacttcgcagccaatttggacggatggatggataggatggatggatggatggttggatggatggatggatggttggatggatggatggatggctgacttcaaatgcgaaagagaaaaaaatacaaaattagaaatttttgcaatctctattttctccgccaagcctcctcccttataagaaagagagtttctttctgggttcctttattgtgccaaatccaaaaaagagccgaggcgttgatggtatagtggttagcatagctgccttttaaatccaaagaaaccaaagagcttgagatttaacagaagtcagcagctaaggatgagagagagaccaaagagagcttggggctgggcagagttcagagaagggtttggggag

SEQ ID NO: 1982 - DNA, 400 bp, Homo sapiens
  misc_feature (1)..(400): DMR13:95858301
cgtttacctgcagatctcggaccacactagatattgtatgctaatgatgttatttgtagtgaggaccttgggccacaaagcatcagttcaacatctgaaggggttagaggttaaggttagtcatgcaggccgttagccaagtccacacagctgaccctcaataaaaactctgtaccacaaagtttgaatgagcttccctggttggcaatactccacgagtaccctcacacactgttgctggaagaaataagtgctatccactgtaacgggattctactgggagaggacaactgttaactttgtgtctggtctccccggaccctaccctaagcatctcttccttttgctgattttatttgtgtccttttgctataaaaactgtaactgtgagcacagctgt

SEQ ID NO: 1983 - DNA, 2100 bp, Homo sapiens
  misc_feature (1)..(2100): DMR13:96126801
gttgccatgacatcatcaaggggtcctggctcatctgggcctctatgccttcagtttttcacctctctctttagtcttctccttcacctcctttcctctacccccagctctcattctcagtagatggcctttgtttgctgctgcatcaagaaaactgggcctataaaggtgatccctacttcttctgacttccacctgaaaatttagctaccatttcggccatctttattgttttttccaatcaaagacaatgaagtgtttggcactctatttcatacctgtaatggactgaatgtttatgtccccacaaaattcatctgttgaagccctaccaaacaatgtgatagtattaggagatgaggtcatgggggtggagcctcatatgctaatgttggctactatgctaattccaatggatacttgccattcttctatgtcagtggttcccaacatttttggtactagggatgggttttgtggtgtttccatggaccgggagtggttggaggtcgggggatggttttgggattaaactgccccacctcaaatcatcaggcattagattttcataatgagcatctaaccttgatttcttgcatgtgcagtttacaatagggtttgtgctcctatgagaatctaatgctgctgctgatctggcaggaggcagagctcaggtggtgttgctcgcttgcctgccactcacctcctgctgtgccacctggttcctaacaggcgacggactggtattggtctgtggccttggggttgggacccctgctctatgtgattaatttctggttggagccgtctgttatcaggctttcttggttctccttgtatctctctcactattgccttttctgtctttctaaaattctcttttatcctaccaatgcccttcaaatgctggtgttatttagatatatgtccttagttctgctcttattctaggtacggtacttgcaggatctcacacatttctgtaatttcatctaccccttgtgtgctcattggttgcttaggaatcagagtgaagtcatctagaactgtaacattctggttatttgaactgcttaaatattagaatgtagagaagtaggaagaggtaacagctagcatattcccaaaggttttgaaataagatccccatacccactgcaacagaatcacttaagtatatatacccaaccctatccctgaatttctgagtcagtgtgattggaatggggcttgggaatctgtattgtcaaaggcttcgtgaattgcttctgttgtacacttatcgagtgattactgtatgttaagtactgggctaagttagaaagccagtgttttgttatggaaatttaaaacccttatctgttttctccagttattaagtttcctgactgcaggatgacctacgggtgggatcaaaactttcttctaaaagcagctctgaatgtgcttataactaatagagttgacgtagtgtttggttctgtcctgtgaggcatagcagtgtggtggcccagaatatttagaaggcaaagatttgccgattgtttgtcccatggatatcctctctggacagctgctgacattgagctgtgctgtgtcaggatgggtccagcatgggttggctttaaagtgcattccaagataactaagtggaagaagttgcaagctggatgtcggctgaggctctcctccttagttggctcctcaggaaggtgctgcatggttttgccctactttggtgcaaagctcatctcccttcaagttcccagggcctccattttcatctgttagtttactggagatttggggctcatgcgggaattgcatttgatatctgcagtctctctgcatctcctggttcacccctttcctggcttttctgtcttctttctcttcccctcaatcacattctctctcttccaaaaactagacaccttcccttctttgtttgatgcagagagcttgataactaccatttaaaaatgtgaatgtgcctgggagatctttcccttcatcccaagaggtttatcaaagtatttttttttcccctgtgctttttttttttggcggagttttgctcttgttgccagactggagtgc

SEQ ID NO: 1984 - DNA, 300 bp, Homo sapiens
  misc_feature (1)..(300): DMR13:97877501
cactgggcatggtggcacgcacctatggtcccacctactccagaggctgaggcatgagactcgcttgaacccgagaagcagagattgcagtgagctgagatcacgccactgcacttcagcctgggcaacagagggagactctgtttcaaaaaaaaaaaaaaaaaaaaagagattttcatgatttttaaatcaagtgaaagaatgtatgtatattttacagcaaagacccagacttggccacccttttccttccctggcatatgtaaacaagaccaaattgcctacttcagctatagcgac

SEQ ID NO: 1985 - DNA, 1600 bp, Homo sapiens
  misc_feature (1)..(1600): DMR13:98518201
tttaaatatccattttagttaatcaatggttctcaaaatgtccatcctctgacttacaccttactgtatttctacaaaagcaaaacctacacgctcccttctcacatcagagcagcttacaagttgtaacttagagactttagagggtaaggccaggggaggaagaggcctggcccaaattatccaggtttatcgctgcctcccctggaaaatcatcatttctttcttcatagttctgtattccacaataattatttcagagcgtttttttccccaccaattcttatgatttctaaaaccccattttaaaggttacaacatttttaagttcagtgaaacaggtatattttgaggaacttgaaacacaagaacggtcataagccttcttagtgttgtaacaggattgttctacgatgtctaaaatggtaaaatggttccatgcaggatcagaaaaacatttttaatactattctttcccacttaaagaacagagtggcagtgcaggacaatttttgtgtcatattattataactaccgttttatttaagtaattaccaatttgcctagcattcttaaaagtcaagcgtagataagctagctaactaaccaacattatcaattctcatcagcagtttttaacagcattaaattaaaccacagctggtaagtgagaatatcaaaagattaacattcttaagttggtatgagtttttaatactaatcataagcagtcctaaaattaggtgaataactgttataataacttaataagaaacagttttaatgacaaagtcccaccagaaatactcttccttattcaaaagagaattagaacatcaaacactttcaccacaaatatttctataggagacatttgagatgatggaactatcaaagccaggttcttttgatcacgaaggtcaaaacatctctccttgctctgaaacctgctgtgctttgtcctatcagagtccttcccattccctgctggcacctcagccaagtgctgcagaacggagaagcacgttattttaagccttaccttcagataggatccataatatttggttacatatggactgtcacactgactcagcactgtgatttcttgttgaatgtcctctatctcatcttcagcttcttccagatcaatgatctttatggcaaccactttctgagtccgattgtcaatgcctttgaacacctctccaaaggagcccttcccaattttctctagttttgtaaaaagctcttctgggtctgcctttaggttctgtagagagaaggaagagaaaagggaaactttagtccctcatagcaccacaactcctttgtcaattttatgtgtaatgttatagaccacactgtcttccagggactcatctattttctgtgtccagcatcaggctggtggtgaccacagctctgcaggttcaggacataagattcctaggtctcacctacacatgcgcatcagactatgaaaggcagcaagcgtacaataagaacaatcacccagctagattagaaaacatggaaaaaatgccaacttttgtataatgagggtaaattaaaatctaagcacttattggaatgttag

SEQ ID NO: 1986 - DNA, 3000 bp, Homo sapiens
  misc_feature (1)..(3000): DMR13:98815001
taatttttactaggctatataatctatgtaatcccacagggtctcatacacactgggtagtccagtatctattggacgagtgaatcaatgtgtacttttcttagtaatattaacgatattactagataataatagctgtccttgtctgtgaggaaataagctaagattccctttaccaaagccttgcatttctggcctatcttaggtcaaatacactgccagtgtgtatttattatcttgactctcagtggtgttgtgggactgcagtagaggtggaagaattctaagaagacctagcttcccgtggggaagacatattgtataacaaggcatacttctaataatgaaaccatcaagggcatggaacttttcccattttaaaactgtccttaggtttacttacagactaatcatttggtaccttcggttctcatttttgggccttttcaaagagaaatgtaaaatttttttttgtttgtttgtttgttttgtttttttgagacggagtctcactctgttgcccaggctgcagtgcagtggcacgatcttggctcactgcaagctctgcctcccgggttcatggccattctcctatctcagcctcccgagtagctgggacaacaggggcctgccaccatgcccggctaattttttgtatttttagtagagatggggtttcaccatgttagccaggatggtctcaatctcctcaccttgtgatccacccaccttggcctcccaaagtgctgggattacaggcgtgagccaccgcgcccggccgagaaatgtaaagtttttgtggaaaactacgaccagtccactagtaagccatggtccacacagtagatgtaaatctacaatgacaccctgtcctttgtggatcagattggagacataaagagtcttaactccacgccataccagttatagcataataataatctggtgcaattttaatgcaatctcattaaaaatgaaaaattcttctcaaagagttaccaaagttacaactatgtgtcctcaccaccacatcattgagtcatccacctattgtatcatttgttcaaatatttatcaagcatctactacatgcaaggcacagcgcttgacactggggttataaaacaaatctatataaataggatttagtttctataatttataaaaattactcaatagatttttaccaaatgtgaagggcaggttttggatggtctattaggctatgtgtcatgaatgaaatttgcttcctcaaagacacacacggtcatcctcagaggagccagaactgatgtactagagactcaagactaccaaccagaagagacgtgatatacatggtaagacacggaggacagaggaagacccaatgaattcaaatacatgcccaagatgcaagtcgcaggggcaggcactctgacttgcgagcaacgggtactgattcatttaacagtagtcagtgagtccctgggcggtagtgaggtcaggtgaagaaagaacagtcaggtgaaggaacgctccctgtctcctagagcccagagtctcgtgtgggagctaggtccaggaagagatggtaaaagatggcgggagtgcacgaataacgaaatgtgcagggaggcgggaaagagcagcatctgtccggccacaagggaaggtgaggcatggaaagctgaggagagtgatgactggctgggtctgaaaagaggatcgggttagtcaggtgaaagtgaaaggtgggggtgggaatacgaaggaaaagagaggagacagcccaggttgcaggaacagcccaagcaaaggcaagagggtgaaggcagcacagcacgggaggatttacatgtagtttgagggcctggaatctaaaatcgcaatcagagtgataagagatgaggctgtggaggtgggaagggatatcttcactgaactggcacactcggagcttcctaagtcaaacataaattaataatcaactgtagataattttatgagacataaaaacatatgtagacacacatcaaccaccataacagacaataaggtattatataaggaagatcttattacttggtattaaaatgatagtctgtgtatccaagcaagatatctgtatacagcaggctttcaggtatattttaagtagctctagatttagtcagttattaaatatatgccaaacagaatttatgggtggtctcctgagtcaaatgtttttaactgatagactaagattggggttttttgtttgtttgtttgtttgagacaggtcttgcatgtaagacgtgcttgcttccccttcaccttctgccatgattgtaagttacctgacgcctcctagccatgcttcctgttaaacctgcggaactgtgagtcaattaaaccttttttctttataaattacccatcctcaggtagttctttatagcagtgtgagaacagactaatacacccagctttttttttttttttttttttggtagggatagggtctcactatgtttcccaggctggtcttgaattcctgggttcacatgatcctccagcctctgccttccaaagtgctgggattacaggtgtgagccaccacatctagcctaaactatgattcgaatacatgctatttttactcttgtgtagtcaaattataaataagtgaatagtttaataacaacaaaacctgaatttaagtagcatataagtattgatatatgatataatgtatgtaccacatgatacagataattgagttcattatgggagaacctgttatatttgctaaaaaaaaaaaaaaaaaaaaagatgggcttcaacaagggagagtctccaaaatggctgggaaataggaaagtttgataaagtagatagagcttagtaagtaattatgaaataagtctcacaatttgatggttatcaagaactaggaaataacaaatcattaagttttatactctactgaacattatttcgtcttcttttctgactcagaggccattcaaattctat

SEQ ID NO: 1987 - DNA, 3700 bp, Homo sapiens
  misc_feature (1)..(3700): DMR13:98833501
ctacttcagttcaatttctcctccttttcctctctatggtcatggcctttacttctcattttcaggattcagtcctcttcagccctgatctcaaaacttgtttgcaagaatggagttaaagctcatttacattatgtatcccataacctgttgtaaacctcaaatatatacaataaaatttatttttaaaaagacgtaaataacctccacttaaacaggtaaaggaccttttgtcccagacacaccccggtttcctaactacttgcttttattttccaatcacttttcttccctctttttctgtgtctccctgctgccttctcatcacatagaaggtaacatacactaaatacaaacacatctttgaacattcagaaagcctcacaggggacaaaaagagcaaaacacaaatcacccttaactgttccactcagaaatatccacagataacaaggcagggtttcttatttctatctttttatccctataaactcttgctgaagatgggaaattttcacttaggaaagtaaatgacatattagaataatataaaggcatggcttatttctagcaatacagtggagactgcttctctaggaattctctgtcttggattcaggtttgaccattgtaacatggtctcttatggtgcttaatccaagagatgagcctttcagaaaatgaatgctcagtatcagtagtttctaaaagatccaggaacacagaggaaaacaaatctcgggtgtcaaaatgaggtaactggaacgaagttaatttaagacggcaaactcttcccagtcagacagttttatgtacacaattattttaaaataacgttaaaaaatcagtttgcagaagagccatttctgttacagatgcttgccaatcactaagacgacctaagcctcatgtgtctgccgaccaggctcattgttgtgcaaagcagatcacaagctgcctcgcaagcctccggtgcccatgtgctcctccctgtcttggttcctattgctcctgattatgtgttagtcctcactgtgcagttcaaatcaagaagaggcactaaaaatggaactgctaaaaacacatttccagattaaatctgtgaacacattaaaaatattataaactacttgaagtccagcattggtttgggattgtgttaataatagacattagaaaaaccagatttttctgcatgtgacaacctgtttataaaacaaacccttttatgtactaagtgagataacatgtgtgaacatgtccagatttgtatatatctgatacctgctaagtgtttggtaattttcttcttctgtctgtataagagatcattcaaataccttgatctttactcaactcacttcatctttctctctcatacacacacacacacacaaacacactcacacacatctgtcttagtggtgaacaagacctttggacaggtcagttgtgtagtgatcttgggcaaatttcctaatttctcccagccacgacttcctcatctgtaaaatgtgggataattcgatctaccaggcagagctgttgtgaagattaatgcctgaggcacagaaggcactcaatacatagcaggaagctcatgtaataataataccagaattctgagcttaaacctttcaaacattttatcttattaggagattgatttctggattgtctttggcaatttattagatgtggccaattaagagagtcagtaaccacagagctacacctgctaaagatgactttcttgaattatatcagctcactcactgttatatctcttctgatatggtccaactgatgcctgagtaaatatttgcaaagaaagatcccagtggctgcggtgccaatggacctctcgtatctgtgagtctaagccagggaagcctgtcttaccacatggcccagcatccagtaatgccagagagtgcaccatacattcgcccacctcccagctggggggaggtgagctttaaacaggaaacattttttgcatgcaggcatataaacctgcacagagatcaccttagctctagaagctcaatcttccttgggtgtctcagggatcaggccctttgccacaggaccagtgaggagcaaacacaggtaacagtgctactgtcaacctggaattcacatctgaactcctactaccttcccattctgagactggaggccagatatttagagatccaggaatagtgacaaatactcttctttacaactcttttttttttttttttttttttttttagacgaagtcttgctctgttgccaggctggagtgcagtggcgagatcttggctcactgcaacctccgcctcctgggttcaagcgattcccctgccttagcctcccgtagctgggactacaagcgcacgccaccatgcctggctatttttttgcattttagtagagatggggtttcaccatgttggccagaatggtctcgatctcctgacctcgtgatccgcctgccttggcctcccaaagtgctgggattacaggtgtgagccacttcaccaggcccctcttctttactattaagcaagcaacttgaagggggctgaattagaactgcaggctgttcagttgttcagtaaggaaaccgtcactgttctcacaggtgccactcagactgcacttgtgccccgtgtgcctgtagctcaccccatgatactgctctgcagctccagaattttctgcttatttacctggtggggcacaggaggagaggggaagaaggtgttgctgctgctgttctgaacttaatgattcatgtttgagactgatacaggtgtgcatggccagatattcacttttaaaaccttccttgcctatttactaagaatttttaactaaaaatacccaaaagaaaagagaggctccgaagcttctttcatgtttctagtagaggcactgtgatgttcaggtctcacacccagagtttctgatccagtgggtctggggagtggcccaaggatttccatttctcacatgctcccagggctgcagtggctgctggcccggataccacactctgagagcccctgtagtagaggctccaggtaatgaggcgcttctaccccgagctcattttctttaagctctcatttcccagtctctcaactgggctcctagtaatgagtttcatggggacaagagaggggtggcggctaaggagagtaaaggtatataataataaagggacacgatgtcaggaaaactctcattattcttcctaataaaggaatgtgctttatgagtagtggagacaagtaaagcagagaatgacttgggtcctatttcccaaacacccttgcaaataagcaaactgttccaatatttatggcatataaacactcattcaatttctcctttctatgctagaaatggaagtaatcatttagcaagaatgagaagtattgggttcctaaaaacaggagagtggctgaagagtccatctccacctacttgaatattatttgctaaaacttaaaaacaagacaaaaaaaaaacccctttcattttctatctccaaaacgtttttatcatttaatgcagtaacagataaaaaactgaaaacatgtgtctgtgtttattgctcctttctacataaaaatctaattaaacgctataacatttggatatatttaaagatattcaaggcagaaatgcctgattaggtgcctat

SEQ ID NO: 1988 - DNA, 1200 bp, Homo sapiens
  misc_feature (1)..(1200): DMR13:100935201
actcggagatgttccctgtgcacttgctctgagaactgagtgtaagatcccagtagacaaacgtttttaacgcacatgcaatgcatgcctatttaaatgggatggatggggaatgagcattgtttaattggctttcttattaacagaacattactaaaacacaaatcttgcattactacttttcaatcaatgattttcaaacaattggaaaagtctgttaagtattaaaacgagagtgaacagaatcaggatctggtctcaaacatcaccttgggaagaagctttccgtacccatcctgtctaaaggcacatcctgctcccattccagtcactattctcagactcccctgaagccaacaggtgcatttactccgtcatatgctagaaaatacactccacagggacctgggactgtgctcatcttgtccaccacagtatccccggcagctagaccagttcctgggcgatgttgaagctcaacatctattggtggaccagagcagtcaatttcggagtgtctcagggtcataaagagttagactgtccaaactgtgtgcctggaaggctatttctgtggaattttaaccaatgttacatgataaaggggctctgaagtcaaataaatgtgagaaataatgggatgaacaaggctaaacagatgttttcaatgtaagatttctgagaatcttcaagatacgaattatccagtcatagtccctcctcccctcttttttgaggaacatcttcaccaatattcagagaaaaagacttggggaaatgttgctgaatagcaaatgaggatgattctgattgcttgggatttttggtgatttggagtccatataaacaggcagatattgcagaatgttaaatatgcccccttaaaagagataatccattttaaatggcaaataatattttgaggtgtgcatagaagaaaggtttagtggtaatatgagagcctcgggtgttgttgaatcctaatcttatcactatgtttattttagagaaatgtaatttcctgagagcaactcagggctaagttgcaaaacctggagaagaaggaagtccagcaacatttgttgctgtttttacattttggtcttatgtgaccttcaggtttcagcagcttatccatccagtgataaaagatgcttttttttttttttcgataacagcctcttttactttgcctgttaa

SEQ ID NO: 1989 - DNA, 500 bp, Homo sapiens
  misc_feature (1)..(500): DMR13:101795401
ttaattatttcttttgtttaaggtaactagtaacttagaccttctgggatatgaggaggggaaattaaatcccctgaatctgtgaggtttgctgtctccttaaaaattcagcttttccatacccctgactcatatcatagaatagtggcagtaaggcaacacatactttctttttatcttgccttcatattcctgaaccatcagaagtagaaaataaaaatagcaatggcagcctggatagcagagaaaagcagcacaaagcaaaacgagaagccaacactagaggggcaaacctgccatgacaattactcaaccatagtacaggaatcacgtcttaggatgcacacacaatcacggtacatcaagtgagtcacagataaattcatgttgtaaatatttagtgggtgattaccatgtagccatgttaatccaaaaagttggattttgctacatgcagaaatcattagacagtattctattaagcatagaaatagctctgt

SEQ ID NO: 1990 - DNA, 1600 bp, Homo sapiens
  misc_feature (1)..(1600): DMR13:101912201
ttgaaaacacattttaagtacctcactttccattccttatacatactgtaatttattttagttaaaatgttagtaagaagcccaggcacctgctgattaagcatacatggcacataataccatagctctcatgatcacagccccaaaaaagtaaatctcaagaaacaactgcattagcagccatgccaaagatttagaaaggttattatcctgtgaacaattatggttcttgtttgattgaaaaattcataataaaaacataacacttttggggatacaatgttcattatacaccattgtagtcagtggctactttagttttcatttttgttaagattccaaataataaaactatttgcaaactgttgatttccttgtaaattcccctttctttggctaaatcaatatatgtaaatatctttgttcatatattagttaagctttaaaatgaggttgtttatgttcttgcattcttataaataacccacaaatatgtaatccctctaattctcttaaaaaaagatataattatatttatttagggaaagtaaaaaaggtataaaatttgaaaagtatttttatgtctaaaattatctagttagatcactctggttcaaggatactttcttttttagcttgggcctattaaccttccttatttcactccaatccaagggcaatgaggagaacccagtgtatggcaaacactctcaagatttgagagcctatgaagatgcagaaaacacagactttgcttcttccctacaatcagctgaatatgtatacttaattaattattatcaggtatatataaacaacaacagtgacgtatgaaataccacaggagaattatttttaattgtatccaataaatgaaggcttctcagaggagatggcattttctctcagcttttcaaaatgagaataatttcataatttcaacaggtgaatgtagaagtgaggagaagatgctagacacacagtaaagcacaaacaaaaggataaggatttgaaagcatatgactaatttgcggggtgtgtggcattgtattgtgtttgaaatctgtggaggtcggtggagggtagatggagctgaatctggaaaggtgggttgcagtcatgctgcctaccacaccattaatagccatcttgcaaatttctgtccttcacaagagtaagtcaactggtataaacatcactcttctataggggtaggggtgatggagataggaaagagtgtgggtgtagggctccaactcaataatctttacattaaataaattactacttaataaaggattttttaaaaccctacatttcaaaaatgtgtattacccttccccaaaacacaaaatgtggagctattctttattctgttttcaagcatatcacactatattctacttgacaatgtgcttaaaatttctatgcctcttttttttctcccaatgggacaatattttttccacctcaaggtctctgcacacacattgctttttctacctgctcttaaaatctctgcatccttcttacctgtcatctctcaacctgtggatcccagtgttgcccaccctgactactttatctaattagatccctc

SEQ ID NO: 1991 - DNA, 1300 bp, Homo sapiens
  misc_feature (1)..(1300): DMR13:102087001
ctctatgagcctggcttgtagcatttgaggtcaagaaaccagtcattaggacgtaaatttgtcatttgtcagaggaacacagagatccaaaaataatcctgccataatgtagttcattagattagctggtttgggaaataggtcacaggactgatataagttgatgggactggggttaggaaaggtctttgtgtaattcgcaaaattatatactttgatgatccctaaagtgtgaagatctatgcaacctgaagtagcaggcagactgaagtcaagtcagtgaagcatcagggaaggaagaaaagagaagagctgctacaatttaagggtttcctagcaatgggacctggggcaagattcctcatgtgtaccttgcccagaaatagtaaaaaatagactgtaatttcttttttttttttttttttttttgagacagattcttgctctgtcacccaggctggagtgtagtggcgtgatctcggctcattgcaagctctgcctctctggttcccgtcattctcctgcctcagcctccctagtagctgggactacaggcacctgccaccatgcctggcttttttttttttttttttttttgtatttttagtagagtcgggatttcactgtgttagccaggatggtctcgatctcctgacctcgtgatctatccacctcggcctcccaaagtgctgggattacaggcgtgagccaccgcgcccagcccagactgtaattcttaacacagagcctagcacaaagcaggtgacatgcaaaaatagtattagatgttgtctaaattagctttaccaactctgtgccttctctgtgtcagataatacactttttacatttcaactcatttaatacaacaaccatcttacagttaggaaatgaaaattccagaaataagtatagaagatgatatgtatgcagatgtttgcctgattgtaaagctcatggcttttctacttctctatatgtatgtaaaaataattttgagaatgacttatggtggttacttaactttgcatcagttctgtcatttaatattcatatctatcttatgaatttgaaattattatcttatgtaacaggaactacaaccagaaaggttaagtgccaaaatcatactttttagtaagtgggttagtttcctgttcgggttcgtttctctatgatacacaattgagacataggtactcaactgtcaacctgcaatcagtcagagactaagttgctcctgaaattttgtcactttagaaatgctgtagtttaatgaaggccactttaaaaacaatca

SEQ ID NO: 1992 - DNA, 600 bp, Homo sapiens
  misc_feature (1)..(600): DMR13:102925701
tgggcaggagatgcccttctgaggaagcgactcttgagggaagatgtggggtgagttggccatgaagacatctgggagaagagcattccctgcacaggaatagtcaaggcagaggccctacagcagctgctggggctggagcagggtgggcaagggtgagaaggagggggtaagagggagggattagaaggaggtagtgagggcctttgatggtttggctgtgtctccacccaaatctcatcttgaattgtagctcccataattcccacgtgttgtgggagggaccaggtgggaagataattgaatcatgggggcagtttcctctctactgttctcatggtagtgaataagtctcatgagatcttatggttttatatggggaaaccccttttgcttgattctcattttctcttgtctgccaccatgtaagacatgccttttgccttctgccatgattgtgagtcctcccttgccacgtggaactttgagttcactaaacctctttttctttacaaattacccagtctccggtatgtctttatcagcagcatgaaaatagaccaatccagtcttgtaggccattttaaggactttggcttc

SEQ ID NO: 1993 - DNA, 500 bp, Homo sapiens
  misc_feature (1)..(500): DMR13:104088001
atgtcctattgcatttaaccctttactggtctactgactagctatattactccattttcctactgctttgaagaaatacccaagactgggtaatttataaagaaaaacaggtttaacagactcacagttccacatggctgaggaggcctcacaattatgatggcagaaggcaaagggggagcaaaggcacgtcttacatggcagcaggcaagataacatgtgcaggaaacttctcctttataaaactatgagatctcatgagactttttcactatcacaagaacagtgcagggtgcggggaacctgccccatggttcaattacctcctaccgggtccctcccacaacacgtggggattatgagagctacaattcgagatgagatttgggtgaggacacggccaaaacatatcactagcttcttattttacagatctcatcttgagtgtcgtcttctcaggattttctttcttgagtactctactcaaggtaactccaccc

SEQ ID NO: 1994 - DNA, 300 bp, Homo sapiens
  misc_feature (1)..(300): DMR13:104758501
caaaaactagaatgaaggttgccaggggcgagggaggggcaatggggagtgagtgttcaatggcaacagagtttcagttagggaagataaagaagttctggaaatggatcgtggtaatacaatgtgaatgtacttaatgtcgtaggactgtatgtttaaaatgagtaaaacggtacatgttgttatatatgttttcagacattacaaaaaatatgttgtataacactattttgtataacacccatagattgaatctaatattcaaaaggccattcactagatgcatttctataaagactg

SEQ ID NO: 1995 - DNA, 200 bp, Homo sapiens
  misc_feature (1)..(200): DMR13:106215401
gcactaaacaaggaaaggaacaaccggtaccagctgctgcaaaatcatgccaaaatgtaaagaccatcgagactaggaagaaactgcatcaactaacgagcaaaatcaccagctaacatcataatgacaggatcaaattcacacataacaatattaactttaaatgtaaatggactaaatgctccaattaaaagacacag

SEQ ID NO: 1996 - DNA, 4400 bp, Homo sapiens
  misc_feature (1)..(4400): DMR13:106996901
gccacaccagctacattttcttcactgcaatctataccagagatgtgttcataactgcagctaatgatcagggttcaggttctgtcttgcatgagaccacattcaaggccctggaaagccacagaaatttggaatgcatcattttatattagttttgttaaagaaagtatgcaaaattgttaaactctgggctctacacagcctgcagtagcccaagagctttaccattactcatgtggaaagagactgatgaatatatttgtttatatttaaggaaactgttaagcatacctctgttatgtgtaaagtagtataaacccccagcatatccttcagatattaactaccaggtaaatccaactatcactagtcattgtgtcaagattatgcaggtaaggtaatgacaatcactcagcatttcacaagaggattggtctgcttttgttgctctgcatgtagcctaatacatgcaatatgtttggattgtgaccagtttaaaatgtaaacatccaaaactaaagccatccagattggcagcaaactactagaaagtaaacatgacaaggatttttttgagtgcccttgcaagttaatccttaaagtaacatggctatagattagaatgcacggtgacaaccagacactgaatggcaaattttgattgatagaaacaaattggtacatcttccaagtaacacggcagcatgtgaagaatgtccattttatggtttgtttccaggggccaccctcaagattggttaactagcaacctatcatttgatatttgcaggaaaggtgctggatgaaagcttttttttttttttaatcttcttgacttgtttatgatgcctcacttgggcatattcctccatgctgcaagtagacacaagaatgaataaaatccatcactcctagttcccgggtctagaaaccttaaggtcaagatgcaaccccgtttacttttgtacacacagcactgcaaacagtgagcccagtggagtaggctttagataaggtatgtgggagcggggcagagacagcagcctggaggagtgggaaaggcaaaaagaggagtaagaaaaagcaaaaggggaagggctgctgagcttgggactatctggtcacccacagcctcactccctttggatttgaaaagacaattcgatgattttgatttccatcttctcctctgattttatttttccttcctccttctctccctccctctctttcttcctcctttcttcctttttttttttttttttggaaaaattaactgtaaagttaagctgctttttgtaattaatggcctaattaatttgtaatcaactatttgtaattaatggcctaattaatttatattcaactatttgtaattaatggactaaaagttgtttttgtttttgtttccctaagttcaaagccattaatggcaaatgagcttcaggcagtccttcatctgaccacactttgttagtaattttctatttttaatttagaagacagcactctgtgcagaacactgaatgtgatttagtcaattattttccattaaaatgataaaagttaaagaaacaaaaagaatgccgcatgtcatattagaaataagggcagatactcttataattcagtgttgtttcacatggttaacagaccaagtctgtggctacatgagacaggtgataatagttaccacagctctgatcgttcaactctctaagctgcatctttataaaacgttaccgtcatatattgtaaagatttcctctcgataacacacgtgcccgtgtcttaatgtaagtctgacactggccaaataacaggccaataattggatgttcgaccatttatgaaaacggaaaaagggctttaaaatcatttagtgtacattagcacaggaaggagaggacatctcactctttagatctctctatgtttggcagatggcttcacttattcttagtgattgatattgatgggacaactctttattgtaatatggcagtttactcaatctcagggccacccatcataatttatgttgctacagtttgaaatattgaagtcagaattcatacttgagatattcttggatgtgagatggagagcaaaggacatttcccttctaatctaaaggcctccctcttcctctttcttcagctaaaatagctttgtatatataaaaacttctctctttttttttttttttttttttttgagatggagtttcactcttgttgcccaggctggagtgcaatggcatggtcttggctcattgcaacctctgcctcctggcttcaagcgattctcctgcctcagcctcccaagtagctgggattacaggcacccgccaccatgcctcgctaatttttgtattttcagtaaagacagggtttcaccatgttggtcagtctggtctcgaacccctgacctcaggtgatccgcccgccgtggcatcccaaagttctgggattacaggcgtgagccaccatgcctggtcccaaaacttgtctattttaacatctgactggaacttttggaaattcttatcaccttgccattacggagttctttagcccgttttgcaaaattgcttgtctttctgtatacagccatcgctattgcccatctattttattacttctacgcgatgctaaaaagcagacagcaacaacaaaaaatatttaaaactggtaacattggtttacttaaagaagtaaagcttttaacagtttacgaagcacacgtattttgtaggtttgcgtgactttgtcccagtataaaaaacataattaacaaataataggtaaataatgaatgactaaatagagccaactaagcaacaaaatatccatattccagcaactgccctgctttctgcttcccctaaaagcttctcattccaattagtgggaaagcctgcctttcagttgcttgggtctaaaactccggagtcatctttgatgcctccgttgctctcattcctcatcagcaaatcttgtccacgttgctttcaaagtatccagaaatcgatgacttctcaccatctctgtggatgccacgctggcctcagcctccatcgtcccttgctggacgttccagtaacctccccgccctaccctggcttccccgtcttgtccctagaatacaagctcaatagatgagcctgacaacccgttcatcatcgaagcagatcgggtcaccctcttctcaatcttctgagacttctcaaatcaatgtaagtaaaagctgaagcctctaaaatggcttatgtagctgtcccagttctagttctgacagctccctctttccaacctcttccccttctcctccagctcttgctgatgcctttccagctgcagggtgccctcaccacccttccaacacgccaagcctgctcccaaccccagggccttggcatttgctattctctccacctggaatgctcacccttcctgtgtcagcattgctcagggcatctgcacctctttctgggtggtccccactcaaacatcacttcagtgaggccttcccatgaccacctgatttaaaatgctcagccctcatgtaacataccatgtatacatatggcacattttgtgtattattttgtcgctgtagaatgtgaattctgtgaagcagggatgtagtgaagcagtgtgcttcactcagagctgtactgccagtgcgtggagtagttcctggcacatacgtggagccaaaacatattggcaaaatgaatgatccataacaaatgtgtctaaactctgttatcaaaaactcctgcagtcctattttctattccccacagcacggttgccttcacattacctaagctcgcccactgcccagaaggccctgctgcagcctttgcaagtcccggcccagcttctgccccctcttcctgacacttcctgacacttgcgacttgtccctgcctcttggatatttatacttcctaacttatatgtacattaaattcctctaaagaatttaatgtatcttttcccctttctttcttttttttttttttctttctttatttatctttttttgagacaggatttcactctgtcacccaggctggagtgccgtggtgtgatcacacctcactgcaacctcaaccccccaacacaagtgatcctcccacctcaacttcccaagtagctgggactacaatcaagtgacaccccacctggctaatttttttatttttatttttttatttttttaaattttattttatttttttgtagagacagggtctcactgtgctacccaggatggtctcaaactcctcccacatctgcctcccaaagtgctggtattacagctgtgagcaccgcacctggcctgcaagaacatagctttttcagcaaggggtgcatgttgttattagt

SEQ ID NO: 1997 - DNA, 3700 bp, Homo sapiens
  misc_feature (1)..(3700): DMR13:108706101
agatttgatttcgtaataactccaaccaacatgtacaagaaataatgataaaaccttctaccaggtaattaaaatctatatgaaagtatcaaatggaaagtgtaggactaaaaaataatgtgacaaattaaaattgaattgatgggctgaacagttgattgtacgtggctgaaaaggatttcatattgtggcagggcagtagaaaatatccagggtaatatattgagagaaagcaaagaaaggcctaagagatataaggaacatgatgataatgctgaacatatatctcagtgtgatccttgaggaggagaaggaatgaaatgggttacaagtaacatttgaagggaaaaatggtaattcggttttcagaacaaattcaagatatttagccagtgattcaagaagcactgcaaatccttctaatatgtaattgtgatcccttttgtcctccgtcttctccagtaccagtgccaactagattatacactctatgaaggtaagattgttttctatttcttctctgtacatctgcacctcttgggatagtgctaactattagtacataaaggatgctcactaaaaatttgtttcatttgtcataactgcacactggattgggattggagaatctgggtcaacctggccacgaagaccttggacttggcttacagtcttcaggatttagtcaggtccagttttgatcaagttgagtgggaaaaaagaagtctgaaagccatggccaaagtgacatgaaatgaattttaactggttgaagactgtgaggtctctggggctaaggtgggtctcggctagtgcttgattccggggtgcttcaagctaattggcccaaattcccttgccaaggctggaacctaatgcagccttgacttcatgcccagccctcatgggtctccttgtccaggagggtggctggtaacagtcttgagcatcctgtgagtgcatgtggatctgaatcaaatcagaagcaatcacataaggtgtgattgagcagctcacttgaataaagacttcaggcagagcacaccaaagctccaacaacctggctagaccctcttatcatgaccctgttgtttccaggctggacggaaacaagctaaacagtccttggatgctgattcccatggctgtctatgcttctcagtattataggaacatagggatcaatggaatatagggatcaatggaacatagggatcaatgacatagggatcaatcaatgacgtcaaggaacatagggatcaatggacacatctttgactgcctgaatttaataacctggtgacagaacaatttgtatctttacgaagtttgggtaaggatcttaagcatagtgagggtcgagggtcattgcccagactcagtctttgattgcaggcctccccatccactgcagcatgagcacctcctgtgagctcaccctgattattccggatccatgtaagggaggtctagcttaatatgcatgtattgagaatactgtgtgtcctgagggatcctgtgggacatgtggtactaggggccaaagtctcaatggcaaattaatgggaaaggatcttctatcaagtctttgccacttactaattctgtctcttccaaatgaggcgttcagaggtaatttcctgagattgtaaaatcttagcagtttttctcagaatgtcttaaagggaccatctgcaccagaatctcctgcagtgtgtgtgcatgtgtttttttaaacacacaattttagatcccacaacaaagctcctaaatcaaaggattgaagagatgggactagggcctgattctaatgggggcagaaatagctcccaaaggtgcaaaaatgggattttggaggacaaaaactcagctaaagcaatggttttgtgaccctccatccggtcacattccgtaatcagatatcccagcctgtgtgtattattacaatttcacagagggtgagggggtgataataaaaaacagattgagaagcccggaactagcaacattcatcttaataaaatcctcaagttattcttatacatcctaaagtttgagctctacttaggaaaggaaatctgtatttcagcagcattgctgtgcaaatagacatttctgtggtgttgataacataatttctatattcctgcttcttgcttctcttcttgattgacatgttaatgagataagatacaattttcaaaggctttctcaaaggactatcaactgtatggaaattctcaggcatacttttttagaagtcttcacattgatgttttcattatcatttcaggaggaaaaaaatgacactggcttgatactttgttgttattcattgtaacttctttatttagaaataaaatcaaacttacagaaaactttcccaggtaacacaagaactcccatatcccctctaaccaggtttaccaattgctaacttcttatcacctgtgattgtccttccctctgtctggaaactgtcttctgcagggcttataacaggaacagaattgagaacgcaggtatgcttagttttatcttcctttcctctgttgatgttaaatgtaacacctttgtgaattcaagagccactgtggtggagattgtgtgagaggaggtatagattgctatgcagtcacatgtccacactagctaatggggtctccaaagaccttacagataaatggtggcaatacagtatctagaaacacaaaataaatgctgacaaccaggtggactattgtgattggttattgttggtgatggtgggaagcagctgtgtagtctattaaagctacttagcaaattttatgatatattttagtccattttttaccctaatagctgaaaatttggagaatgaatgtttctttttaaatatcaaatcatgcccccccaccccctcccacaggcatctcgatggagttctgctgcagcttgatgatgaagccacaaatatacaataaatgctgaatcccttccaagcggcaacactataaaaggaagcctgcgcttcgttattctatttggtccccagatggctgttttccttaggctgtttccttgccgattttgtcataacagaaagattcagagtggtgctgccgtttcacttgactggccgctccaatcatgttattacaaagttgctatgaacccgtacctttttggataaagtattttaacagaaatttgggtaatttcccacacaattagtaattctgaggccaataaaatggatcttgatcctggctgtgattttgaagttttactctctgatgccgtttggggttaagggcacaatcactggagtcctgttgctacacttgagttctagctccatcatgtacctacagcttcagggaaccacgtaatgtaacagagcctcagcttccttattagtaaaagaaagagtgacgattatagtgtctgtattatagaggtgtggagggaattaaagtaattcttacacgtaaggtactcagtacagggttataccaaagatgttcaacatgtattcgtttcataattttcttctcaaaattattataaactaattattacacaaatgatattttcttcattgtatcttcacatttaggtctcttacaattccagtttttaacccttagcagagccatagaatttagttcacactactatctttatatgcgaagaataacctatttctctatttggc

SEQ ID NO: 1998 - DNA, 700 bp, Homo sapiens
  misc_feature (1)..(700): DMR13:109068001
aacgaatatataattccactgagccaacattcaataccacacaaatgaaacgaaggtgattattccaggaaaataaacagagatctatttgcaaccctaattcaatattttgagagttgcaatatacttttaatacaattgtgaggtccataaaaaaattcagtcccagaattctgaatatttttattaaaaaatgcaatatcagattttgaatcttggagcttgaagaagcagagggaaacaactgtttctttgcaagcagtttgttcacaagttttcttccctagattaacgattaaattagtctaccacttcaccttcctttaggaagtgggaaaggttagagagtggcccagcaggtcactctgcctccatctccaaggaagcatcagactagaagtttctctgtgtagcgttctgccatgttttactttctggaactgctggtctcatccagtaaacttataataatgggcatggctatacgcctggggtgatatttagtctttaagaatattctttctctcatcttcatgagcacaccacttcttcattgtgtatccttctgggaccactgataagccatgaattttttttttttttttttgaggtggagtttcgctctttcttgcccaagctggagtgcaatggcacagtcttggctcactgcaacctccacctcccgagttcaagctattct

SEQ ID NO: 1999 - DNA, 1100 bp, Homo sapiens
  misc_feature (1)..(1100): DMR13:111296101
tcgcgagctggcactcggggccccaggggttgatcagcactgtgttgctgctgtagccagtcatctcgtctatgaaatggaaatgctgggttagatctgtgtttcttaaacgaagttccatagttctctagagatgtgtgactatttggggtgggggaggggcagggttctcagacatccctaaaatgttaagttttgtgctcatgttaacacacatgtgtaccagccttctgtggctcacacctctgagtgttgctgtggggtcctggtgccccctggggtctccagtcgtgtggcacacagcagcccctgagagtggaatgcttgctgcaggatttttcagcactgggcaggcagacaccgagcatctacaggcacattcttggagtcctcgagtttgagaagtgctggattggtgttaagtataaattatttcattatattcgtgtttttcttactcccacctccatacggaaataagaaccaaccagctgttttgtgtatgtggttatagaaatagattataagctgatctagcacttctcaaaatgttagccacaaaaccacaagatgttaataatgatatttaaaagaaaaaaagttcagcactcaaatgcatttcagaaatgctgaatgaaagttaagtgagtatttttatggcagacttcatcagagcctgtactgtgctaagggtgcgctgtgattctccgagaagtgtagcccacaagatttcccgaaacgatgtgttgtggaacccctctcatctcccagaaacaaaacagtttgggaaacacagatcttgactgtgctagaaccatcatgaatgtgttcatctctgtctgagcctctgttatggattttaaataaagcgagagaacattatcggatcattctgctgttaaattgtttttccattctaggtaactcagggaataatgtgctatgatgtctctaaaaacacttaataatttctgagataacttgttaaatctgctttctaaaacatcgttctttaaagaagtagtcaacttacgtaaacctggctagagaacatttctttgttgttttttgaaaggtagtaaaaacttttcaatcatttt

SEQ ID NO: 2000 - DNA, 3200 bp, Homo sapiens
  misc_feature (1)..(3200): DMR13:111855901
gtttttctcacagcaccagaggtcctgaggctgcggcactggcatctagacagcctgggggccctgaccctgcaaatcttctgagcctcctcatggctacaagagggctgcagcgttgccaccgtctccatgccatccacttgcaaggcaggaacgggagacatggccaagggggatggaaggtgaggtgggcaaggtgctggccacttcctgcattggatgggacatggggctgggcagtgctcctgccagagagcaggtgctgcagagcatcacagcctcgcagcaagagccatggagggggggacagtgatgacaaccccagtccctcttcccatgcaatgtataggggatatgaggtatggttagttctagatttctataacttactctatgtatatatttatggctacccgacctgtacattatgtatgttatttctatttgtaggcgagacattgaacgcattacaaagcacaggcgatgcggtcacaggctgcagactcccttggtctccaccttggtggtggggagggtgctcagtgtgttttctgaagcaggaggcccccagggcactcccatgagttttggtggaaagtctagaaatggggttcctggggtgcttcttctctggggttctctaaaggctgtgcaggtggaactatgctgtgtcaactgtcagcgatgagctgtggctgcaggaaaggtgggggacaccgccctgctgctgccctggaggccctggtgtggaggtcccagtgtggaggtcccggtgtggaggccccagtgtggaggccccggtgtggaggctgctgccctggaggcccaggtatggaggccatggggctgatccaagcggaggctctcagctgcccgaggccctgagtgcacccggcaggagccgagggcatcctgctgtttggagccagatgaagaccccctatccttccgggggtctgtggtgccaagacaaagtgggaccacacctgaggctaatgtgcacgcccagtgctgcctggggagtcaggggatgcacagggccacagccaggccggccccagtggcaattcatcctggctgagccccccgtcacctcctcctgcagtctctctcctcttccttccccagctgcccactgagggcatcgcctgccagtcccgggaaatccacgccagaccaggaggaagggcaggaagataagtggctctgagtgttgggaacaacacaaggatgagccttcagtttcactttgttatacaacttgactgttcatacatgttacatgcatttctagtgatgcataggatggagtgtgactgttcatagatgttacatacatgcatttctagtgatgcataggacagggcataggactgttcatacatgttacatacatgcatttctagtgcttcatcggacagggtgtaggactgttcatacgtgtaacgtacatgcatttctagtgatgcataggacagggcgtgtgactgttcatacatgttacatgcgtttctagtgatgcataggacacggagtggaggagcacgtttcctgagggaatcgggagtcctctggaatctggaactctgctctggctgtgctgtggtgaaggtgccactgggcatcccgggggcatttccagccgtcgtcgttaggggagtttccagtggtggttagggatggggaacggggaacctctctggtggtcgttaggaggcggggggatgtctctggtggtccttaggggatggggggacgtctctggtgggcgttaggggacagggaacaggggacatctctggtagtcgttaggggatgggggatgtctatggcgggtgttgggggatggggggatgtatctggcagttgttaggggacgggggcacgtctctggcgggtgttaggggatggggagatgtctctggcggtcgttaggggagggaggacctatctagtggtcattagaaagacatcacagcaggcgtagcttgagatgttgatctgggagtcatcagtccgagaaagcctctaggctgccgtagcacacacagtggggtcttaaccacagaaatgcattttctcctgattctggaggctgggagtctgaggccgggtgtgggcaggacgagttttcctgaggcctttctccccggtgtgtggacgccgtcttcttccgggggcctccacccgccgtccctgtgtgcgtgtctgtgtcccaatcttcttctcttgtaaaagaaacgagtccggctggattagggcccacctccatgccctcatttttcattaattacctctttaaggccctatctccaaaccatcacattctgaagtgtggggcctcgggcttcagcgtgttcattgtgggagacgtgattcagctgtgacagtgtctagtgccacggaacgggtggacacggggcttggagaagcagcctttgcggggccttgttcactgggacactttgcacgtcatcgccttggtgcttccggcacccctgtctcctacgtcctcggaaacgggcgggtcacacgccacgtcctgagaagctcttgagcagcgctgcatggagctcacctggattcctccttcctccgtcttgctctggggaggaggctttgctctccattggcttgaaaatttatttcctgatttaccccctccaatctcaggaagtccccaaatctatcggaatcacaaggccaccctgggaaccgtggctgccagactcttcaccctgcttggctgtcggaggcctctgtattccctgccctgggaggggcatgcgggaaagatctggggcccctgcgtgccagctcccagtgtggctggagggcaagggcaggtccccgtcctcacgctccctgtagaaagagccgctgcacccccgtgaccgctccatgctgggggcagagctggcgagaagctcgaaagtaggggactgggcctggtgcgggggctcacgcctgtaatcccagcactttgggaggccaagcaggtggatcatgaggtcaggagttcaagaccagcctggccaagatggtgaaaccttgcctctactaaaaatacaaaaattagccaggcacagtggcaggtgcctgtaatcccagctactcaggaggctgaggcaggagaattgcttaaacccaggaggcggaggttgcagtgagccgagatcgcaccactgcattccagcctg

SEQ ID NO: 2001 - DNA, 1200 bp, Homo sapiens
  misc_feature (1)..(1200): DMR13:112775301
ctcgttatccgactctgccttagccccgtcctcttccttcctaccacacagcgggaggcatgggatgcacacaggcgggcttccacagtcggggggccgctgacaggaggaacccctcccagcagcttcagggtgcttttggcccagcagcctggggcctccaggacatgcctcctctaaaggggtgttaggtaactgcagttttctcctctcctacttaccgttgccagagtttttaaaaagaaggaggcgaatactttcaaatgacttatataaaaatctatattttaaatttatttctgtaagaaaaaaattggttggtacaaatatagcaaaaatgttaacatttgtgagatctgggtgatttatttccttactccagttttctgcacgtttgaattatttcataatgccccccccgcctgtaagtgggtgtatctggagaggtgtcatccttcctgaagagggacagtggctgagccacttgtgaccagggaagcccagcccacacctccacggccctggcgcagggcgggcgcgacttagttcacgacaacctagtttctgcccccagttccaacttggggtcagccagagaacagcaagtacgcccccgtccccttctccccttgccagccccacaggctgctgcgcctcccgggcgtgagcccacgccgtcaggcccacagctgccctcccagccctcttccccggaccccttcccgcctccctggcccggctggagtccctgggagcccgtggaggcggctgacctgcaggctcggagtccgtggctgctgctgcttgttccagtggctgtcgtttgtttccacggggattcatgttgacatctgttactcgtcctcaagtgagcccgtctgcatgaaggcacaccttggggctgctgagtcagccacatccttgacagttccccacagcccctgtagtgtgtcctgtgtgtgagcaaaagcgcaggccagatcccagaccctccttccatccccggactgggcgcattggagcaaattcctccatgctgcctgctccgtcctctcccttgccctgttcctttccatgctttattaacggggaaatgtggggagggtcagagggccagtgaggccagtgctgcccctcaaaaggcaggtgtctatgctgcgtgacactgaacgctgcctaaaccatctggataattgatcg

SEQ ID NO: 2002 - DNA, 400 bp, Homo sapiens
  misc_feature (1)..(400): DMR13:113628701
atacctcctttttttccctaggggcccagctctgaactatccttcccggcactgtcccatccaccctttggcacctccttggttcctgttttccctgcgcttctgcccacacacgccctccagggcttcagtgtgttgccgtgcctcctctggctgttgagtgtggctcctggtgtagggaagtgaggccgggggcctgctccatgtctgttgaatgggagactggaaggcgtcctgtggcacaggcggccggcccgagttcaccggcttcctgtgcaccaggaaggaaacgcacacacctgtgccaggtccgggagcaaagcctctgtctcgttcctgggagggctggctccaggccgcccctgtgatgctgactcagctcacagggctggtgagcagc

SEQ ID NO: 2003 - DNA, 300 bp, Homo sapiens
  misc_feature (1)..(300): DMR14:17600101
gatagagcagttttgaaacactctttttgtggattctgcaagtggatatttggattgctttgaggatttcgttggaagcgggaattcgtataaacactagacagcagcattcccagaaatttctttcggatatttccattcaactcatagagatgaacatggcctttcatagagcaggtttgaaacactctttttgtagtttgtggaagtggacatttcgatcgccttgacgcctacggtgataaaggaaatatcttcccataaaaaatagacagaagcattctcagaaacttgttggtg

SEQ ID NO: 2004 - DNA, 2300 bp, Homo sapiens
  misc_feature (1)..(2300): DMR14:18644401
gcatattctggcagcttaaattttttattattgtactttaagttctagggcacatgtgcacaacgtgcaggtttgttacataggtatacatgtgccatgttggtttgctgcacccattaactcgtcatttacattaggtacttctcctaatgctatccctcccctagcctccacgctaggacaggcccctgtgtgtgatgttccccgccctgtccaagtgttttcattgttcaattcccacctatgagtgagaacatgtggtgtttggttttctgtccttatgatagcttgctcagaatgatggtttccagcttcatccatgttcccgcaaaggacatgaactcatccctttttgtggctgcatagtattccatggtgtacatgtgccacattttctttctttctttctttgtttctttgtttctttctttcttttgttttatggaataaaaagttcggcctttttactgcatgaaactaaaattggaaaaggtgggcgtggatggggtgggagggggttgaggggagcaggagatgccctctccaccagctcctgggtaatgacacctcacttcttgcataatttctggcatcttcctgcctgcaatgccagctctctcagcatcttggagaaggggggatcacacactcatcgtcatgcttggagagtaattgtcattctgaaaggagtggaggaagttccctcctagctcgctgtcatctcgaggggtgcctggaagactgctaatactattcacgttgttaggagaattttttggaagtcatttatgttgcctgaccctaacaatccgttcatgtgttgtggctccatgccacccatgctgcccatcggaccgtccaagctgggacccatcgggaagttggaccggctgcctccaggtggcaccagattaatcaatgtgtagatgttgtcgctggaatttgttgaatctgagggactgggcatagtgggtgttcctggagggccaccaccaccagggggtcccacataggtaccaggtgatgaggaggagtatggaattgagttagcactgttagaattgggctagggtctgccggctcccgggcccatgttaatcccgggcatggcagggccaagggaattgggtggtggtctcatgccactgccgtaattctgtgggctgggactcatgggcaccatgcctcagggagggttcattctctgcattgatccttctatgtgggggtggccttgttgtcgtgtgggatccatggaattgggcagcaatggctgtttcccaggaactcctccggaggaggctggtttcccattctgatcggggggcctggggccgcctgcgtattgcggtgacataaaaggctgactgtggggtcccatcatgctgctaggattgtgaggtggaggctgtgcatgcggtgagggcagtgaccccggaggacactgaaagaaacctggcgagactcggcctcccggcatcccatctttggggggaatgttgccaagcacggggctccgggcagctgctgcactagaatcaggaaaggcttttgcttcacttgaatgttcacaagtgtctctccttttaggagctgcacagtaaaggtcccaaaatacacaccaccacgagtgcaaaaaccgaggctgttctcccaacctgatgttttttttttttttttttcccagagaatctccgataagaaggtctgtgcagatttctgtgctcctacctgcagtaaatattcgtagacgtataaagctaacttttccccagcctgccggttcgagggcaccaacgagcctttgtctttggcaaacatggtttgcagggaagagggctccaagcctcgccacagccgccaccgctccggctctcccgagctgcccctggctcccggccccctcccaggcgctcgctcgctctctcgctagctggcgctctcctcgccgcgctcccctccctcccgaccaggcgctggctccgcgctcttttcagctgtcaaagcatcagcccggaccaaggccccatcgccctggaactcctcccgtgccggctgggcctggggtgccgccgccgccgcctcccgaaaggccgccaggtctctgctagctcaggtgctcgccaggctccgcctgcaccgccctctgcgcctccagtaccgctgcggccgccgccgctggtctcatgtgtcatattttcttaatccagtctatggttgatggacatttgggttggttccaagtttttgctattgtgaatagtgccgcaataaacatacgtgtgcatgtgtctttatag

SEQ ID NO: 2005 - DNA, 1400 bp, Homo sapiens
  misc_feature (1)..(1400): DMR14:18920401
tgggtaggtgagttttctggggctgcactgcccacctctgggggcaggggttgggtgtccttttggggctcactgcccaaggctgcactccctgtggcaggcagctggttcggggcactctctggggtattgctggcggttggggggggggttggctggctatcactggctacactgcctgcggtggcgggggtggtggagggaggcagattgtgtgcactaatgtgtactgctggttgtgggtgatgggttaggggcactatattctgctccactgcctgcggcagggggtgggttgggtggttatctggagctataatgctggcagtgggcggtggtttaggggtgttatggagtgctgcacttcacttacttggggtgcactatcaggagttgcactgcccgtggtggggttggggggggcgggtttggggcactgactagtgcagcaacccccttggctgggtcgggttgtgggccctgtaatgtgctacactgcctgttgggggtggtggcttgggggggtactggggttatatgcctgcaactggcacgggatgtgttgggtgtgctatcccggggctacactgctgatggcaaggggcaggcaggttaggggtgctgtcaggggctacactgcgtggcattgttgggctgcagaggtggcagcaacagcaacagtggtggcctcctttctccttccagtgaccattcttcttttcccagattccagactctagagggtaatcttctcctgctcatgcaattgtgagcacagcagggcccccacaccccccgtggttccccagcctgtgcctcatgctgcctgttggggagaccacctgggactaccgggcagggattagtgggaatcatgggggactgtggggccagggcactgtaggtggaggcgtcaggaacaggaaccagcacttgggtggggagggctgcctaggtctgagtttttcctagtcctgctcctggaggagtgcagccctggtgggcccagcaatttctggccagctgcacctgaacaggggcactttcagcgaaggcactcacacccacctcaggccccagttcttggccagctttgccagaaggagaagctggactttggagggtgggtgtgagtgcctttcctgaaactggtccttgccacccagtggccagcgtgacaaggtgaggctctaaggctaccactctctgcatcccattctaggcttttctggctttgccctcccagctgctccaagccaggatggaggaggaggacaaggaagagtcacctgtggtaaactggagcctgcatatggctctgcagctggtctcacgagattggtggcagcgacggagactgcagctcgactggagtggtaggagggtgcccgcgggggcaa

SEQ ID NO: 2006 - DNA, 200 bp, Homo sapiens
  misc_feature (1)..(200): DMR14:18980501
gttcgtgctccaatgagtttctaatgttatcactgatctgagtggaggcagagttcaggctgtaatatgagccatggcgtgtggctgtaagtacaggtgaagcttccttggcttgcctagtgctcacctcctcctgtgtggtgtggttcataatagtccgtggactggtatgagtctgtggcctgggagttgaggacccc

SEQ ID NO: 2007 - DNA, 6800 bp, Homo sapiens
  misc_feature (1)..(6800): DMR14:19387101
ctctttgagccagcttgggcttccgtggcatgcgcacgcctcaggtaataacacgctgctcccagtgagtttgtcctgccttggcacaaattctaagtctggccagggccacagaaggccgagtgccctgggtggcaatcctggctgctttctgcacctgaacgtaaagtcctccacaagaggacctgtgatctgcctcgtggcaacaaagaagcccgcagtgacatatgatgcctgaggcatggactggagccccaaaggcagtgcacaccctgctcctgagcctgttgctcgtttctatatggctccatttgtagcacagttgttgcactgaagcttgggcatgccggccaaggccaagctggctcaaaaagcaaccagtcacctctgcaagggtgtgccaggagcaagggcacgagctaccaactagcagccggacatgtacatcacttcttctaccctaaaggtagggccacagtgccatctgcttttcctaaggcctctgttccatcagcaattaggtggcagccaatcaagctgtgggaagctggccatccccacttccttgtgtggctgaggtgctggatgctctgcctgctctaggcgcacccttgcagaggtggctggttgctctttgagccagctcggccttgcctggcatgcataggccccagtgactgacacgctgctccgagtgagcttgtcctgccttggcacaaattttaagtctcgccagggccacagaaggctcagtcccatggatggtaattttggctgctttctgcacttgaacgtaaagtcctcctcaagaaggcctgtggtctgcctcttggcaaccaagaagcctgcagtaccgtacgacccgaggcatggactggagccccaaaggcagtgcacaccctgctcctgagcctgttgctcgtttctatatggctccatttgtagcacagttgttgcactgaagcttgggcatgccggccaaggccaagctggctcaaaaagcaaccagtcacctctgcaagggtgtgccaggagcaagggcacgagctaccaactagcagccggacatgtacatcactttttctaccctaaaggtagggccacagtgccatctgcttttcctaaggcctctgttccatcagcaattaggtggcagccaatcaagctgtgggaagctggccatccccacttccttgtgtggctgaggtgctggatgctctgcctgctctaggcgcacccttgcagaggtggctggttgctctttgagccagctcggccttgcctggcatgcataggccccagtgactgacacgctgctccgagtgagcttgtcctgccttggcacaaattctatgtctggccagggccacagaaggccgagtcccctggatggtaatcctggctgctttctgtacttgaacgtaaagtcctcatcaagacggcctgtggtctgcctcttggcaaccaagaagcctgcagtgccatacgacccctgaggcatggactggagccccaaaggcagcgcacacctggttcctgagcctgctgcttgtttcctctctgtggctccatttgtagcacagttgttgcactgaagcttgtgcatgctgggcaaggccaagctggctcaaagagcaaccagccacctctgcaagggtgtgccaggagcaggtgcaccagtcaccaactaacggccagacatggtacatcacttctaccctaaaggtgggccacagtgccatctgcttttcctaaggcctctgctccatcaggaattaggtggcagccaaggcaggacaagcacactcggagcagtgtgttagcacctggcgcctgtgcatgccagggaggccaagctggctcaaagagcaaccagacacctctgcaaggtctggccagggctatagaaggttcccctggatggtaatcctggctgctttctgcacttgaatataaagtcctccccaagatggcctgtggtctgcctcttggcaaccaagaagcccgcagtgccatgtgacacctgaggcatggactggagccccaaaggcagggtacacgcttctcctgaacctgcttcttgtttcctctatatggctccatttgtggcaaagttgttgcactgaaacttgtgcatgccgggcaaggacaagctggctcaaagagcaaccagccacctctgcaaaggtgtagcaggagccggtgtaccagtcaccaattagcgtcctaccctaaaggtagggccacagtgccatctgcttttcttaaggcctctgctccatcagcaataaggtggcagacactcaggctgtgggaacctggccatccccacttcctcgagcgggtgaggtggtggatgctccccctgcactaggcgcacccttgcagaggtggctggttgctctttgagccagcttggccttgcctggcatgcataggccccagctactgacacgctgctccgagtgagcttgtcctgccttggcacagattttaagtctcgccagggccacagaaggctcagtcccatggatggtaattttggctgctttctgcacttgaacgtaaagtcctcctcaagaaggcctgtggtccgcctcttggcaaccaagaagcctgcagtaccatacgacccgaggcatggactggagccccaaaggcagtgcacaccctgctcctgagcttgctgcttgtttcctctctgtggctccatttgtaggacagttgttgcactgaagcttgtgcatgccgggcaaggccaagctggctcaaagagcaaccacccacctctgcaagggtatgcctggagcaggtgcaccagtcaccatctagcggccggacatggtacatcacttcttctaccctaaaggtgggctacagcaccatctgcttttcctaaggccactgctccatcagcagttaggtggcagccaaggcaggacaagctcactcagagcagcgtgttagtacctggggcctgtgcatgccagggaggccgagctcgctcaaagagcaaccagccacctctgcaaggtctggccagggctacagaaggcccccctggatggtaatcctggctgctttctgcacttgaatataaagtcctccccaagatgacctgtggtctgcctcttggcaaccaagaagcccgcagtgccatgtgacacctgaggcatggactggagccccaaaggcagggtacacgcttctcctgaacctgcttcttgtttcctctatatggctccatttgtggcaaagttgttgcgctgatgcttgtgcatgccgggcaaggacaagctggctcaaagagcaaccagccacctctgcaagggtgtggcaggagccggtgtaccagtcaccaattagcgtccggacatgtacatcacttcttccaccctaaaggtagggccacagtgccatctgcttttcttaaggcctctgctccatcagcaataaggtggcagacactcaggctgtgggaacctggccatccccacttcctcgagcggttcaggtggtggatgctccgcctgcactaggcgcacccttgcagaggtggctggttgctctttgagccagcttggacttgcctggcatgcacaggccccagctactgacacgctgctccgagtgagcttgtcctgccttggcacaaattttaagtctcgccagggccacagaaggctcagtcccatggatgggaattttggctgctttctgcacttgaacgtaaagtcctcctcaagaaggcctgtggtctgcctcttggcaaccaagaagcctgcagtaccgtacgacccgaggcatggactggagccccaaaggcagtgcacaccctgctcctgagcctgctgctcgtttctatatggctccatttgtagcacagttgttgcactgaagcttgggcatgccggccaaggccaagctggctcaaaaagcaaccggtcacctctgcaagggtgtgccaggagcaagggcacgagctaccaactagcagccggacatgtacatcacttcttctaccctaaaggtagggccacagtgccatctgcttttcctaaggcctctgttccatcagcaattaggtggcagccaatcaagctgtgggaagctggccatccccacttccttgtgtggctgaggtgctggatgctctgcctgctctaggcgcacccttgcagaggtggctggttgctctttgagccagctcggccttgcctggcatgcataggccccagcgactgacacgctgctccgagtgagcttgtcctgccttggcacaaattctatgtctggccagggccacagaaagccgagtcccctggatggtaatcctggctgctttctgtacttgaacgtaaagtcctcatcaagacggcctgtggtctgcctcttggcaaccaagaagcctgcagtgccatacgacccctgaggcatggactggagccccaaaggcagcgcacacctggttcctgagcctgctgcttgtttcctctctgtggctccatttgtagcacagttgttgcactgaagcttgtgcatgctgggcaaggccaagctggctcaaagagcaaccagccacctctgcaagggtgtgccaggagcaggtgcaccagtcaccaactaacggccagacatggttacatcacttctaccctaaaggtgggccacagtgccatctgcttttcctaaggccactgctccatcaggaattaggtggcagccaaggcaggacaagcacactcggagcagtgtgttagcacctggggcctgtgcatgccagggaggccaagctggctcaaagagcaaccagacacctctgcaaggtctggccagggctatagaaggtccccctggatggtaatcctggctgctttctgcacttgaatataaagtcctccccaagatggcctgtggtctgcctcttggcaaccaagaagcccgcagtgccatgtgacacctgaggcatggactggagccccaaaggcagggtacacgcttctcctgaacctgcttcttgtttcctctatatggctccatttgtggcaaagttgttgcactgaaacttgtgcatgccgggcaaggacaagctggctcaaagagcaagcagccacctctgcaaaggtgtagcaggagccggtgtaccagtcaccaattagcgtcctaccctaaaggtagggccacagtgccatctgcttttcttaaggcctctgctccatcagcaataaggtggcagacactcaggctgtgggaacctggccatccccacttcctcgagcgggtgaggtggtggatgctccgcctgcactaggcgcacccttgcagaggtggctggttgctctttgggccagcttggccttgcctggcatgcataggccccagctactgacacgctgctccgagtgagcttgtcctgccttggcacagattttaagtctcgccagggccacagaaggctcagtcccatggatggtaattttggctgctttctgcacttgaacgtaaagtcctcctcaagaaggcctgtggtccgcctcttggcaaccaagaagcctgcagtaccatacgacccgaggcatggactggagccccaaaggcagtgcacaccctgctcctgagcttgctgcttgtttcctctctgtggctccatttgtaggacagttgttgcactgaagcttgtgcatgccgggcaaggccaagctggctcaaagagcaaccacccacctctgcaagggtatgcctggagcaggtgcaccagtcaccatctagcggccggacatggtacatcacttcttctaccctaaaggtgggctacagcaccatctgcttttcctaaggccactgctccatcagcagttaggtggcagccaaggcaggacaagctcactcagagcagcgtgttagtacctggggcctgtgcatgccagggaggccgagctcgctcaaagagcaaccagccacctctgcaaggtctggccagggctacagaaggcccccctggatggtaatcctggctgcgttctgcacctgaacataaagtcctcctcaagatgacctgtggtctgcctctaggcaaccaagaagcccgcagtgctacacgacccctgaggcatggactagagccccaaaggcaatgcacaacctgctcctgagcctgctgctcatttcttctctgtggctacatttgtagcagagtagttgcactgagctgtgtgcacgccaggcaaagccaggctggctcaaagagcaaccagccacctctgcaaggctgggccaggagcaggcggaccagccaccaacctcactccctgccagacatggtacatcctttcctctaccctaaatgtagggccaagaggcagaccacaggccgtcttgagcaggactttatgttcaagtgcagaaagcaggcaggattgccacccagggtactcggcctgctgtggtccccagtgccgtacgaactctgaggcatggactggtgccatgtgctttatagaaatattaacttaagatccattaaagagttaaacgtgccatctgatttacctcaggcctctgctccatcagccatcaggtggcagccactcaggctgttgtaatctcgccatccctgcttccttgagtgggtgagcttggtggctggtccaactggtccaggcacacccttgcacaggtggctggtggctctttgagccagcttggccttgcctgccatgcacaggccccaggtactaacacgctggtccaagtgagtttgtcctgccttggaacaaattctaagtctggccagggccaca

SEQ ID NO: 2008 - DNA, 3600 bp, Homo sapiens
  misc_feature (1)..(3600): DMR14:19433401
gttgatgtgttatggggcttcattcttagttctcaatatacacttttttaacgtacagaacattgttttaaaatctgtacattaaaaataatctgctgcatcgacaatgttgcgagttaaatcacttcaaaacagtctattagtgttctaggagggaaattataatttgattggaaatcagctaaagttttgtttttgtgttgctgctcataaaggggcctgtgccctgaactctctgaggtttccacatccagggtggtgtgaggcctgcggaggcgagaaaaccaggctcccctcctcccccgccaggagggtatgtccccatcatcctcccacatcccacctcctcccagcccaggcctggttacctcttttgcttgtccttcttgttcatgtcagtgtccttgagcatgacgatgagatcctttctggggactttaccccaccaggcagctctgtggagcttgtccagatcttctcgacggacgtggtacctcggctccatgaaagcgctgtcgtcgtagtctccccaagggcccactttgctcttgccgctccccctgcagcaggggaagcagtggcagcaccacttgcccatcttgctcctgagtgtcttcatagcagagtcgtcgtggtctccagaagtgcccacgttgctcttgctgctccccctgcaccaggggaagcagtggcggcaccacttgcccatcttgctcctgagtgtcttcatagcagaatcgtcgtggtctccagaagtgcccacgttgctcttgccgctccccctgcaccaggggaagcagtggcggcaccacttgcccatcttgcttctgagaccaaatggcttcttcacagaggaggcagccggcattgaaccagcctcagccaccatctgcttttaacagccaggggaggccggtagtagccagcagatcgcgtctaccaaccagtttcaccaactagcagataactccgggtttctaatctgtttgaagagaaaagtcccgaccaaaacctgccaaccccagcaggggagcccagcccaccccacccagggaaaacccacacccacctggggaaagcccacacccacgctgggcgaccccacgcccaccccaggaagggccaaccccaccccccaagaaaacacccggcccacccaagggaatgccaaacccagaagagaaaaggtcaagtccagcaaagtaacgtgacagaaaaaacgtcagtccaaggaagaaatgtcaatccaagcgacaaacgccaagccaagcaaagaacgcaaagccaagccaagcgctacaggccagccaagccgtcacgcacgtgcagtgtgcgcatgccgactgttacagaccagccaagccgttaacgcgcgtgcagcatgcgcgtgcaagccattacaggccagccaagccattacgcacgtgcggcatgcgcgtgcaagcagttacaggccagccaaaccgttatacgcgtccggtgtgcgcgcacggcatgcacgtgcaagccgttacaagccagccaagccactgccgcgcgtgcggcgtgcgcgtgcggcgtgcgcgtgcggcgtgcgcgtgcggcgtgcgcgtgcggcgtgcgcgtgcggcgtgcgcgtgcggcgtgcgcgtgcggcgtgcgcgtgcggcgtgcgcgtgcggcgtgcggcgtgcgcatctctggtggtgtcagtacacgtggcacagacagtggccgatgcgtgcaacctgcataagccttggaaccacgaatgtcactgacagcctggtgtttcccggcaaacttcctgggagtcagccgagctttcaggccattgagaagcctctggtgaaagaaaaagcttcttgaagcaggactggggctaaggggctggaacttgaggatgctgacagcctcctctgaagaaagcccccaggacactcctggtggtgctgttgtgcatggccgctgctgcagctcagagcaccggctggcggagctggctgcaaatggcctcaaaatcacggagcatgttctcactcacaggtgggaatggaacgagaacacacggacacaggaaggggaacatcacacaccagggactgttgtgtggggggaggggggagggatagcattaggagatatacctaatgctaaatgacgagttaatgggtgcagcacaccaacatggcacatgtatacatatgtaacaaacctgcacgttatgcacatgtaccctaaaacttaaagtataataataataaaatttgaaaaaaaaaatcatggagcacaagacgcccactgagcccagcacctgcctgaggtgccttcgatacctgctcctctttgctccacacccagaacacgaggccatcagcgagggggcatttggggccacaggatcgcagccagctcctgccccggtgccccctgcctgtccaagccagggccaacatctgtggggcttctggcctggggggctctgctccactggcatgcaatagggtcaaggtgcaggccgctgtgtccaggccagcaagagggggcttggaggagcacctaccactgatggggagatgcagaaaggcaaccccacgtgcagatcctgagaacaagacactgagcctccctggtgctggcctctgagctggaccagggcagtggcacctcaatgctcctgccaggactctcctgctgcaaagctttatgcagccaggctccagtctgcttcacccacaccacaggtgctttggtgtgggaggaaaaatggattctgagcctggacaccaacctgctcttaccaaaagaagtagaggaaaagccaatcacaagtgcaaaaaaaaaaaaaggtactattttgtaactgaaatcttgcctgatatgcagggttaagctaaagctcctcttgcttgatactaaattaaattttgaatgaaacaaaaagaagacacacacactaaatttccttgttcctctgtgatcccctgagccaggaagcaagagaaagcctggcctcctggactctctccccagctggggggctgagcaatttcctccaggctcacagggagcagctgggctcagtggggccacgttgcccttccttcctacatgggcatcctcaaaccttccattgccccatacagagtaccatgatccgggttcaaatcccagctccggcactcgccacctgtgtcacctggcaaatgccttacccccagacgcttgctgtctgtgtccttcctgacaggagggatgggagctggtggccctggcatgaggtgctgtaacagtcaaacacaagcaggagcaggtagacacctgggtgggggactgccctgctgggggtgctcaccaaagagtacctacccatctgcccacgtggccttgcacatctcaacacttatcaggcacctgactatgggaaatccctaaacaaagccctgagctgccctggggaatgtgaccagggcaatgcaccaggaaggacagtctggggtgcttggcatgagtaaggataggctggggaaatgccaacctcttcccaccagctttgtgtcccagggcaccctcagtggacagagaacccagagatgccacaaggcttgagctgcatcctaa

SEQ ID NO: 2009 - DNA, 200 bp, Homo sapiens
  misc_feature (1)..(200): DMR14:20576301
cccagctacttgggaggttgaggcaggagaatcgcttgaatccaggaggcagaggttgcggtgagccgagatcgtaccattgcactccagcctgggcaacaaaagtgaaactctgtctaaagaaaaaaaaaaaagaagaagatacgttatgatcagagaaacaaagataaacttgacattagatttttcatctgaaataa

(The sequence listing continues in the following parts.)

1-10. (canceled)

11. A method for the early intervention and treatment of a male subject who is suspected of or who has been exposed to chemotherapy treatment, comprising
obtaining at least one genomic DNA sequence from a semen sample from said male subject that has previously undergone chemotherapy treatment;
identifying the presence or absence of an epigenetic modification at one or more regions of said at least one genomic DNA, wherein said epigenetic modification comprises at least one differential DNA methylation region (DMR) associated with at least one gene as listed in table 9;
indicating that said subject is at high risk of infertility or of passing heritable mutations which can lead to pregnancy complications or mutations in an infant if said epigenetic modification is identified to be present in said at least one genomic DNA sequence; and
administering an appropriate treatment protocol to said subject determined to be at high risk of infertility or of passing heritable mutations which can lead to pregnancy complications or mutations in an infant.

12. The method of claim 11, wherein said at least one gene comprises a plurality of genes as listed in table 9.

13. The method of claim 11, wherein said chemotherapy agent is at least one of cisplatin and ifosfamide.

14. The method of claim 11, wherein said male subject underwent chemotherapy treatment for a period of time at an age prior to reproduction.

15. The method of claim 11, wherein said male subject underwent chemotherapy treatment for a period of time at an age from 14 and 20 years old.
